United States Patent Application Publication US 2014/0199313 A1 - sequence listing, part 10

SEQ ID NO: 40319 - DNA, 1011 bp, Escherichia coli O157:H7 EDL933
  CDS (1)..(1011): transl_table=11
atgagtgcgttaaataagaaaagttttcttacttacctgaaagagggcggtatttacgtcgttcttttagttttgcttgcgattattattttccaggccccaacatttttaagtctgttgaacttaagtaatattctcacccagtcatcggtgcgtattattatcgcgctcggtgtggcagggttaattgtcacccaggggaccgacctttctgcggggcgtcaagtagggctggcggcagtggtggcagcgacattattgcagtccatggataacgccaacaaagtgttcccggaaatggcgacgatgccgattgcgctggttattctgattgtctgtgccattggtgcggtgatcggtttgatcaacggtctgattatcgcttatctcaacgtgacgccgttcattaccacgctcggcacgatgatcatcgtctatggcatcaactcgctttattacgactttgtcggggcgtcgccaatttctggttttgacagtggcttctctacctttgctcagggctttgtcgcgctggggagtttccgtctctcttacatcaccttctacgcgttgattgcggtggcgttcgtctgggtgttgtggaacaaaacccgcttcggtaagaacatttttgccattggcggtaacccggaagcggcaaaagtatctggtgtcaacgtcggcctgaacctgctgatgatctacgcgttgtctggcgtgttctatgcctttggcgggatgttagaagccggacgtatcggctctgccaccaacaacctcggctttatgtatgaactggatgctatcgcggcgtgcgtggtaggcggtgtatcgttcagcggcggtgtggggacggtgattggcgtggtgaccggggtaattatttttaccgtcatcaastatggcctgacgtacatcggcgtaaacccatactggcagtacatcatcaaaggggcgattattatcttcgccgtagcgctggattcactgaagtacgcgcgtaagaagtga

SEQ ID NO: 40320 - protein, 336 aa, Escherichia coli O157:H7 EDL933
  misc_feature (300)..(300): Xaa can be any naturally occuring amino acid
MSALNKKSFLTYLKEGGIYVVLLVLLAIIIFQAPTFLSLLNLSNILTQSSVRIIIALGVAGLIVTQGTDLSAGRQVGLAAVVAATLLQSMDNANKVFPEMATMPIALVILIVCAIGAVIGLINGLIIAYLNVTPFITTLGTMIIVYGINSLYYDFVGASPISGFDSGFSTFAQGFVALGSFRLSYITFYALIAVAFVWVLWNKTRFGKNIFAIGGNPEAAKVSGVNVGLNLLMIYALSGVFYAFGGMLEAGRIGSATNNLGFMYELDAIAACVVGGVSFSGGVGTVIGVVTGVIIFTVIXYGLTYIGVNPYWQYIIKGAIIIFAVALDSLKYARKK

SEQ ID NO: 40321 - DNA, 966 bp, Escherichia coli O157:H7 EDL933
  CDS (1)..(966): transl_table=11
atgacaacccagactgtctctggtcgccgttatttcacgaaagcgtggctgatggagcagaaatcgcttatcgctctgctggtgctgatcgcgattgtctcgacgttaagcccgaactttttcaccatcaataacttattcaatattctccagcaaacctcagtgaacgccattatggcggtcgggatgacgctggtgatcctgacgtcgggcatcgacttgtcggtaggttctctgttggcgctaaccggcgcagttgctgcatctatcgtcggcattgaagtcaatgcgctggtggctgtcgctgccgctctcgcgttaggtgccgcaattggtgcggtaaccggagtgattgtagcgaaaggtcgcgtccaggcgtttatcgctacgctggttatgatgcttttactgcgcggcgtgaccatggtttataccaacggtagcccagtgaataccggctttactgagaacgccgatctgtttggctggtttggtattggtcgtccgctgggcgtaccgacgccagtctggatcatggggattgtcttcctcgcggcctggtacatgctgcatcacacgcgtctggggcgttacatctacscgctgggcggcaacgaagcggcaacgcgtctttctggtatcaacgtcaataaaatcaaaatcatcgtctattctctttgtggtctgctggcatcactggccgggatcattgaagtggcgcgtctctcctccgcacaacccacggcggggactggctatgagctggatgctattgctgcggtggttctgggcggtacgagtctggcgggcggaaaaggtcgcattgttgggacgttgatcggcgcattaattcttggcttccttaataatggattgaatttgttaggtgtttcctcctattaccagatgatcgtcaaagcggtggtgattttgctggcggtgctggtagacaacaaaaagcagtaa

SEQ ID NO: 40322 - protein, 321 aa, Escherichia coli O157:H7 EDL933
  misc_feature (201)..(201): Xaa can be any naturally occuring amino acid
MTTQTVSGRRYFTKAWLMEQKSLIALLVLIAIVSTLSPNFFTINNLFNILQQTSVNAIMAVGMTLVILTSGIDLSVGSLLALTGAVAASIVGIEVNALVAVAAALALGAAIGAVTGVIVAKGRVQAFIATLVMMLLLRGVTMVYTNGSPVNTGFTENADLFGWFGIGRPLGVPTPVWIMGIVFLAAWYMLHHTRLGRYIYXLGGNEAATRLSGINVNKIKIIVYSLCGLLASLAGIIEVARLSSAQPTAGTGYELDAIAAVVLGGTSLAGGKGRIVGTLIGALILGFLNNGLNLLGVSSYYQMIVKAVVILLAVLVDNKKQ

SEQ ID NO: 40323 - DNA, 1809 bp, Mycobacterium leprae TN
  CDS (1)..(1809): transl_table=11
gtggatcacacgacgaagtgtgacgccgaacaatacttccaagcgattgtcacatcaatggccgacggagtcattgtggtagacatcgacggacggattgagtccattaatcccgccgctactcggatattgggcttacgagcccacgatgtcgttgacatgaagcatggccatccattctgcttctacgatacagacaatcagcgggttgatcttgagcgtgaggtcatgcgcgtcgtacgacgcgaagtaacaacggtaagcaaagtcgtcggcattgaccaacacagtggccagcggttatggctatcggtaaacgtgagcctgcttgcgtacaaggctcccccacactctgcactggtagtctcgttttctgacatttctgcccaccacctttcgatcgaacggctcacctacgaggcaacccacgactgtctcaccggtcttgccaatcgcaggtttgcggaagaccagatcaccaaatcactgcagcatgacgaacgctctcgattagctgctgtactgcttcttgacctcgacgatttcaaagtgatcaacgactcactaggccacgacgtaggtgacgcggtgttgcagactgtagcgcagcgactacgctcggctgtgcggcccgacgatgtcgtcgcgcggctgggcggagacgagttcatcgtactactccggggtcccctttcggacatgaatgctaacgacgtcgcaaaaagactgcacacaacactgtccgagtcactcgtggtcgaccagctcacggtgcctatcggagcgagtgttggcatccttgaggtgagacctgacgatcgacggcgggccgccgacattttgcgtgatgccgactccgcgatgtatgcagccaagaacaagaaacaatgtgccgtcacgccgcagcagctggtaccgttcgtcgcgctgatcgcactgtttgtgttttttacagctgcggccggagctaagttctatgcaccatcaaatctgctggtcattctccaacaaaccgtggtgctggcgatcgtcggatacggcatgactttcgttatcatggcaggctccgttgaactatcggtgggctcgatcgtcgcattgactggagtcaccgcggcactcgtggctgcacagaatcaattcgctgcgatcgtcaccgccctgctggtggggttggctgctgggatggtaaacggcatcgtttttgcctacgggaagattccgtcattcgttagcaccctcggcatgcttcaagtctgccgtggtatcaccctgatgatcagcgacagttctgccaaaccgatgccgtttcacggaatactgggtgcaatgggagccatgccgtggatcctcatcgtctgtcttttcgtcacaatcctggcagggatcttattccaattcaccatgtttggtcggtgggtcaaagccatcggtggcaacgaacgtgtcgcaacgttagccggggtacctacccgcgggatcaaagtcgcgatcttcgcgatctgcggactgacagcaggcctcggcggtatcgtgcttgcttcccgcctcggagccgggacacccaccgcagcaacaggtttcgagatcgatgtcatcgccgcagtcgtcatcggcggcacgcccttaaccggcggattgggacgactcagcggaacgctgatcggtgcaataatcatctcgatgctctccaacggcatggtgtttatgggtgttgggaatgccgcctcgcagatcatcaagggaattatgctcgccgctgcggtttttgtcttcctacaacgccgcaagatcggcattatcaaatga

SEQ ID NO: 40324 - protein, 602 aa, Mycobacterium leprae TN
MDHTTKCDAEQYFQAIVTSMADGVIVVDIDGRIESINPAATRILGLRAHDVVDMKHGHPFCFYDTDNQRVDLEREVMRVVRREVTTVSKVVGIDQHSGQRLWLSVNVSLLAYKAPPHSALVVSFSDISAHHLSIERLTYEATHDCLTGLANRRFAEDQITKSLQHDERSRLAAVLLLDLDDFKVINDSLGHDVGDAVLQTVAQRLRSAVRPDDVVARLGGDEFIVLLRGPLSDMNANDVAKRLHTTLSESLVVDQLTVPIGASVGILEVRPDDRRRAADILRDADSAMYAAKNKKQCAVTPQQLVPFVALIALFVFFTAAAGAKFYAPSNLLVILQQTVVLAIVGYGMTFVIMAGSVELSVGSIVALTGVTAALVAAQNQFAAIVTALLVGLAAGMVNGIVFAYGKIPSFVSTLGMLQVCRGITLMISDSSAKPMPFHGILGAMGAMPWILIVCLFVTILAGILFQFTMFGRWVKAIGGNERVATLAGVPTRGIKVAIFAICGLTAGLGGIVLASRLGAGTPTAATGFEIDVIAAVVIGGTPLTGGLGRLSGTLIGAIIISMLSNGMVFMGVGNAASQIIKGIMLAAAVFVFLQRRKIGIIK

SEQ ID NO: 40325 - DNA, 1029 bp, Escherichia coli O157:H7
  CDS (1)..(1029): transl_table=11
atgctgaagtttattcagaacaaccgtgaaatcacggcactgctggcggtgctgctgctgtttgtattacccggttttctcgaccgccagtatttaagtgtgcaaacgctgaccatggtttatagcagcgcgcaaatcctgatcctgctggcaatgggcgcgacgctggtaatgcttacgcgcaatattgatgtttcagtgggttcgattaccggaatgtgcgcggtgctgttggggatgttactgaacgcaggatattcactacctgttgcctgtgtcgcgactttactgcttggtttgctcgcgggatttttcaacggtgtcctggtcgcgtggctaaagatccctgccattgttgccacccttggcacgttagggttgtacagaggcatcatgttgctgtggactggcggtaaatggattgaagggttacccgccgaactgaaacagctctccgccccgctgctgcttggcgtttcagcaattggttggttaacgataattctggtggcatttatggcctggctgctggcgaagacagcgtttggacgcagtttttatgccacgggcgataatttacagggcgctcgtcaactgggcgttcgtacggaagccattcgcattgtggcattttcgttgaacggctgcatggcggcactggcgggaattgtgtttgcttcgcagattggttttatccccaaccagaccggtaccgggctggagatgaaagcaattgcagcctgcgtgctgggcggcattagtttgctcggcggttccggtgcgatcatcggtgcggtactcggcgcatggttcctgacgcagatcgatagcgtactggtgctgttgcgcattccggcatggtggaatgattttatcgcgggtctggttctgctggcggtgctggtgtttgatggacgcctgcgttgtgcgctggaacttaatctgcggcggcaaaaatatgcccgctttatgacgccaccgccatccgttaaacccgcttcgtcaggtaaaaaacgggaggctgcataa

SEQ ID NO: 40326 - protein, 342 aa, Escherichia coli O157:H7
MLKFIQNNREITALLAVLLLFVLPGFLDRQYLSVQTLTMVYSSAQILILLAMGATLVMLTRNIDVSVGSITGMCAVLLGMLLNAGYSLPVACVATLLLGLLAGFFNGVLVAWLKIPAIVATLGTLGLYRGIMLLWTGGKWIEGLPAELKQLSAPLLLGVSAIGWLTIILVAFMAWLLAKTAFGRSFYATGDNLQGARQLGVRTEAIRIVAFSLNGCMAALAGIVFASQIGFIPNQTGTGLEMKAIAACVLGGISLLGGSGAIIGAVLGAWFLTQIDSVLVLLRIPAWWNDFIAGLVLLAVLVFDGRLRCALELNLRRQKYARFMTPPPSVKPASSGKKREAA

SEQ ID NO: 40327 - DNA, 1011 bp, Escherichia coli O157:H7
  CDS (1)..(1011): transl_table=11
atgagtgcgttaaataagaaaagttttcttacttacctgaaagagggcggtatttacgtcgttcttttagttttgcttgcgattattattttccaggccccaacatttttaagtctgttgaacttaagtaatattctcacccagtcatcggtgcgtattattatcgcgctcggtgtggcagggttaattgtcacccaggggaccgacctttctgcggggcgtcaagtagggctggcggcagtggtggcagcgacattattgcagtccatggataacgccaacaaagtgttcccggaaatggcgacgatgccgattgcgctggttattctgattgtctgtgccattggtgcggtgatcggtttgatcaacggtctgattatcgcttatctcaacgtgacgccgttcattaccacgctcggcacgatgatcatcgtctatggcatcaactcgctttattacgactttgtcggggcgtcgccaatttctggttttgacagtggcttctctacctttgctcagggctttgtcgcgctggggagtttccgtctctcttacatcaccttctacgcgttgattgcggtggcgttcgtctgggtgttgtggaacaaaacccgcttcggtaagaacatttttgccattggcggtaacccggaagcggcaaaagtatctggtgtcaacgtcggcctgaacctgctgatgatctacgcgttgtctggcgtgttctatgcctttggcgggatgttagaagccggacgtatcggctctgccaccaacaacctcggctttatgtatgaactggatgctatcgcggcgtgcgtggtaggcggtgtatcgttcagcggcggtgtggggacggtgattggcgtggtgaccggggtaattatttttaccgtcatcaactatggcctgacgtacatcggcgtaaacccatactggcagtacatcatcaaaggggcgattattatcttcgccgtagcgctggattcactgaagtacgcgcgtaagaagtga

SEQ ID NO: 40328 - protein, 336 aa, Escherichia coli O157:H7
MSALNKKSFLTYLKEGGIYVVLLVLLAIIIFQAPTFLSLLNLSNILTQSSVRIIIALGVAGLIVTQGTDLSAGRQVGLAAVVAATLLQSMDNANKVFPEMATMPIALVILIVCAIGAVIGLINGLIIAYLNVTPFITTLGTMIIVYGINSLYYDFVGASPISGFDSGFSTFAQGFVALGSFRLSYITFYALIAVAFVWVLWNKTRFGKNIFAIGGNPEAAKVSGVNVGLNLLMIYALSGVFYAFGGMLEAGRIGSATNNLGFMYELDAIAACVVGGVSFSGGVGTVIGVVTGVIIFTVINYGLTYIGVNPYWQYIIKGAIIIFAVALDSLKYARKK

SEQ ID NO: 40329 - DNA, 999 bp, Escherichia coli O157:H7
  CDS (1)..(999): transl_table=11
atgtctgcttcgtcattaccattgccgcagggcaagagcgtctcgctcaaacaatttgtcagtcaccatattaatgagatcggtttgctggtggtgattgccattctttatctggtcttctccctgaacgcgcctggctttatctcattgaataaccagatgaacgtgctgcgcgatgccgccaccattgggattgccgcctgggcgatgacgctgattattatctccggtgaaattgatgtcagcgttgggccgatggtggcttttgtctcggtatgcctggcatttttgctgcaatttgaagttccgttggcgattgcttgtctgctggtgttgctgttaggcgcgctgatgggaacgctcgccggggtgctgcgtggcgtgtttaacgtgccaagtttcgtggccacgctggggctgtggagcgccctgcgcggaatgggcttgtttatgaccaacgctctgccagtgccgattgacgaaaacgaggtgctggactggctgggcggacaatttctcggtgtgccggtatccgcgctgatcatgatggtgctgtttgcgctgtttgtgttcattagccgcaaaaccgccttcgggcgctcggtttttgccgttggcggtaatgccacggcggcgcagttgtgcggtattaacgttcgtcgggtacgcattcttatctttaccctttcgggattattagcggcggtgaccggcattttgttggcggcgcgcctcggttccggtaacgcaggtgccgcaaacggtctggagtttgacgtcatcgccgcggtcgtggtcggcggtacggcgctttccggtggtcgcggctcgttgttcggtacgctgcttggcgtactggtgattacgctaatcggtaacggtctggtgctgctcgggattaactcctttttccagcaggtggtgcgcggcgtcatcatcgtggtggcggtgctggcgaatatcttgctgacccagcgtagcagtaaagcgaaacgctaa

SEQ ID NO: 40330 - protein, 332 aa, Escherichia coli O157:H7
MSASSLPLPQGKSVSLKQFVSHHINEIGLLVVIAILYLVFSLNAPGFISLNNQMNVLRDAATIGIAAWAMTLIIISGEIDVSVGPMVAFVSVCLAFLLQFEVPLAIACLLVLLLGALMGTLAGVLRGVFNVPSFVATLGLWSALRGMGLFMTNALPVPIDENEVLDWLGGQFLGVPVSALIMMVLFALFVFISRKTAFGRSVFAVGGNATAAQLCGINVRRVRILIFTLSGLLAAVTGILLAARLGSGNAGAANGLEFDVIAAVVVGGTALSGGRGSLFGTLLGVLVITLIGNGLVLLGINSFFQQVVRGVIIVVAVLANILLTQRSSKAKR

SEQ ID NO: 40331 - DNA, 975 bp, Escherichia coli O157:H7
  CDS (1)..(975): transl_table=11
atgacgacctctgcaaaaacctctgccaaaaaaatgctgatgagcgatctgatgcaaacggtcggcatcttgcccattttgattctgatcgtggcggtatttggctttatcacgccaaacttttttaccgaaagcaacctgctgaatattacccgccaggcatcgatcaacattgttctggcggcggggatgaccttcatcattttgaccggcgggatcgatctttccgtgggttcgatcctcggcaccacagcggtggcggcgatggtcgtctcccttagccctgagttcgccatgctgtcgatcccggcagcgctgatgctcggcctgctgctggggctgttcaacggcgcgctggtggcctttgccggattgccaccgtttatcgttacgcttggcacctatacggcgctgcgcggggcggcgtatctgctggcggacggcaccacggttatcaactccaacattaatttcgagtggataggcaacaactatctcgggccggtcccatggctggtggtgattgcgctggcggtgatcgtggtgtgctggtttattctgcgccgcaccacgcttggcgttcatatctacgccgtcggcggcaatatgcaggcggcgcgtcttaccggcattaaggtctggctggtgctgctgtttgtttatggcatgagcggcctgctttctgggcttggtgggattatgagcgcctcacggctgtacagcgccaacggcaacttaggcatgggttacgaactggatgccattgcagcggtgatcctcggcggcaccagttttgtcggcggcatcggcaccatcaccggcacgctggtcggcgcgctaattatcgccacgctcaacaatggcatgaccttaatgggcgtctcttacttctggcaactggtgatcaaaggggcgatgatcatcattgcggtgctgatcgacaaataccgtacccgacaccatcaaagtgcataa

SEQ ID NO: 40332 - protein, 324 aa, Escherichia coli O157:H7
MTTSAKTSAKKMLMSDLMQTVGILPILILIVAVFGFITPNFFTESNLLNITRQASINIVLAAGMTFIILTGGIDLSVGSILGTTAVAAMVVSLSPEFAMLSIPAALMLGLLLGLFNGALVAFAGLPPFIVTLGTYTALRGAAYLLADGTTVINSNINFEWIGNNYLGPVPWLVVIALAVIVVCWFILRRTTLGVHIYAVGGNMQAARLTGIKVWLVLLFVYGMSGLLSGLGGIMSASRLYSANGNLGMGYELDAIAAVILGGTSFVGGIGTITGTLVGALIIATLNNGMTLMGVSYFWQLVIKGAMIIIAVLIDKYRTRHHQSA

SEQ ID NO: 40333 - DNA, 1917 bp, Mycoplasma pulmonis UAB CTIP
  CDS (1)..(1917): transl_table=4
ttgccattggaacaaaacaaaatgaaaggagtcaagcaaatgtccaataactatagtcaaagtgaaattcaaaaaattaatgaacttaggaaaataaaccttgaaaaacgcaaagttcgtgatcaaaaagaaaaagctaagttagattctaaaaacaaaaaaaacgaagcaaaatttcaaaaattaaaaacaaattttgactcttttgctaagtcaaaaaatcaaagactaaacaaagtagttaaatctattgaaactaaatttgatcaaaaaattagcactttaaaacaaagtctttcaacaactaaaacaaatgaacaagagctaaaagactcaaaagctctttataacaaaaagaaaaaatactacgaaagtagaattgcaaaaaatgaagctaaatatgaaaatttaatcaaaaagcttcaatataaaattgacacttatgcccttgataaacaagaaggtcaacaaaaaattgatcagctttatcttgatcttggccaaataaacaaaagatggtcattaaaaatagcttctttaaatatcgaagatacaaaaatcaaacttgaaaagcaaattaaaaaactagaagaaaaaaaacaacttcaaattaaaacaattgaaaaaagaagagaagtttcacccggatcttcttttgtttcgaatctaagaaacagaatagcagatgaaaaatctcgttacattggaaattattcaattgactatattttcaaaaaaatatcagccaacattagaaaatactcaatgttctacattttggcccttattcttttgatctttggatctttaactaaattccaaaatataactccttctaatattgaagttatctttagaaataatacatatgttctaatcattggaatgggaatgctccttgtaattgttggtggaaacattgacctttctgttggccagctccttagtttactcggggccatatcggttattatttataatggagtaagtagaacattttcaaataatagctctcttggtggactttatttaattattaccttaattggtactgcatttataggtgctttaattggtatttctcaaggatttttaattggatatttcaaaataccttcatttatcgttactttagggggaatgttaatttttaaagggctagctctttttgcagttcctctaaacaacataacccctgaaggaggatcccaatcagcttatgttagggctattattagaacaatctttgatgttcaagttggtggtttttacattatttcatttttaatttttattgtctcacttgctttaatagttctttttctagtttatggtagaaacaagaaaataaaatttggtttactagttgactctggttttgtattttgactaaaaatagttgttatatcagtgtttatgattttactaggttatgcttttggaaaaattggagttaaatgatacttgctttacattatgatcttgcttgttatctttgtatttttaactcaaaacacagtttttggaagaaaagtttatgccattggtggtaataaaaaatcagcagagctctcaggtatcgatgttagaaaaactactactttaatctttatgattaatggaataatggttgcaattgcctcaataatctttactggtattgtaacttcagctacagctaccgctggtgaaggatttgaattagacgttatttcatctgtctttgttggtggagcttctatggctggaggaataggaacaactattggaactctaattggtggatttatccttggatttattaacaatggaatcttgcttttagcccttaatgttggaactcaacgtgttgttaaaggtgttgttcttgtcttagctgttgcctatgatatttatgcaaacagaaaaattagttaa

SEQ ID NO: 40334 - protein, 638 aa, Mycoplasma pulmonis UAB CTIP
MPLEQNKMKGVKQMSNNYSQSEIQKINELRKINLEKRKVRDQKEKAKLDSKNKKNEAKFQKLKTNFDSFAKSKNQRLNKVVKSIETKFDQKISTLKQSLSTTKTNEQELKDSKALYNKKKKYYESRIAKNEAKYENLIKKLQYKIDTYALDKQEGQQKIDQLYLDLGQINKRWSLKIASLNIEDTKIKLEKQIKKLEEKKQLQIKTIEKRREVSPGSSFVSNLRNRIADEKSRYIGNYSIDYIFKKISANIRKYSMFYILALILLIFGSLTKFQNITPSNIEVIFRNNTYVLIIGMGMLLVIVGGNIDLSVGQLLSLLGAISVIIYNGVSRTFSNNSSLGGLYLIITLIGTAFIGALIGISQGFLIGYFKIPSFIVTLGGMLIFKGLALFAVPLNNITPEGGSQSAYVRAIIRTIFDVQVGGFYIISFLIFIVSLALIVLFLVYGRNKKIKFGLLVDSGFVFWLKIVVISVFMILLGYAFGKIGVKWYLLYIMILLVIFVFLTQNTVFGRKVYAIGGNKKSAELSGIDVRKTTTLIFMINGIMVAIASIIFTGIVTSATATAGEGFELDVISSVFVGGASMAGGIGTTIGTLIGGFILGFINNGILLLALNVGTQRVVKGVVLVLAVAYDIYANRKIS

SEQ ID NO: 40335 - DNA, 1035 bp, Agrobacterium tumefaciens str. C58
  CDS (1)..(1035): transl_table=11
gtgaggaacgacatggccaatattgcagaacccaagaagggcttcgccgtcagcgatcgtcagaaggacatcatccagaaatttgcggcgctcggcagcctctttgcgctggtcgcggtcttctccgcgaccagtaacgccttcttcaccgtcaataatggcatgacgatcgcgctgcaggtgacttctattgcgctgctcggcattggtgccacctgtgtcatcatcaccggcggcatcgatctttccgtcggttcggtgcttgcgcttgccggcgtcgttgccgcccttgcggtgaaggaactcggcatgccggtgcccatcggcatgttgctcggcattctgacggggtcgctttgtggcctcatcaacggtcttctggtgacgcgcttcaagctgccgcccttcatcgccactcttggcatgatgctgattgcccgcggtgtggccctgcagatcaccggtgcgcgcgccgtatccggccttggcgaatccttcggtgaactcggcaatggcgcactcttccgtatcgtcactatcggtgacgatggctttccgaatgtcgtgtttcccggcattccctatccggtcatcctgatggtggtgattgcgcttgcggtttccttcatgcttaaccgctccatcctcggccgccacatctatgccgtgggttccaatgcggatgctgcccgcctttccggcgtcaacgtcgctcgcgtcaccaatttcacctacatcctgtccggcacgctcgccgggctgacgggctgcgtgctgatgtcgcgtctcgttaccgcccagccgaacgaaggcgtgatgtatgagctggatgccattgccagtgcggtcatcggcggcacatcgctgatcggcggcgtgggcacgatttccggcacggccatcggcgcctttgtcatcggcattttgcgtaacggtctcaatatgaacggcgtttccgccttcacgcaacagatcatcattggccttgtcattctggtcaccgtctggatcgaccagctgcgcaaccgccgctga

SEQ ID NO: 40336 - protein, 344 aa, Agrobacterium tumefaciens str. C58
MRNDMANIAEPKKGFAVSDRQKDIIQKFAALGSLFALVAVFSATSNAFFTVNNGMTIALQVTSIALLGIGATCVIITGGIDLSVGSVLALAGVVAALAVKELGMPVPIGMLLGILTGSLCGLINGLLVTRFKLPPFIATLGMMLIARGVALQITGARAVSGLGESFGELGNGALFRIVTIGDDGFPNVVFPGIPYPVILMVVIALAVSFMLNRSILGRHIYAVGSNADAARLSGVNVARVTNFTYILSGTLAGLTGCVLMSRLVTAQPNEGVMYELDAIASAVIGGTSLIGGVGTISGTAIGAFVIGILRNGLNMNGVSAFTQQIIIGLVILVTVWIDQLRNRR

SEQ ID NO: 40337 - DNA, 1377 bp, Agrobacterium tumefaciens str. C58
  CDS (1)..(1377): transl_table=11
ttgggcgccgcgtcacgaacaggtggcgcggcgcctttcagatgtaaggaggaccggcagtccatggccgacatgacacaatccaattccacgacgtcccccaagacggaaaagaccggctcgatttcgcgtttcatcagtgccacggagctcgatacgcggctgcttggcatggtcggcgcgcttcttctgatctggatcggtttccatattctttcgggtggactgttcctgacgccgagaaacctctggaacctctccgtccagaccgcttcggtcgcggtgatggcgacgggcatggtgcttgttatcgttacccgcaacatcgatctgtcggtcgggtcgatcctcggcttttccggcatgatcatgggtgtcatgcaggcggaaatcctgccgcaaatcctcggcttcgaacattgggcgacatggatcgtcacgcttctggtcggtattctcgtcggcggcgcaatcggcatgctgcagggctcgatcatcgccttcctcaacgtgccgtccttcatcgtaacacttggtggcctgctcgtctggcgcggcggcacctggttcgtcaccagcggccgcaccgtggcaccgatggattccaccttccgcctgatgggcggcggcaccagcggctcgatcggcgcgacatggagctggatcgcagcgatcgtcgcctgcgtcgctattgtcgcggcgatcctcaattcccgtcaccagcgccgccgtttcggctttccgctgcggcccgtctgggcggaatatttcctggtggcgcttggctgcttcgtcgtcgtcggtttcgtggctgtcgtcaacagctatccctggccgatcaacattgcccgcaactatgccgatgccaatggcatagcctggccggatggcggcctgttcattccgcacggcattgccattcctgtgctgatggcgctcgcagtcggtgccgtcatgaccttcatcgcgacgaggctgcgcttcggacgttatgttttcgccatcggcggcaacccggaagcggcggaactggccggcatcaagacccgctgggtcacggtgaagatattcacgctgatgggcgttctgtgcgccatcgccgcggcaatttccactgcccgcctcaacgctgccaccaatgcccagggtgaactcgacgaactttatacgatcgcggccgcggtcatcggcggcacctcgcttgccggcggcgtcggcaccatagcgggcgcgatgctcggcgcgctcgtcatgcaatcgctgcaatccggcatggtgctggtgggcatcgatacgcccttccagcgcatcgtcgtcggtgtggtcctggtcgtcgccgtctggctcgacaccatctaccgcgcccgcgccaagtaa

SEQ ID NO: 40338 - protein, 458 aa, Agrobacterium tumefaciens str. C58
MGAASRTGGAAPFRCKEDRQSMADMTQSNSTTSPKTEKTGSISRFISATELDTRLLGMVGALLLIWIGFHILSGGLFLTPRNLWNLSVQTASVAVMATGMVLVIVTRNIDLSVGSILGFSGMIMGVMQAEILPQILGFEHWATWIVTLLVGILVGGAIGMLQGSIIAFLNVPSFIVTLGGLLVWRGGTWFVTSGRTVAPMDSTFRLMGGGTSGSIGATWSWIAAIVACVAIVAAILNSRHQRRRFGFPLRPVWAEYFLVALGCFVVVGFVAVVNSYPWPINIARNYADANGIAWPDGGLFIPHGIAIPVLMALAVGAVMTFIATRLRFGRYVFAIGGNPEAAELAGIKTRWVTVKIFTLMGVLCAIAAAISTARLNAATNAQGELDELYTIAAAVIGGTSLAGGVGTIAGAMLGALVMQSLQSGMVLVGIDTPFQRIVVGVVLVVAVWLDTIYRARAK

SEQ ID NO: 40339 - DNA, 975 bp, Sinorhizobium meliloti 1021
  CDS (1)..(975): transl_table=11
atgagtgtggaaacggttgaaagcgcgggaccgacgccgaagaaaggcgtcagcatcctgttcggtctgacgctcgtgggattgctggtcgtcctgtggctgctcctcggcctggcgaccaacgccttctggacgccgaacaacatcagcaacctcctgcgtcagggggcgatgaccgcgattctcgccgtcggccagaccttcgtcatcatcacggccggcatcgacctttcggtcggcgccgtcgtcggtttcaccagcgtcatcgtcgcctggctgctcgcggcgggggttccgctctggctcgcgatcatcgcgacgctggcgatcggcgtgctgatcggcgccttccatgccttcggcatcgtccgcatggggctgccgcccttcatcatcacgcttgcgacgctgacctcgcttcgcggcatcggtctcctgatcaccaacggctcgaccatctcgatcaccaacgacgccttcaccacgttctcacgggccgacttcctcggaattcccagtctcttctggatggtgatcgtcgttgcgattccggcttacgtcttcctgcatcttagccgcttcggccgttatctcttcgccgtcggctccaacagcgaggcggcgcgcctttccggcgtcaacgtcaaccgcacgatctatctggcctatatcctgtcatcgacgtgcgccgccttcgtcgggctgctgctcgcctcgcgcatcggcatcggcaacgccacgcaggccgaaggctgggagctgcaggcgatcgcttcgtcggtcatcggcggcacgagccttttcggcgccgtcggctcggtccacggtcccctgctcggcgccttcatccttgcgacgatcaacaacggcgccaatctcctgaacgtaaattccttctggcagcgcatcatcaccgggctgctgatcatcgtgatcgtctatttcgaccagttgcggcggcggggggcgcggtga

SEQ ID NO: 40340 - protein, 324 aa, Sinorhizobium meliloti 1021
MSVETVESAGPTPKKGVSILFGLTLVGLLVVLWLLLGLATNAFWTPNNISNLLRQGAMTAILAVGQTFVIITAGIDLSVGAVVGFTSVIVAWLLAAGVPLWLAIIATLAIGVLIGAFHAFGIVRMGLPPFIITLATLTSLRGIGLLITNGSTISITNDAFTTFSRADFLGIPSLFWMVIVVAIPAYVFLHLSRFGRYLFAVGSNSEAARLSGVNVNRTIYLAYILSSTCAAFVGLLLASRIGIGNATQAEGWELQAIASSVIGGTSLFGAVGSVHGPLLGAFILATINNGANLLNVNSFWQRIITGLLIIVIVYFDQLRRRGAR

SEQ ID NO: 40341 - DNA, 1083 bp, Sinorhizobium meliloti 1021
  CDS (1)..(1083): transl_table=11
atgggcgaaacaaacacagccgcacagccatcccaggaattcgaaaaggtcctggccgacagttcgacggacgtagcgtcattcgacgcgcatgataagacgctgcttcagaagctgcagcacttcctgcattcgagcccggccgcggtgccgctgatcgtgctggtcctgtcgctgatcgccttcggggtcattctcggcggcaagttcttttccgccttcaccatgacgctgatcctgcagcaggtggcgatcgtcggtatcgtcggtgccgctcagacgctcgtgatcctgaccgccggtatcgatctttcggtcggcgccatcatggtgctctcgtccgtcatcatggggcagttcaccttccgctacggcttcccgccggcgctctccgtcatctgcggccttggggtgggggcgctttgcggctacatcaacggaacgctcgtcgcgcgcatgaagctgccgccctttatcgtcacgctcggcatgtggcagatcgtgctcgcctcgaacttcctctattccgccaatgagacgatccgggctcaggacatttccgcgaatgcctcgatcctgcagttcttcggccagaacttccgcatcggcaatgccgtcttcacctacggcgtcgtggtgatggtgctcctcgtctgccttctttggtatgtcctgaaccgcaccgcctgggggcgctatgtctatgccgtcggcgacgaccccgaggctgccaagctcgccggcgtcaacgtcacgcgcatgctcatctccatctatacgctctccggcctcatctgcgcccttgccggctgggccctcatcggccgcatcggctcagtctccccgacagcgggccagtttgcgaatatcgaatcgatcactgccgtggtgatcggcggcatctcgctcttcggcggccgcggctccatcatgggcatgctcttcggcgcgctgatcgtcggcgtcttctcgctcggcctgcgcctcatgggcaccgacccgcaatggacctatctcctgatcggcttgctgatcatcatcgccgttgcaatcgaccagtggatcagaaaggtagcagcctga

SEQ ID NO: 40342 - protein, 360 aa, Sinorhizobium meliloti 1021
MGETNTAAQPSQEFEKVLADSSTDVASFDAHDKTLLQKLQHFLHSSPAAVPLIVLVLSLIAFGVILGGKFFSAFTMTLILQQVAIVGIVGAAQTLVILTAGIDLSVGAIMVLSSVIMGQFTFRYGFPPALSVICGLGVGALCGYINGTLVARMKLPPFIVTLGMWQIVLASNFLYSANETIRAQDISANASILQFFGQNFRIGNAVFTYGVVVMVLLVCLLWYVLNRTAWGRYVYAVGDDPEAAKLAGVNVTRMLISIYTLSGLICALAGWALIGRIGSVSPTAGQFANIESITAVVIGGISLFGGRGSIMGMLFGALIVGVFSLGLRLMGTDPQWTYLLIGLLIIIAVAIDQWIRKVAA

SEQ ID NO: 40343 - DNA, 1005 bp, Sinorhizobium meliloti 1021
  CDS (1)..(1005): transl_table=11
atgagcgaggcgaatgtgactatggcagcatccaccccgcaagccgcgctcggcaggaagctcgtggccgcagcggcaaattcccgcgaattgtccgtcatcctggctgcgctcgccatgttcgtcgcgctttcactttcgacggacacgttctttaccgaactaaatctgctgaaccttctgaggcagatatccgtcatcggcattcttgccgtcggcagcaccttcatctttatctccggcgagattgatttgtcggtcggcgcattgcttgggctgctggcgatgatctgcgccgccttggcgatcaagatggagggcaacatctacggtgccgcgctcgtcgtggtggctctgggcgcgatattgtcgggcatcaacggtgtcatcacgacgaaactgcgcattccctccttcatcaccacgctcggcatgctcagcatctacagcggcgcgacactggtgctctccaagggcatgccgatctccggcctgcaaaacgaccttttccgctccctcgtcgccggccggctcttcggggtcgttccagcgcaggtgatctggatggtggccgcgggcatattcggcacctacctcctgctgtttacccgcttcggctataacgtctttgccacaggcggcaacaagaacgcggccaaggccgtcggcatcaacaccgaccgggtgaagattctcgccttcgtggtcagcggtatcatggtcggcgtcacctccttcattctcgtcggctggttccgtggcgtggacccgcagaccggcaacggcctggaactcagcgtcatcgcggcggtcatcatcggcggcaccggcctgttcggggggcagggaagtgtcctcggcacgctggtgggcgcgctgatcatcggcatgatatcgaacggcaccgtcctgctgggcgtggattcctattatgagcctgtggcgcatggaacggtcatcctgcttgccgtcatcatcgatatctgggtgcgcaggcagcggtga

SEQ ID NO: 40344 - protein, 334 aa, Sinorhizobium meliloti 1021
MSEANVTMAASTPQAALGRKLVAAAANSRELSVILAALAMFVALSLSTDTFFTELNLLNLLRQISVIGILAVGSTFIFISGEIDLSVGALLGLLAMICAALAIKMEGNIYGAALVVVALGAILSGINGVITTKLRIPSFITTLGMLSIYSGATLVLSKGMPISGLQNDLFRSLVAGRLFGVVPAQVIWMVAAGIFGTYLLLFTRFGYNVFATGGNKNAAKAVGINTDRVKILAFVVSGIMVGVTSFILVGWFRGVDPQTGNGLELSVIAAVIIGGTGLFGGQGSVLGTLVGALIIGMISNGTVLLGVDSYYEPVAHGTVILLAVIIDIWVRRQR

SEQ ID NO: 40345 - DNA, 1050 bp, Sinorhizobium meliloti 1021
  CDS (1)..(1050): transl_table=11
atggatatgcgtgcggaaaagaacccggacatcccggccggtggggctggtgcccgcaagacgaagttgaaggcggtcgtctttcaggctggtccgctgatcgccctggtcctgctcatggcctatctcgcctttgccacatccaacttcctgacgctcgacaacctttccaacgtggcgcggcagtccgcattcgtcgccattctcgcggtcgggcagacattcgtcatcctgacgggcggcatagatctttcggtcgcggccatcgcggcgctttccgcctcgataaccgccgtcctactcacgcagccgctcgtgctgttcggtatcgatttcggcttcgtgccgccgccggtggcgatcctcatcgggattctcatcggcatggccgccggtgcgctcaacggctggctcatctccaagttcaagatcccggacttcatcgcgacgctcggcacgatgacggcgttccgcggcgcggcgctgctggtcaccgacggcctgcctgtcccctccttcaatgccggccggcaacttcccgaaagcctgatctgggtcggcggcggccagctcttcggggtgccggtgagcgcgctcatcgctctgctctgcgcggctgccggctggtacgtgctccgctacaccgcgctcgggcgagcgatctacgctgtcggcggcaaccgtgcggccgcccattcgtccggcatcagcatttcgcgcaccaagatcatgacctatgccatttccggccttctggccgcgatcgcgggcatcatcctggtcgggcgcctcaactccgccaatgcgcttatggcggatggcgaggagctgcgttccatcgcctccgtcgtcatcggcggcaccaatctcttcggcggcgaaggcggtgtatggggatcgatcatcggcgcggccatcatcggcgtgctcggcaacggcctcaacctgctcgatgtcagcccgttctggcagcgcatcgcgcagggcgtcgtcatcgtggtcgtcgtgatcttcgaccaatggcgccgtcgcagcatgacgcgcgtttga

SEQ ID NO: 40346 - protein, 349 aa, Sinorhizobium meliloti 1021
MDMRAEKNPDIPAGGAGARKTKLKAVVFQAGPLIALVLLMAYLAFATSNFLTLDNLSNVARQSAFVAILAVGQTFVILTGGIDLSVAAIAALSASITAVLLTQPLVLFGIDFGFVPPPVAILIGILIGMAAGALNGWLISKFKIPDFIATLGTMTAFRGAALLVTDGLPVPSFNAGRQLPESLIWVGGGQLFGVPVSALIALLCAAAGWYVLRYTALGRAIYAVGGNRAAAHSSGISISRTKIMTYAISGLLAAIAGIILVGRLNSANALMADGEELRSIASVVIGGTNLFGGEGGVWGSIIGAAIIGVLGNGLNLLDVSPFWQRIAQGVVIVVVVIFDQWRRRSMTRV

SEQ ID NO: 40347 - DNA, 1008 bp, Sinorhizobium meliloti 1021
  CDS (1)..(1008): transl_table=11
atgagtgctcccgaggaagttccccacatggacgtcgatctcctgaagggctccgaccgccccctctggagccgcgtattccttgcgcaggaaacgtggatagcactggctatcctggtgatcggcctcgtcgtatcggtcatctcggcgaagttcgcgacttccggaaacctcctcaacattttccagaatgcctgcttcatcgggattatggcgctcggcatgacgccggtgctcatcagcggcggcatcgatatctctgtcggatcgatccttggcatgtgcggagtgacgcttggcatcgtgctcaattcggacatgccgctcgccgtcggcatcctcgcgactctcgcgatgggtgtcgcctgcggtatggtcaacggaatcatcatctcctacgtcaagctcccgccattcatcgtcactcttgccaccttgtccatcgggcgcagcctcgctttggtgctcacgaacaatgaggtgttctacgaattcggacgggccaccaacggtatcatcgcgctcggcggtggctatagtttcggattgcctaacgtggtctatgctctcgtcgcgggcgtgatcatcctgcatttcctgctgaccatgacgcggtggggccgctacctgttcgcgatcggcggcaacgaggctgcggcgcgactggccggtatccctgtggacctcatcaaggtctcggcctacgccttcaacggcctgatggttgccataacggccgtgttcctggtcggctggcttggcgccgtcaccaacgcgatcggaaccggatacgagttgcaggtcatcgcgtcgacggtaatcggcggagcgtcgctgacaggcgggttcggcacggcgctcggcgcagccatcggcgcgatcctcgtagaggttatccgcaacgccctgctcatcgcaggggtcaacccgttctggcagggaatgttcgtgggaagtttcattctagccgcggtcctgctcgaaagaatccgctcgctgcgtcggtga

SEQ ID NO: 40348 - protein, 335 aa, Sinorhizobium meliloti 1021
MSAPEEVPHMDVDLLKGSDRPLWSRVFLAQETWIALAILVIGLVVSVISAKFATSGNLLNIFQNACFIGIMALGMTPVLISGGIDISVGSILGMCGVTLGIVLNSDMPLAVGILATLAMGVACGMVNGIIISYVKLPPFIVTLATLSIGRSLALVLTNNEVFYEFGRATNGIIALGGGYSFGLPNVVYALVAGVIILHFLLTMTRWGRYLFAIGGNEAAARLAGIPVDLIKVSAYAFNGLMVAITAVFLVGWLGAVTNAIGTGYELQVIASTVIGGASLTGGFGTALGAAIGAILVEVIRNALLIAGVNPFWQGMFVGSFILAAVLLERIRSLRR

SEQ ID NO: 40349 - DNA, 1050 bp, Yersinia pestis CO92
  CDS (1)..(1050): transl_table=11
atgtctagcgttactttgagttcggataaaaagaacccggtatcaactgaatcaaacggtgggatcccacaacctcagcaaccacagaatgcgccgactaaaagtggcttaggattatcccgtatctgggacagctacggcatgctggtggtcttcgccgtggtctttattggttgcgtgatttttgtgcctaattttggctcctttatcaatatgaaagggttggggctggctatctcaatgtctgggatggtggcgtgcggtatgcttttttgtttggcatccggcgattttgacctctctgtggcctcggtcattgcctgcgcgggtgttaccaccgcggtggtgatcaatatgacagagagcctatggataggggtgggcgcaggtttgttattaggggcggcatgtgggctaattaatggttttgtgattgcccggctaaaaatcaatgcgctgatcaccacattggcgacgatgcaaattgttcgtggcctggcgtatatcatttctgatggtaaagccgtgggtatcgaagatgagcgcttcttcgccttgggttataccaactggtttggtctgccagcacccatctggatcaccgttgcctgtttggtgctgtttggtttcttactgaataaaaccacctttggccgtaacacgttggcgattggggggaatgaagatgctgcgcgtctggccggtgtgccggtcgtgcggaccaaaatcattatttttgtgctgtcaggtttggtgtctgccgccgcagggattattttggcttcacgcatgacgagcggccagccaatgacctcgattggttatgagctcattgttatctctgcttgcatattaggcggggtatcactaaaaggcggcattggtaaaatttcttacgtcattgcggggatcttgattctgggaacagtagaaaatgccatgaacctattaaatatctccccgttctcacaatatgtggttcgtggtttgatcctgctggcggcggttatcttcgaccgttacaaacagttagctaaacggacgatataa

SEQ ID NO: 40350 - protein, 349 aa, Yersinia pestis CO92
MSSVTLSSDKKNPVSTESNGGIPQPQQPQNAPTKSGLGLSRIWDSYGMLVVFAVVFIGCVIFVPNFGSFINMKGLGLAISMSGMVACGMLFCLASGDFDLSVASVIACAGVTTAVVINMTESLWIGVGAGLLLGAACGLINGFVIARLKINALITTLATMQIVRGLAYIISDGKAVGIEDERFFALGYTNWFGLPAPIWITVACLVLFGFLLNKTTFGRNTLAIGGNEDAARLAGVPVVRTKIIIFVLSGLVSAAAGIILASRMTSGQPMTSIGYELIVISACILGGVSLKGGIGKISYVIAGILILGTVENAMNLLNISPFSQYVVRGLILLAAVIFDRYKQLAKRTI

SEQ ID NO: 40351 - DNA, 999 bp, Caulobacter crescentus CB15
  CDS (1)..(999): transl_table=11
atgaccgccccgtcgtctcccgccccgctcgcgaccgacaagccccgcttcgacctgttggccttcgcccgcaagcaccggacgatcctgttcctgctgcttctggtggcggtgttcggcgcggccaacgagcgcttcctgacggcgcgcaacgccctgaacatcctgtcggaggtgtcgatctacgggatcatcgccgtgggcatgaccttcgtgatcctgatcggcggcatcgacgtggccgtgggatcgctgctggccttcgcctcgatcgccgcagcctatgtggtcaccgccgtcgtcggcgacggccccgccacctggctgatcgctctgttggtctcgaccctgatcggcctggccgggggctatgtgcagggcaaggccgtgacctggctgcatgtgcccgccttcatcgtcaccctgggcggcatgaccgtctggcgcggcgccaccctgctgctgaacgacggcgggccgatctcgggcttcaacgacgcctaccgctggtggggctcgggcgagatcctgttcctgcccgtgccggtggtgatcttcgccctggtcgcagcggccggccacgtggcgctgcgctacacccgctatggccggcaggtctatgcggtgggcggcaacgccgaggctgcgcgcctgtcgggcgtcaatgtcgatttcatcaccaccagcgtctacgcgatcatcggcgccctggcggggctgtcgggctttctgctgtcggcccgcctgggctcggccgaggcggtcgccgggacgggctatgagctgcgggtcatcgcctcggtggtgatcggcggcgccagcctgaccggcggctcgggcggcgtcggcggcaccgtgctgggggccctgctgatcggcgtgctctcgaacggcctggtgatgctgcacgtcacctcctacgtccagcaggtggtgatcggcctgatcatcgtcgccgccgtggccttcgaccactatgcgcgcacccacaaggcgtag

SEQ ID NO: 40352 - protein, 332 aa, Caulobacter crescentus CB15
MTAPSSPAPLATDKPRFDLLAFARKHRTILFLLLLVAVFGAANERFLTARNALNILSEVSIYGIIAVGMTFVILIGGIDVAVGSLLAFASIAAAYVVTAVVGDGPATWLIALLVSTLIGLAGGYVQGKAVTWLHVPAFIVTLGGMTVWRGATLLLNDGGPISGFNDAYRWWGSGEILFLPVPVVIFALVAAAGHVALRYTRYGRQVYAVGGNAEAARLSGVNVDFITTSVYAIIGALAGLSGFLLSARLGSAEAVAGTGYELRVIASVVIGGASLTGGSGGVGGTVLGALLIGVLSNGLVMLHVTSYVQQVVIGLIIVAAVAFDHYARTHKA

SEQ ID NO: 40353 - DNA, 996 bp, Sinorhizobium meliloti 1021
  CDS (1)..(996): transl_table=11
atgaccgtagcgacagcaacactcgcaccaactaacgaaggcgcgcgcatccgttgggccgatctggcgcctttcatcgcccttgcggtgatcgtactgttcggggcgctggtgaatcccaatttcgtgtcgtcggccaatctgatcaacgtcatcacgcggagcgccttcattgcgattatcgccgtcggggcgaccttcgtgatctcgtccggcgggctcgacctgtcggtgggttcgatgatggccttcgtcaccggtatcatgatcatggcgatgaaccatctcgccccggcctttggagcctgggcgattccgatgggagcgggcgtggcgctgctggtcggagcgctatgcggcctcttcaacgggcttatcgtgaccgtcgggcgaatagagcccttcatcgtcacgctgggcacgatgggcattttccgcgccttcatcaccttcatgaccgacggcggctcgctgcccatcgatcgcagcctccgggaagcctatagaccggtctatttcggcagcttcttcggtattccatatccggtgctcatcaccttcgtggtggtcatggctggcgccttcctgctctacaagaccaagtatggccgccgcttgaagtcggcaggatccaatgtcgaggtcgcgcgcttttcgggcgtcaacgtcgccggcgtgcgcaccggcgcctacgtgatccagggcttctgcgtcgccgtcgctgcgatttgctatgtgccccgcctcggcgcggcgacgccaacgaccggccagctctgggagctgcaggtcatcaccgcggtcgtgatcgggggcacgctgctccgcggcgggcgcggacgcattggcggcacggtggccggcgccctcatcctcgaggtgatcgccaacgtcatggttctgtcggacttggtctcggaatacctcgtcgccgccgttcagggagcgatcatcatcatcgccatgctggcgcaccgctttactgccaaccgctga

SEQ ID NO: 40354 - protein, 331 aa, Sinorhizobium meliloti 1021
MTVATATLAPTNEGARIRWADLAPFIALAVIVLFGALVNPNFVSSANLINVITRSAFIAIIAVGATFVISSGGLDLSVGSMMAFVTGIMIMAMNHLAPAFGAWAIPMGAGVALLVGALCGLFNGLIVTVGRIEPFIVTLGTMGIFRAFITFMTDGGSLPIDRSLREAYRPVYFGSFFGIPYPVLITFVVVMAGAFLLYKTKYGRRLKSAGSNVEVARFSGVNVAGVRTGAYVIQGFCVAVAAICYVPRLGAATPTTGQLWELQVITAVVIGGTLLRGGRGRIGGTVAGALILEVIANVMVLSDLVSEYLVAAVQGAIIIIAMLAHRFTANR

SEQ ID NO: 40355 - DNA, 1065 bp, Sinorhizobium meliloti 1021
  CDS (1)..(1065): transl_table=11
atgacgacggcaacgaccaccaccaacgcaactgacgcgacgagcggctcggtactgctcaccttgatgaagctcaggacgttcatcgccctcttcgcggttgtcgccttcttctcgatcttcgcgccgaactttctttcgaccgccaatctaatcctgatgtcaaagcatgtggcgctcaacgccttcctcgccatgggcatgaccttcgtcatcatcaccggcggcatcgacctttccgtcggttcgatcgtcgggctctgcggcatggtggccggcgggctcatcctcaacggcatcgatctgcagttcggctacacggtctatttcaacgtcgtcgaggtctgcctcatcacgctcgccgtcgggatcgtcatcggcgcggtcaacgggctgctgattaccaagctcaacgtcgcacccttcatcgccacgctcggcacgctctatgtcgcgcgtggctttgcgctgctttcatcgggcggccagacattccccaacctcgtcggcaagccggaactcgcgacgacgggcttcgccttcctcggttcgggccggcttctcggcctgccggtttcgatctgggtcctcatcgtcgtggcgctcgccgccgcatacgttgccaggtatacgccgatcggccggcacatcttcgccgtcggcggcaacgagcgtgccgcccgcatgtccggcatccgggtcgaccgggtgaagatgttcgtctacatgttctccggcttctgcgcggcgatcgtcggactggtcatctcgtcggaactgatggcgtcgcacccggcgacgggcaattccttcgaactcaatgccatcgccgcagcggttctcggaggcacgtcgatgtccggcggccgcgggacgatcggtggcaccatcatcggcgccttcgtcatcggcattctttccgacggtctcgtgatgatgggcatctcgtccttctggcaaatggtcatcaaggggatcgtgatcatcgtcgccgtcgtggtggatcaggcgcaacgccggctgcagcaacaggtcacgctgatgcagcttgcgaaaaaggggtga

SEQ ID NO: 40356 - protein, 354 aa, Sinorhizobium meliloti 1021
MTTATTTTNATDATSGSVLLTLMKLRTFIALFAVVAFFSIFAPNFLSTANLILMSKHVALNAFLAMGMTFVIITGGIDLSVGSIVGLCGMVAGGLILNGIDLQFGYTVYFNVVEVCLITLAVGIVIGAVNGLLITKLNVAPFIATLGTLYVARGFALLSSGGQTFPNLVGKPELATTGFAFLGSGRLLGLPVSIWVLIVVALAAAYVARYTPIGRHIFAVGGNERAARMSGIRVDRVKMFVYMFSGFCAAIVGLVISSELMASHPATGNSFELNAIAAAVLGGTSMSGGRGTIGGTIIGAFVIGILSDGLVMMGISSFWQMVIKGIVIIVAVVVDQAQRRLQQQVTLMQLAKKG

SEQ ID NO: 40357 - DNA, 954 bp, Sinorhizobium meliloti 1021
  CDS (1)..(954): transl_table=11
atgacgacttccttgaaaaaacttcttctcggcgaacagggcctgctggtgatctttgccgccgccttcgtggtggtggcgctgacggttccgaatttcctcaccgaacgcaacatgctcggcctgctgcagtcagtggtgaccatcggcgtcgtcgcctgcaccatgatgttctgcctggcgtcgcgcgacttcgatctttcagtcggctccaccgtagccttctcgggaatggttgccgtcatggcgtcgaacgcgacgggctcgatagtgctcggtcttctggcggctcttgcctgcggtgggatcgtcggcctcgcgaacggcatcgtgatcgcccgtttccgcatcaatgcgctcataacgacgctggcgacgatgcagatcgtacgcggcttcgccttgatcgcgtcggacggccgcgcggtcggaatcaacgatccggtattttatcagctctccctgtcgaagttcctgaccgtgcccacgccgatctgggtgatggctctcttcttcatcgtgtttggcttcctgctcaaccgtaccgtcttcggcaagaacacgcttgcgatcggcggcaacccggaagcctcccggcttgccggcgtggacgtcgcgcggatgcgcatctggattttcgccctccaggggctggtatgcgcggtggcaggggtgctgctcgcctcgcgcatcacctcgggtcagccgaatgcggccaccggtctcgaactctcggtgatttccgcctgcgttctcggcggtgtttctcttgccggcggcagggcgaccatgaccggcgtcgtcgtaggcgttctgatcatgggaattgccgagaatgtcatgaacctgctcaacatccaggccttctatcagtacgtggtgcgtggcctcatcctgctgattgcggtcctcctcgacaatatgcgctctgtcgccggcaggccgcgagcctga

SEQ ID NO: 40358 - protein, 317 aa, Sinorhizobium meliloti 1021
MTTSLKKLLLGEQGLLVIFAAAFVVVALTVPNFLTERNMLGLLQSVVTIGVVACTMMFCLASRDFDLSVGSTVAFSGMVAVMASNATGSIVLGLLAALACGGIVGLANGIVIARFRINALITTLATMQIVRGFALIASDGRAVGINDPVFYQLSLSKFLTVPTPIWVMALFFIVFGFLLNRTVFGKNTLAIGGNPEASRLAGVDVARMRIWIFALQGLVCAVAGVLLASRITSGQPNAATGLELSVISACVLGGVSLAGGRATMTGVVVGVLIMGIAENVMNLLNIQAFYQYVVRGLILLIAVLLDNMRSVAGRPRA

SEQ ID NO: 40359 - DNA, 1032 bp, Sinorhizobium meliloti 1021
  CDS (1)..(1032): transl_table=11
atgcttgatctcttttcccgcaatcgcgtcgcaacgctcatcctagtgcttgccgtcgcctacgccgcgatcggcacggccgcgcccggctatctgtccggcgccactgcctcggtggttgtctccaacagcctcgtcctgatgctgatctcgctcgggactatgatggtcatcctgacgcgcaatatcgatgtgtcgagcggttcggtgcttggcctcagcgccgcggtgctcggcctttcgctcacagccggcgtgagcctgccgctcgccatcgccttctgccttgcaaccggtgctgtcgccggggccttcaacggtctgatggttgcctatctcggcattccatccatcgtcgccacccttggcacgcttggactttatcgcggcatcatgctcgtcctcacgggcgggcgctggatcgaggacctgccgcagggtctgaaggcgctcgccgccaatctcggcttcggcttctccgtcctcacgattgttgtgctggcacttgttgcgctcgcctggatcgtactgcgaaggacgcgcttcggccgcaatttctacgcagtcggcgataaccgcgcggctgcccaccatctcggtgtaccggttaagctggtgcagttttccgctttcgttgcaacgggcgtctgcgccgccctcgccggcctcgtcttcgccgcccagatcggcttcatcccaaatcaggccggtaacggcatcgaactgaaggccatcgccgtcaatgtgctaggaggcgtgagccttctcggaggcaccggttcggtcgctggcgtcttcaccgccgtcatctttatcacttcgatagacagtgccctcgttttcttgaagatcccggcctattggaatgacttcattgcaggcgcgatcctgctctcggtcctgctcctcgacggccgcatccgccagattatcgaccggcgcatccgtgcccgccgctatggggtgcacgagcgcggcccaacacaatcccgtgagacgacgacggcgcgcaatgtggaggcaagccgatga

SEQ ID NO: 40360 - protein, 343 aa, Sinorhizobium meliloti 1021
MLDLFSRNRVATLILVLAVAYAAIGTAAPGYLSGATASVVVSNSLVLMLISLGTMMVILTRNIDVSSGSVLGLSAAVLGLSLTAGVSLPLAIAFCLATGAVAGAFNGLMVAYLGIPSIVATLGTLGLYRGIMLVLTGGRWIEDLPQGLKALAANLGFGFSVLTIVVLALVALAWIVLRRTRFGRNFYAVGDNRAAAHHLGVPVKLVQFSAFVATGVCAALAGLVFAAQIGFIPNQAGNGIELKAIAVNVLGGVSLLGGTGSVAGVFTAVIFITSIDSALVFLKIPAYWNDFIAGAILLSVLLLDGRIRQIIDRRIRARRYGVHERGPTQSRETTTARNVEASR

SEQ ID NO: 40361 - DNA, 963 bp, Sinorhizobium meliloti 1021
  CDS (1)..(963): transl_table=11
atgacacagaacacagcagccaaagccgccctggttcgggctctcaagcaatatggcggcatcttcctttcgctggtgatgctctgcatcgtcttttccttcttcaacccgcgcttcatgacggttgtaaacttcatgaacatcctgcagcaggtcgccgttgttgcgatcgcggccttcgggatgacatgggtgatcctgctcggcgagatcgatctttccgtcggctcgatcatcgcggtggcaggaatggtcggggcgcaatgctttgccttcggaatgggtttcgcgccggcaatcgcgctgacgctcgccgccggcgccctgatgggaatgttgaacggggtgctgacggccaaactgctcttgccgtccttcatcgtcacggtcgcgaccatgggtatctatcgcggcatggtcagcctgccgaccaacggagcaccggccatgatcgagaacgaaacctggaccgcaatcggtaccgagagcttcctgggactgccgatcatcatctgggtcgtcgccgttctcttcgtcatcaatcagatcgtgctcagcaagacgagcttcggccggcgcgcctatctgaccggcggcaaccgtgaggcggccgtctactccggtatcaaggtcgaccggctgaagatcctgatcttcatgatctccggcgtgatggcggccatcagcggcgtgctgctttcctcccgcctgttctccgcacagaccaatgcgggcatgagctacgagcttgacgccatcgccgcggccgttctcggcggcaccagccttgcgggcggcgtcggaaccatggtcggcacgctgatcggcgcgctcatcatcggcgtcatgaacaacggcatgaacatgctctccgtcccctacttctaccagctgatcgtcaagggactggtgatcctcgtcgccgtctggctcgacgtccgtgccaagcaggcaaagcgctga

SEQ ID NO: 40362 - protein, 320 aa, Sinorhizobium meliloti 1021
MTQNTAAKAALVRALKQYGGIFLSLVMLCIVFSFFNPRFMTVVNFMNILQQVAVVAIAAFGMTWVILLGEIDLSVGSIIAVAGMVGAQCFAFGMGFAPAIALTLAAGALMGMLNGVLTAKLLLPSFIVTVATMGIYRGMVSLPTNGAPAMIENETWTAIGTESFLGLPIIIWVVAVLFVINQIVLSKTSFGRRAYLTGGNREAAVYSGIKVDRLKILIFMISGVMAAISGVLLSSRLFSAQTNAGMSYELDAIAAAVLGGTSLAGGVGTMVGTLIGALIIGVMNNGMNMLSVPYFYQLIVKGLVILVAVWLDVRAKQAKR

SEQ ID NO: 40363 - DNA, 999 bp, Sinorhizobium meliloti 1021
  CDS (1)..(999): transl_table=11
atggcaattacgctcgatcgggcagtcggacagagagaccggggatggctctcgttcctgttggccagccaggcattctgggtcctggtggcggtcatcctcgcctgcctcttcctgtcgattgccaccgactccttcgcaacggcaaaaaacctctacaacatcacgcgcaatttcaccttcgtcgcgatcatcgctctcggaatgacgctggtcatcattaccggcggcatcgatctttcggtgggttcggtcctttgcctgtgcagcatggtgctggcagtggtcatgcatgccggttacggcatcgaggtgggtattgccgcctcgatcggcacggcgctggtcgccggcgcattcaacggcgtcatgatcgcctatctaggctttccgcctttcgtgatcaccctcggaatgctctcgatcgcgcgaagcctggcgatggtcgcttccaacaatacggtcgtattcgagttcggcccggaccacgacacgctcctggctcttggcggcggcgcctggttcctcggcatcgccaatccggtgctctacatgatcgtcctggcactcctcaccggcttcgttctgcgctggacgaagttcggccgctacgtcttcgccatcggcggcaacgagcatgccgcgacgctcaccggcgttccggtgagaaggatcaaggttgccgtatacatgatctccgcgctcgcagccggcatcgcaggcatcatccagaccggctggctcggggccgtgacgaccaatatcggcgcaggaatggagcttcaggtcatcgccgctgccgtcatcggcggcgccaatcttgccggcggcgccggcacggcctccggcgctctgatcggagctgcgctgatcgaggtgatccgcaacagcctcggcctgctcgggatcaacgcattctggcagggcgccttcatcggcggcgccatcgtgctcgcggtgctttttgaccggatccgaaacttccggcaaagcgaatag

SEQ ID NO: 40364 - protein, 332 aa, Sinorhizobium meliloti 1021
MAITLDRAVGQRDRGWLSFLLASQAFWVLVAVILACLFLSIATDSFATAKNLYNITRNFTFVAIIALGMTLVIITGGIDLSVGSVLCLCSMVLAVVMHAGYGIEVGIAASIGTALVAGAFNGVMIAYLGFPPFVITLGMLSIARSLAMVASNNTVVFEFGPDHDTLLALGGGAWFLGIANPVLYMIVLALLTGFVLRWTKFGRYVFAIGGNEHAATLTGVPVRRIKVAVYMISALAAGIAGIIQTGWLGAVTTNIGAGMELQVIAAAVIGGANLAGGAGTASGALIGAALIEVIRNSLGLLGINAFWQGAFIGGAIVLAVLFDRIRNFRQSE

SEQ ID NO: 40365 - DNA, 996 bp, Sinorhizobium meliloti 1021
  CDS (1)..(996): transl_table=11
atgacccacacaacagacacagtgatgccgcaggaacagaagggttttgtcgactatcactccatcgttcagcgtttcgggaccctggcgatctttctcgtgctcgtcgccgtagcgacctggtggtcggacagttttctcactcgcggcaacctcctcaacgtattgcggcaggttgcctcgacagccggcatcatggccgtcggcatgctgttcgtcatcctgacgcgcggcattgacctttcggttggatcggtcatggccctgggttccgtactcacgggctacttctgcgcgatgttaggctatggcaccggggccaccatttttcttgtcttgttgtgcggcgctgcctgcggcctggtaacgggcggtttcatcgcgtatctcaggctgccgtcctttgtcatgtcgcttgccatgatggcagtcgcgcgcggcctttccctgatcatttccgaggggcgaccaattccgctcagcgatgcgggcgcagctttcagcagtttcggttccggcttcgtgctgggcattccccaaccagtcattttgatgttcgcaatctatatcgccggcggtgtcgtcctcaacttcacccggttcggacgcgtcattacggcaatcggttccaacgaggaggctgtccgactctccggtatcgccgtcccgcgctatatcgtcgccgtctatgtgatctccggtttgctcgccggtttggcaggtatcatcgccgcgagccgcacaggcgtcggctctgctcaggtcggcatcggggccgaactcaatgtgatcgccgccgtcgttatcggcggggcgagcctgatgggcgggaagggcggcgtcatcaacacgctgcttggcgctttggtcatgggaattatcaccaacatcatgaaccttgcgggcgtgcccgggtatcaccagcaggtttatatgggagcgatcatcgtcgttgccatgctgttgcagtacagcaccggctctctgaagcgatga

SEQ ID NO: 40366 - protein, 331 aa, Sinorhizobium meliloti 1021
MTHTTDTVMPQEQKGFVDYHSIVQRFGTLAIFLVLVAVATWWSDSFLTRGNLLNVLRQVASTAGIMAVGMLFVILTRGIDLSVGSVMALGSVLTGYFCAMLGYGTGATIFLVLLCGAACGLVTGGFIAYLRLPSFVMSLAMMAVARGLSLIISEGRPIPLSDAGAAFSSFGSGFVLGIPQPVILMFAIYIAGGVVLNFTRFGRVITAIGSNEEAVRLSGIAVPRYIVAVYVISGLLAGLAGIIAASRTGVGSAQVGIGAELNVIAAVVIGGASLMGGKGGVINTLLGALVMGIITNIMNLAGVPGYHQQVYMGAIIVVAMLLQYSTGSLKR

SEQ ID NO: 40367 - DNA, 1215 bp, Sinorhizobium meliloti 1021
  CDS (1)..(1215): transl_table=11
atggtcgccgatacgagcaccgaaaccaccaaaccgtcgatcggtgactacctcaggaacaacattcgcgaatacggcctgctggtcgcgctcgtcatcatcatgctgttcttccagttcgtcaccaacggcgtcctcttcaggcccgtcaacatcacgaacctggtgctgcagaactcgttcatcgtcatcatggcgctgggcatgctgctgatcatcgttgccgggcacatcgatctgtcggtcggctccatcgtggccttcatcggcgcgatttcggcgatcatgctcgtcaaatggggcttgcctgcctttgtggtcattcccgcctgcctgatcgtgggcggtatcatgggcgcggcgcagggctactgggtcgcctatcagaagatcccttccttcatcgtcacgctcgccggcatgctggtgttccggggaatgacctatgtggtcctcggcggccgtccgatcggaccgtttccgaaggacttccagatactgtcgaccggattcgttcccgactttctttacttcctcagcccgagcccggagacgatcaagaacatggtcgccctggtcgccgtgctgttgctcgtcggctatgcgatctttgccggggttcgcaatcgccggatcaacgagcagcacggcacggagaacgagccgttcgtcttcttcgcgatccagatggcggtcatcagcctggtggcactgttcctcggcttccagctttcgacctatcggggcctgcccaacgtcctagtcgtcatgggcgtgctgatcgccgtctacaccttcgtcaccacgcgttcgacgatcggccgccggatatacgcgatgggcggcaacgagaaggcgaccaagctctccggcatcaataccgaacggctgaccttctacgccttcgtgaacatgggcgcgctcgcggcgcttgccggcatgatcatcacggcccgtctgaactcggcgaccccgaaagccggcgtcggcttcgagctcgacgtgatcgcggcctgcttcatcggcggtgcgtccgcctcgggtggcgtcggcaagattaccggcgcggtgatcggcgctttcatcatgggcgtcatgaacaacggcatgtccatcatgggcatcggcatcgactaccagcaattgatcaagggcctcgtgctgctcgcagccgtgttcttcgacgtctacaacaagaacaagggcaagggctga

SEQ ID NO: 40368 - protein, 404 aa, Sinorhizobium meliloti 1021
MVADTSTETTKPSIGDYLRNNIREYGLLVALVIIMLFFQFVTNGVLFRPVNITNLVLQNSFIVIMALGMLLIIVAGHIDLSVGSIVAFIGAISAIMLVKWGLPAFVVIPACLIVGGIMGAAQGYWVAYQKIPSFIVTLAGMLVFRGMTYVVLGGRPIGPFPKDFQILSTGFVPDFLYFLSPSPETIKNMVALVAVLLLVGYAIFAGVRNRRINEQHGTENEPFVFFAIQMAVISLVALFLGFQLSTYRGLPNVLVVMGVLIAVYTFVTTRSTIGRRIYAMGGNEKATKLSGINTERLTFYAFVNMGALAALAGMIITARLNSATPKAGVGFELDVIAACFIGGASASGGVGKITGAVIGAFIMGVMNNGMSIMGIGIDYQQLIKGLVLLAAVFFDVYNKNKGKG

SEQ ID NO: 40369 - DNA, 1362 bp, Sinorhizobium meliloti 1021
  CDS (1)..(1362): transl_table=11
atggccatggccgacatcacaaaagccaaccagacacgggccgatcagaaaccgggcgcgcaggccggccgcgcccgcacgacggacgaaaacccggtgaaacgcttcttccgtgccaccgaaatcgatacccggctgctcggcatggtcggcgcgctgatcatcatatggctcggtttccaggtgatgaccggcggactgttcgacggcctgttcctgaaaccgcgcaacctgtggaacctgaccgtccagacctcatccgtcgccgtcatggcgaccggcatggtgctggtcatcgtcacccgcaacatcgacctctcggttggctccgtgctcggcttctgcggcatgatcatgggcgtcctgcaggcgcaggtcctgccgcaatatctcggcctcggccatcccgccacctgggcgatcacccttgcctgcggcatcgccgtcggcggcgccatcggcgcgcttcacggatcgatcatcgccttcctcaacgttcccgctttcatcgtgacgctcggcggcctgctggtctggcgcggcgcaacctggttcgtgacgagcggccagacggttgcgccgatggacgccaccttccgtctcatgggcggcggcaccgagggttccatcggcgcgacggcaagctggatcgtcggctccctcgcctgtatcgccatcgtcggcgccattttgaattcgcgcaagcagcgcaagcgctttggcttcccgctacgccctgtctgggccgagtatttcctgtcgatcctcggctgcgccctggtgcttggcgcagtcgccgtggccaaccattattactggccggtcaatatcgcccgcagatatgccgatgcgaacggcatcgcctggccggacggaggcctgcagatctcgcacggcattgccattcctgtcctggtcgcgattgtcgtcggcatcgtcatgaccttcatcgccacccgccttcgcttcggccgctacgtcttcgcactcggcggcaaccccgaagcggccgagctcgccggcatcaagacgcgctgggtcaccgtcaagatcttcacgctgatgggcgtgctctgcgccatcgcagcggccatctcgacggcgcgcctcaacgcggcgaccaatgcccagggcgagctcgacgagctctacacgatcgcggccgcagtcatcggcgggacctcgcttgccggcggcgtcggcaccattgccggcgcgatgatcggcgcgctcgtcatgcaatccctgcagtcgggcatggtccttctggggatcgatacgcccttccagcggatcgtcgtcggcgtcgtgctcgtcaccgccgtctggctcgacaccgtctaccgcgcccgtgcaaaataa

SEQ ID NO: 40370 - protein, 453 aa, Sinorhizobium meliloti 1021
MAMADITKANQTRADQKPGAQAGRARTTDENPVKRFFRATEIDTRLLGMVGALIIIWLGFQVMTGGLFDGLFLKPRNLWNLTVQTSSVAVMATGMVLVIVTRNIDLSVGSVLGFCGMIMGVLQAQVLPQYLGLGHPATWAITLACGIAVGGAIGALHGSIIAFLNVPAFIVTLGGLLVWRGATWFVTSGQTVAPMDATFRLMGGGTEGSIGATASWIVGSLACIAIVGAILNSRKQRKRFGFPLRPVWAEYFLSILGCALVLGAVAVANHYYWPVNIARRYADANGIAWPDGGLQISHGIAIPVLVAIVVGIVMTFIATRLRFGRYVFALGGNPEAAELAGIKTRWVTVKIFTLMGVLCAIAAAISTARLNAATNAQGELDELYTIAAAVIGGTSLAGGVGTIAGAMIGALVMQSLQSGMVLLGIDTPFQRIVVGVVLVTAVWLDTVYRARAK

SEQ ID NO: 40371 - DNA, 1323 bp, Sinorhizobium meliloti 1021
  CDS (1)..(1323): transl_table=11
atgaatttcctgaaggctctctcgcgcacgaaactctattgggggctgatcgccattttcctgatcggagtcctgtcctcaccgctgacgtcatcgggcaggaacatctttctctcctccggcaatctcctcgacgtgttgcggcaggtatcggccaccgggctgatcgccaccggcatgacggccgtcattctgaccggcggcatagacctttctgtcggctcgctgatggcgatctgcaccgtcgtctgcgcgatgctcttgaccgttccgggggacacggccgccctctatctggggctgccggccgtcggacttgccgtcctggtcgtcggtgcggcggccgtacgcttcgtcttcctgaatatcgagaaatcccgtgcgggcgtgacgcatatccgcgacatccagcttgaccggacacgcggtaccgttctgcctgccgcagccggcatcgttctctgtgccctggttctgagcttcctcttgcctcagatgcagacgaaattcggcgtgctcggcgttctgctcgttgcgccggcggtcggcctcatgttcggcgcagtcaacggcgtgatcatcgtggtcggacggttgcagccattcatcgtcacgcttgccatgatggtcacggcgctcggcatcgcccggctcaccgccgggcagaacaacgccgttctgccggtctataccggcagcaatgccaccgccgacttcgatatgctgcggcagctagtcttcggcatcgtgccgatgcccggcatattcttcatcgtcgcgattcttctctacggtgcggtgctgcgcttcacgcctttcggccgctatgtctacgccatcggcggaaacgaggaggcggcgcgcctttccggcatcaatgcgggccgggtgaagatcgtcacctatgcggtatcgggtctcctcgcgggcatcgccgcggtgctctatgtggcgcagtaccgccagggcaagccggacgccggcgcgggcctcgaactggatgcgatcgcggcagtggtcatcggcgggacgagcctgatgggaggacgcgggagccttgccgggacgttctgcggcgtcctgatcttcggcctgctctccaacatcctgcagctccacaacatcaattccaatcttcagctggtgctgaagggcgtgatcatcatcggcaccgtgctcgttcaggagcgcaatgcctacgatcttctcgcgcagttgcggctgccgggcgcaggccggcgcccggctcaaggagacacgtccgtggaggagcggacgtcgagagagacgttgtccataacaatgggaggaaagaagaaatga

SEQ ID NO: 40372 - protein, 440 aa, Sinorhizobium meliloti 1021
MNFLKALSRTKLYWGLIAIFLIGVLSSPLTSSGRNIFLSSGNLLDVLRQVSATGLIATGMTAVILTGGIDLSVGSLMAICTVVCAMLLTVPGDTAALYLGLPAVGLAVLVVGAAAVRFVFLNIEKSRAGVTHIRDIQLDRTRGTVLPAAAGIVLCALVLSFLLPQMQTKFGVLGVLLVAPAVGLMFGAVNGVIIVVGRLQPFIVTLAMMVTALGIARLTAGQNNAVLPVYTGSNATADFDMLRQLVFGIVPMPGIFFIVAILLYGAVLRFTPFGRYVYAIGGNEEAARLSGINAGRVKIVTYAVSGLLAGIAAVLYVAQYRQGKPDAGAGLELDAIAAVVIGGTSLMGGRGSLAGTFCGVLIFGLLSNILQLHNINSNLQLVLKGVIIIGTVLVQERNAYDLLAQLRLPGAGRRPAQGDTSVEERTSRETLSITMGGKKK

SEQ ID NO: 40373 - DNA, 1026 bp, Sinorhizobium meliloti 1021
  CDS (1)..(1026): transl_table=11
atgaataccaatgtcgcagcacagggcacgggctcgtccctcgcccgctcgagacggcgcatgccgcccgagctcaacatctttctggtgctgatcggtatcgcgctcgtctacgaggttctcggctggctcttcgtcggccagagctttctgatgaattcgcagcgcctgacgatcatgatcctgcaggtgtcggtgatcggcatcatcgccgtcggcgtcacgcaggtcatcatcacgggcggcatcgacctctcgtcaggctcggtcgtcggcatgaccgcgatgatctcggcgagcgtcgcgcaggcctccacctggccgcgggcgctctatccgtcactgaccgaccttccggccatcgtaccgatcggccttggtgtcgggatcggtctgctcgccggcttcatcaacggccagctcatcgccaggaccaagatcccgcccttcatcgccacgctcggcatgatggtgtcggcccgcggtgtctccaagtggtacacgaagggtcagccggtctcgggtctcaccgagcaattcaacttcatcggcacgggcatctggccggtgatcgtcttcctcgtcgtggcgctgatattccacatcgcgctgcgctacacccgctacggcaaattcacctacgcgatcggcgccaatgtccaggccgcgcgcgtctccggcatcaatgtcgaagcccatctggtgaaggtctatgcgatcgccggcatgcttgcgggcctcgcaggcgtggtcaccgccgcccgcgcccagacggcgcaggccggcatgggcgtcatgtacgaactcgacgcgatcgccgcgaccgtcatcggcggcacgtcgctcacaggcggcgtcggccgtgtcaccggtacggtgatcggcacggtgatccttggcgtgatgacgtcaggcttcaccttcctccgggtcgacgcctactaccaggagatcgtcaagggcatcatcatcgtcgctgctgtcgttgtcgacgtctatcgccagaaaggccggaaaaagacgtaa

SEQ ID NO: 40374 - protein, 341 aa, Sinorhizobium meliloti 1021
MNTNVAAQGTGSSLARSRRRMPPELNIFLVLIGIALVYEVLGWLFVGQSFLMNSQRLTIMILQVSVIGIIAVGVTQVIITGGIDLSSGSVVGMTAMISASVAQASTWPRALYPSLTDLPAIVPIGLGVGIGLLAGFINGQLIARTKIPPFIATLGMMVSARGVSKWYTKGQPVSGLTEQFNFIGTGIWPVIVFLVVALIFHIALRYTRYGKFTYAIGANVQAARVSGINVEAHLVKVYAIAGMLAGLAGVVTAARAQTAQAGMGVMYELDAIAATVIGGTSLTGGVGRVTGTVIGTVILGVMTSGFTFLRVDAYYQEIVKGIIIVAAVVVDVYRQKGRKKT

SEQ ID NO: 40375 - DNA, 957 bp, Sinorhizobium meliloti 1021
  CDS (1)..(957): transl_table=11
atgctgctcgccggcatggttctttatttctcgctcgtaaccggaggttttgcctcccctcaaagcgcagtcttcattctgcaatccgtgtcgatcaccggcattctcgccctcggcgtgacggcgacgcttgtcgtcggggggttcgacctctcgattggctcggtcgccaccacggcgatgatggcttcctcctatgtcatggtggtgatgggaggcggcgcgcttacggcggcgctcgtatgcctcgccgtcggcgcgctcgtcggcctgatcaacggcttcatcatcgtctacatgcgcgttccggaccttctggctaccctcggcatgatgttcctgctgctcggccttcagcgcatcccgaccgagggccgctcgattgccgcgggcatgacgctgcccgacggttcggtcgcgaccggcactttcagtccggctttcctggcgctcgggcgccaccgcttcgatctcgtcctgcccaacctcgtgccggtctcggtcgtggtgctcgtggtgctcgccatagcgatctggttcttcctcgaatacacccgcttcggccgcataatgtatgcggtcgggtccaacgagcgcgcggccgcgctcgcaggggcgccggtcaatgcctacaagatttcggcctacgtcatttccggcgtcttcgcctctatcggcggcattctgctcgcagcacgcctcggccgcggcgatatcgcctccggaaacaacctgctgctcgacgccgtcgccgccgcgctgatcggttttgccgtgctgggtgcggccaagccgaacgctttcggaacggccgtcggcgcgcttttcgtcgggatcctactgcaggggctgacgatgatgaatgcgccttactacacgcaggatttcatcaagggcgccgtgctcgtcgtcgccctgatctttacctttgcgctctcgaaaagaggcaaacgctga

SEQ ID NO: 40376 - protein, 318 aa, Sinorhizobium meliloti 1021
MLLAGMVLYFSLVTGGFASPQSAVFILQSVSITGILALGVTATLVVGGFDLSIGSVATTAMMASSYVMVVMGGGALTAALVCLAVGALVGLINGFIIVYMRVPDLLATLGMMFLLLGLQRIPTEGRSIAAGMTLPDGSVATGTFSPAFLALGRHRFDLVLPNLVPVSVVVLVVLAIAIWFFLEYTRFGRIMYAVGSNERAAALAGAPVNAYKISAYVISGVFASIGGILLAARLGRGDIASGNNLLLDAVAAALIGFAVLGAAKPNAFGTAVGALFVGILLQGLTMMNAPYYTQDFIKGAVLVVALIFTFALSKRGKR

SEQ ID NO: 40377 - DNA, 966 bp, Salmonella typhimurium LT2
  CDS (1)..(966): transl_table=11
atgacaacccaggctgtttctggtcgccgttatttcactaaagcgtggcttcttgagcagaagtcgctcattgccctgctggtgttgatcgcgattgtttcgacgttgagccccaacttttttaccgttaataatctgttcaatattcttcaacagacctccgttaacgccattatggcggtggggatgacgttggtgattctgacatcggggatcgatctgtccgtcggttccctgctggcgctcaccggtgcggttgccgcttcaatcgtcggcgttgaagtgaatgcgctggtcgcggttgccgccgcgctggcgctgggcgctgcgattggcgccgtcactggcgttatcgtcgcgaagggccgcgtacaggcgtttatcgctacgctggtgatgatgctgctactgcgtggcgtgacgatggtttacaccgacggtagcccggtcaacaccggctttaccgataacgccgatctgtttggctggttcggtatcggtcgtccgctgggcgttcctacgccggtctggatcatggctatcgtctttatcgccgcctggtatatgctgcatcacactcgtctgggacgctatatctacgcgctgggcggtaacgaagcggcgacgcgtctgtctggcattagcgtgagcaaagtgaaaattatcgtctattcactttgcggcctgacagcatcgctggcgggcatcattgaagtggcgcgcctctcttccgcgcagccgacggcgggtaccggctatgagctggatgctattgccgccgtggtgctgggcggcaccagccttgcaggtggtaaagggcgcattgttgggacattgatcggcgcattgattctcggcttccttaataatggtttgaatttgttaggtgtttcctcctattaccagatgatcgtcaaagcggtggtgattttgctggcggtactggtagacaacaaaaagcagtaa

SEQ ID NO: 40378 - protein, 321 aa, Salmonella typhimurium LT2
MTTQAVSGRRYFTKAWLLEQKSLIALLVLIAIVSTLSPNFFTVNNLFNILQQTSVNAIMAVGMTLVILTSGIDLSVGSLLALTGAVAASIVGVEVNALVAVAAALALGAAIGAVTGVIVAKGRVQAFIATLVMMLLLRGVTMVYTDGSPVNTGFTDNADLFGWFGIGRPLGVPTPVWIMAIVFIAAWYMLHHTRLGRYIYALGGNEAATRLSGISVSKVKIIVYSLCGLTASLAGIIEVARLSSAQPTAGTGYELDAIAAVVLGGTSLAGGKGRIVGTLIGALILGFLNNGLNLLGVSSYYQMIVKAVVILLAVLVDNKKQ

SEQ ID NO: 40379 - DNA, 1047 bp, Ralstonia solanacearum GMI1000
  CDS (1)..(1047): transl_table=11
atgcgttctgattccgccctgccccccgccggctcgcccggcccgtccgagcccccggaggcggcagccggggccgccacgcgcgccggccgcggcgcgctgggcatgtcgctcggggccatcggcggcctgctggcggcgctggccgcgatgctggtcctgttcagcctgctgtcggacaccttcttcacggtgtcgaccttcaccaccatcgccaacgagatccccgacctgctcgtgatggcggtgggcatgaccttcgtgctgatgatcggcggcatcgacctgtcggtgggctcggtgctggcgctgtcggcgtcgatgctgtccatcgccatgacccggttcggctggggcctggcgccggcggccctgctgggcgtgctggcggccaccgcggccggcgccctgaccggcacggtgacggtgcgctggggcattccgtcgttcatcgtctcgctgggcgtgctggaaatggcgcgcggcctggcctacagcctgaccgattcgcgcaccgtctacctcggtgccgcggtggactggctggccaccccgatcgcgctgggcatcgcgccgtcgttcctgatcgcgatcgccatcaccgtgatcggccaggtcgtgctggtgcgcaccgtgttcggccgctacctggtcgccatcggcaccaacgaggaggcggtgcggctggcgggcgtcaatccgcatccgtacaagatcgccgtgtttgcgctgatgggatggctgtcggggctggcggcgctgttccaggtgtcgcggctggaagcggccgaccccaacgcggggggcggcatggagctgcaggtgatcgccgccgtggtgatcggcggcaccagcctcatgggcggacgcgggtcggtggcccgcacgctgttcggcgtcctcatcatttctgtgctcgaagccggcctcgcgcagatcggcgcttcggagccgaccaaacggatcatcacgggcgcggtcatcgtcgcggccgtggtcatggatacctatcgaacccggaccaaccgggtcactacacgccaataa

SEQ ID NO: 40380 - protein, 348 aa, Ralstonia solanacearum GMI1000
MRSDSALPPAGSPGPSEPPEAAAGAATRAGRGALGMSLGAIGGLLAALAAMLVLFSLLSDTFFTVSTFTTIANEIPDLLVMAVGMTFVLMIGGIDLSVGSVLALSASMLSIAMTRFGWGLAPAALLGVLAATAAGALTGTVTVRWGIPSFIVSLGVLEMARGLAYSLTDSRTVYLGAAVDWLATPIALGIAPSFLIAIAITVIGQVVLVRTVFGRYLVAIGTNEEAVRLAGVNPHPYKIAVFALMGWLSGLAALFQVSRLEAADPNAGGGMELQVIAAVVIGGTSLMGGRGSVARTLFGVLIISVLEAGLAQIGASEPTKRIITGAVIVAAVVMDTYRTRTNRVTTRQ

SEQ ID NO: 40381 - DNA, 1008 bp, Ralstonia solanacearum GMI1000
  CDS (1)..(1008): transl_table=11
atgtcccagtcccaacccctgcaacgcgccgacgggtttgccgcgtcggcccgctcggccatgaacaacacgcgcctgctgaggcggctggacgatttcagcctgccgctgatcttcgccatcctgtttgccgcgctgtcgctgtcggtcgagtacttcttctcgtggcagaacatggtcggcctggcgctgtccgtctcgcagatcggcatggtggcctgcaccatgatgttctgcctggcctcgcgcgacttcgacctgtcgatcggctccacggtggcgttcgccggcgtgctgtgcgcgacggtcatcaacgccaccggcagcatcgcgctgggcatcggcgcgagcctgctggccggcgcggtgatcggcggcatcaatggcttcgtgatcgcccggctgaagatcaacgcgctgatcaccacgctcgccaccatggagatcgtgcgcggcctggccttcatcgcctcgcacgggcaggcggtgggcgtctcggagatggcgttcttcgacctgggcaacaccatcgtgctgggcgtgccgacgccggtgtgggtggcggcgctgtgcttcgtggcgttcggcgtgctgctcaacaagacggtgtacgggcgcaacacgctcgccatcggcggcaacccagaggcggcgcggctggcgggcgtgaacgtcaacctgacgcgcatcgtgatcttcctggtccagggcgtgattgccgcgctggccggcgtgatcctggccgcgcgcatcaccagcggccagccgaacgcggcgcagggcttcgagctgaacgtgatttcggcgtgcgtgctgggcggcgtgtcgctgatgggcggccgcgccagcatcagcggggtgctggtcggcgtgctgatcatgggcacggtgcagaacgcgatgaacctgctcaatatcgatgcgttctatcagtacctggtgcgcggcggcatcctgctggcggcggtgctggtggaccagatcaagcatcgcggcggccgcgattga

SEQ ID NO: 40382 - protein, 335 aa, Ralstonia solanacearum GMI1000
MSQSQPLQRADGFAASARSAMNNTRLLRRLDDFSLPLIFAILFAALSLSVEYFFSWQNMVGLALSVSQIGMVACTMMFCLASRDFDLSIGSTVAFAGVLCATVINATGSIALGIGASLLAGAVIGGINGFVIARLKINALITTLATMEIVRGLAFIASHGQAVGVSEMAFFDLGNTIVLGVPTPVWVAALCFVAFGVLLNKTVYGRNTLAIGGNPEAARLAGVNVNLTRIVIFLVQGVIAALAGVILAARITSGQPNAAQGFELNVISACVLGGVSLMGGRASISGVLVGVLIMGTVQNAMNLLNIDAFYQYLVRGGILLAAVLVDQIKHRGGRD

SEQ ID NO: 40383 - DNA, 1197 bp, Ralstonia solanacearum GMI1000
  CDS (1)..(1197): transl_table=11
atgtcgaaccttctgcataccgaactcgcccgcaacggcggcagcggcccgcgcctcgatggccgcaccatccagcaactcttcgtgcgctacaaggtgctggccttgctgctggccgtggcgctgatctggatcttcttctggagccagaccaacggcaccttcctgcggccgaacagcatttccaacctgttcctgcagatgtccgtcacgggcatgctggcctgcggcatggtgttcgtcatcatcgccggggagatcgacctgtcggtcggctcgctgctcggcctgctgggcgggctggtcgccatcctgacggtcaaccacggctggaacacctgggtctcggtgggcgtggtgctggcggcgggcgcggccatcggcgcggccaacggcttcatcaccaccaagctgcgcgtgccctcgttcatcgtcggcctgggcggcatgctggccttccgcggcctgctgcaatggagcaccgacagcgtgacgatcgcaccggtgcccgacgacctgggcaacatcgcgcagagcttcgtgccggcctggctcgcgtggagcctggccaccgccatcgtcgcgctgtcggtggtgctgacgctgcgccggcgtgccgagcgcgcgcgcctgtcgctgtcgctgccgccgatgtgggccgacgcgctcaagctgctggccatcgcggccgcctcgttcggcttcgttgcggtgctcaatcaggccaacggcgtgccgctgccggtgctgatcctgctggtgatgctgggcgtgttctcctacgtcgccacgcagaccgtgttcggccgccacgtctacgcggtgggcggcaacatggaagcgacccgcctgtcgggcgtgaacgtggcgcgcgtcaagctgctggtgttcgtcctgatgggcctgatgtgcgccttcgcgggcatcgtcaccacggcgcgctcggcggctggctcgccctccgcgggcgtgggcggcgagctcgatgccatctccgcctgcttcatcggcggcacctcgatgcgcggcggctcgggcacggtctacggtgcgctgatcggcgcgctggtgatggccagcctcgacaacggcatgcagcagatgaacgtcgatgcctcgtggcagatgatcgtcaagggcgtcgtgctggtgctggcggtgtggatcgacgtgctgtccggctccaaccgcggctga

SEQ ID NO: 40384 - protein, 398 aa, Ralstonia solanacearum GMI1000
MSNLLHTELARNGGSGPRLDGRTIQQLFVRYKVLALLLAVALIWIFFWSQTNGTFLRPNSISNLFLQMSVTGMLACGMVFVIIAGEIDLSVGSLLGLLGGLVAILTVNHGWNTWVSVGVVLAAGAAIGAANGFITTKLRVPSFIVGLGGMLAFRGLLQWSTDSVTIAPVPDDLGNIAQSFVPAWLAWSLATAIVALSVVLTLRRRAERARLSLSLPPMWADALKLLAIAAASFGFVAVLNQANGVPLPVLILLVMLGVFSYVATQTVFGRHVYAVGGNMEATRLSGVNVARVKLLVFVLMGLMCAFAGIVTTARSAAGSPSAGVGGELDAISACFIGGTSMRGGSGTVYGALIGALVMASLDNGMQQMNVDASWQMIVKGVVLVLAVWIDVLSGSNRG

SEQ ID NO: 40385 - DNA, 1107 bp, Agrobacterium tumefaciens str. C58
  CDS (1)..(1107): transl_table=11
atggagcgatcgggaggaaaatccatgagcgatcagccagtgcgggcgcaaccgcacaatgaatttgaaaaagtgctgtcaggaagttcgacccaggtcgctgcttttgatacgcacaacaagagtttgctggaaaaattccagcactttctgcattccagccctgcggctgttcccctgatcgttctggtgctgtcacttgccatcttcggcatgacgctgggcggcaagttcttttcggctttctcgctgacgcttattcttcagcaggtggcaatcgtcggcattgtcggcgcggcgcagtcgctggtcattctgaccgcgggtatcgatctttcggtcggtgccatcatggttctctcctccgtcgtcatgggccagttcaccttccgttatggtctgcctgcggaactttccattatctgcggtctcgcagtcggcgcgttttgtggtttcatcaacggcgtgctggtatcgcgcatgcggctgccgcccttcatcgtcacgctcggcatgtggcagatcgtgctggccaccaatttcctctattcggctaacgagacgatccgcgctcaggacattgtccagcaagcgcccattcttcagtttttcggcaataatattcgtatcggcaatgccgtcttcacctacggcgttctcgcgatggttctgctcgtcgctttgctctggtatgtgctcaaccgcaccgcttgggggcgccatctttatgcggtcggtgacgatccagacgcggctgaacttgctggcgttaacgtcaagcgcatgctgacgaccgtctataccctgtccggccttatctgcgccttcgcgggttgggctctcatcggtcgcatcggctcggtgtcgccgactgccggtcagttcgccaacattgaatccatcactgcagtggtcatcggcggcatctcgctgttcggcggacgcggttccatcatgggcatgatcttcggtgcgctgatcgtcggcgtcttttcgctgggcctcaggctcatcgggacagatccgcaatggacctatctgttgattggcgtcctcatcatcttggccgtggcaatcgaccagtggattagaaaggtagcaggctga

SEQ ID NO: 40386 - protein, 368 aa, Agrobacterium tumefaciens str. C58
MERSGGKSMSDQPVRAQPHNEFEKVLSGSSTQVAAFDTHNKSLLEKFQHFLHSSPAAVPLIVLVLSLAIFGMTLGGKFFSAFSLTLILQQVAIVGIVGAAQSLVILTAGIDLSVGAIMVLSSVVMGQFTFRYGLPAELSIICGLAVGAFCGFINGVLVSRMRLPPFIVTLGMWQIVLATNFLYSANETIRAQDIVQQAPILQFFGNNIRIGNAVFTYGVLAMVLLVALLWYVLNRTAWGRHLYAVGDDPDAAELAGVNVKRMLTTVYTLSGLICAFAGWALIGRIGSVSPTAGQFANIESITAVVIGGISLFGGRGSIMGMIFGALIVGVFSLGLRLIGTDPQWTYLLIGVLIILAVAIDQWIRKVAG

SEQ ID NO: 40387 - DNA, 981 bp, Agrobacterium tumefaciens str. C58
  CDS (1)..(981): transl_table=11
atgtccgcgcttgaacgcaatgagggggtcacgcacaccaggagcccgcttgcctggctgagcggtgccaccggaccacttttgggcctgctgatgctctgtgtgttcctgactttcgccagcgagaatttcctgtcgctgcgaaacggcctgaacatcctcgaccagatcaccgttctcggcatcatggccgttggcatgaccttcgtcatcctgcttggcggcatcgatctgtctgtcggctcggtgttggcactgtcgatgatgatcatgggctggacagccaatgtcgcgggcatgccgatgggcatggcgatcgtgctcgcgcttgtcgcgtccgcagcctgcggccttgtggtcggtattctggtaacggccttccgtgtgcccgccttcattgccacacttgcaatgatgtcggttgcgcgcggccttgcaaacatgatcaccgatggccagcagatcgtcggctttcctgactggttcatgatgctggcgattgagcgccatttcggcgtgctgaccgcgaccgtgctgctaatgctggtcgtggtgctggtgtcctgggctttcctgcgcttccgctcggaaggccgcaccgtctatgcggtgggcggcaatcctgaggtggcgcgtcttgccggcatcaacgtgccgctggtgacgatctgcgtttatgtcgtctgcgcggttctggccggtctggcgggcatcgttcttgccgcacgtctcgactcagtacagccctccagcggtttcggctacgagctggatacgattgcggccgttgtgatcggcggaacctcgctttcgggcggtgctggcggcatcggcggaacgctgatcggcgtgctgatcatcggcgtgctgcgcaacggcctcaacctgctcaacgtctctccctttcttcagcaggtcatcatcggtgtcgtcatcgtgctggctgtgggtgctgaaacgctgcgccgtcgcagaagctga

SEQ ID NO: 40388 - protein, 326 aa, Agrobacterium tumefaciens str. C58
MSALERNEGVTHTRSPLAWLSGATGPLLGLLMLCVFLTFASENFLSLRNGLNILDQITVLGIMAVGMTFVILLGGIDLSVGSVLALSMMIMGWTANVAGMPMGMAIVLALVASAACGLVVGILVTAFRVPAFIATLAMMSVARGLANMITDGQQIVGFPDWFMMLAIERHFGVLTATVLLMLVVVLVSWAFLRFRSEGRTVYAVGGNPEVARLAGINVPLVTICVYVVCAVLAGLAGIVLAARLDSVQPSSGFGYELDTIAAVVIGGTSLSGGAGGIGGTLIGVLIIGVLRNGLNLLNVSPFLQQVIIGVVIVLAVGAETLRRRRS

SEQ ID NO: 40389 - DNA, 1197 bp, Agrobacterium tumefaciens str. C58
  CDS (1)..(1197): transl_table=11
atgagttcggcaaacaccacaaacgaagaaagcaacgtcatctcggtcgggtcgtatattcgatccaatatccgcgaatacggcatgctgatcgcgctcgtcgccatcatggttttcttccagttctacaccggcggcatcctgttccgccctgtgaacctgaccaacctcatcctgcagaactcgttcatcgtcatcatggcgcttggcatgctgctcgtcatcgtggccgggcatatcgacctttcggtcggttccatcgtcgccttcgtcggcgcgatcgcggccatattgaccgtgcaatggggcatgaacccgtttctggcggcgctgatttgtctcgtcatcggcggcatcatcggtgctgcccagggttactggatcgcctatcaccgcattccgtcgttcatcgtgacgctggcgggcatgctggtgttccgcggcctgacgcttttcgtgctcggcggcaagaatatcggtcctttcccgaccgatttccaggtcatcagcaccggcttcctgcctgatatcggcggcatcgaaggtctgaacaccacgtcgatgatcctgaccgtgctgattacggtcgcgctgttctatctggcgtggcgccgtcgcgtggtgaacgtgaagcatggcatcgacgtggagccgttcggtttcttcatcgtgcagaatctgctgatctccggcgctatcctgttcctgggttaccagctgtcgacctatcgtggcctgccgaacgttctgatcgtgatgctggttctgatcgcgctttacagcttcgtgacgcgccgcacgaccatcggccgtcgcgtttacgccatgggcggcaatgagaaggcgaccaagctttccggtatcaacaccgaacgcctgagcttcctcaccttcgtcaacatgggcgtgctggccggtcttgccggcatgatcatcgcgacccgcctcaactcggcgacgccgaaggcaggcgtgggcttcgagcttgacgtgatcgcggcctgcttcatcggcggtgcttcggcctccggcggcgttggcaagatcaccggggccgttatcggcgccttcatcatgggtgtgatgaataacggcatgtcgatcgtcggtctcggcatcgatttccagcagatggtcaagggcctcgtgctgctcgccgctgtgttcttcgacgtctacaacaagaacaagggctga

SEQ ID NO: 40390 - protein, 398 aa, Agrobacterium tumefaciens str. C58
MSSANTTNEESNVISVGSYIRSNIREYGMLIALVAIMVFFQFYTGGILFRPVNLTNLILQNSFIVIMALGMLLVIVAGHIDLSVGSIVAFVGAIAAILTVQWGMNPFLAALICLVIGGIIGAAQGYWIAYHRIPSFIVTLAGMLVFRGLTLFVLGGKNIGPFPTDFQVISTGFLPDIGGIEGLNTTSMILTVLITVALFYLAWRRRVVNVKHGIDVEPFGFFIVQNLLISGAILFLGYQLSTYRGLPNVLIVMLVLIALYSFVTRRTTIGRRVYAMGGNEKATKLSGINTERLSFLTFVNMGVLAGLAGMIIATRLNSATPKAGVGFELDVIAACFIGGASASGGVGKITGAVIGAFIMGVMNNGMSIVGLGIDFQQMVKGLVLLAAVFFDVYNKNKG

SEQ ID NO: 40391 - DNA, 1023 bp, Agrobacterium tumefaciens str. C58
  CDS (1)..(1023): transl_table=11
atggccaatattgcagaacccaagaagggcttcgccgtcagcgatcgtcagaaggacatcatccagaaatttgcggcgctcggcagcctctttgcgctggtcgcggtcttctccgcgaccagtaacgccttcttcaccgtcaataatggcatgacgatcgcgctgcaggtgacttctattgcgctgctcggcattggtgccacctgtgtcatcatcaccggcggcatcgatctttccgtcggttcggtgcttgcgcttgccggcgtcgttgccgcccttgcggtgaaggaactcggcatgccggtgcccatcggcatgttgctcggcattctgacggggtcgctttgtggcctcatcaacggtcttctggtgacgcgcttcaagctgccgcccttcatcgccactcttggcatgatgctgattgcccgcggtgtggccctgcagatcaccggtgcgcgcgccgtatccggccttggcgaatccttcggtgaactcggcaatggcgcactcttccgtatcgtcactatcggtgacgatggctttccgaatgtcgtgtttcccggcattccctatccggtcatcctgatggtggtgattgcgcttgcggtttccttcatgcttaaccgctccatcctcggccgccacatctatgccgtgggttccaatgcggatgctgcccgcctttccggcgtcaacgtcgctcgcgtcaccaatttcacctacatcctgtccggcacgctcgccgggctgacgggctgcgtgctgatgtcgcgtctcgttaccgcccagccgaacgaaggcgtgatgtatgagctggatgccattgccagtgcggtcatcggcggcacatcgctgatcggcggcgtgggcacgatttccggcacggccatcggcgcctttgtcatcggcattttgcgtaacggtctcaatatgaacggcgtttccgccttcacgcaacagatcatcattggccttgtcattctggtcaccgtctggatcgaccagctgcgcaaccgccgctga

SEQ ID NO: 40392 - protein, 340 aa, Agrobacterium tumefaciens str. C58
MANIAEPKKGFAVSDRQKDIIQKFAALGSLFALVAVFSATSNAFFTVNNGMTIALQVTSIALLGIGATCVIITGGIDLSVGSVLALAGVVAALAVKELGMPVPIGMLLGILTGSLCGLINGLLVTRFKLPPFIATLGMMLIARGVALQITGARAVSGLGESFGELGNGALFRIVTIGDDGFPNVVFPGIPYPVILMVVIALAVSFMLNRSILGRHIYAVGSNADAARLSGVNVARVTNFTYILSGTLAGLTGCVLMSRLVTAQPNEGVMYELDAIASAVIGGTSLIGGVGTISGTAIGAFVIGILRNGLNMNGVSAFTQQIIIGLVILVTVWIDQLRNRR

SEQ ID NO: 40393 - DNA, 1005 bp, Agrobacterium tumefaciens str. C58
  CDS (1)..(1005): transl_table=11
ttgaccgtctataccgaacgcgccaaaggctcgccgctctcggatttcttcgccgagaatgcacaggtgctttccatcgcagccttttttgccctctgcatggtgttcttctccgtgaccacggatacgtttctgacggccggcaatcttctgaacgtcgtccgtcaggccgcaccgatcctgatcgtctccgtcgcgatgacattcgtcatcatcacgggcggtatcgatctgtctgtcggctcgatggtcgccctgatcaacgccgttggcgccatcctgctcgcggccggttacccctggccgctggttgtcgttgccatgctggtgctcggcggcgggcttggcctggtgcagggctggttcattgcctatcaaggtattccggccttcatcgtcacgcttgccggtctctccatcctgcgcggtgtcgccctctacatcacacagggatattccgttccgataccggatgcgccggggttcttttacctcggcaggggtgattttctcggtatgcccgtccctgccctgatcggcgtcgtcgttaccgtgatcgcctatatcgttctttcgagcacccgctatggtcgtcgtgtcgtcgcggtcggctccaatccggaagcggcgcgccgcgtgggaatgcccgccaaatggattctcgcctcggtctatctggccgcaggcgtggcttcagccattgccgggctcatgattgcggcgcggctggggtcaggatcgtcgaatgcggcagtcgggttcgagcttcaggtggtggcggccgtggttctgggcggcacgtcgctgatgggcggacgcggcaccattcttggcacggtactgggcaccatgaccatcgccgttatcggcaacggtcttatcctcatgcacatctctcccttcttcacccagatcgtgacgggcgccatcatccttgccgcaatctggctcaacacacgcatcttcaccgcgaacttccgccttggcgtgaagagaaagggctga

SEQ ID NO: 40394 - protein, 334 aa, Agrobacterium tumefaciens str. C58
MTVYTERAKGSPLSDFFAENAQVLSIAAFFALCMVFFSVTTDTFLTAGNLLNVVRQAAPILIVSVAMTFVIITGGIDLSVGSMVALINAVGAILLAAGYPWPLVVVAMLVLGGGLGLVQGWFIAYQGIPAFIVTLAGLSILRGVALYITQGYSVPIPDAPGFFYLGRGDFLGMPVPALIGVVVTVIAYIVLSSTRYGRRVVAVGSNPEAARRVGMPAKWILASVYLAAGVASAIAGLMIAARLGSGSSNAAVGFELQVVAAVVLGGTSLMGGRGTILGTVLGTMTIAVIGNGLILMHISPFFTQIVTGAIILAAIWLNTRIFTANFRLGVKRKG

SEQ ID NO: 40395 - DNA, 981 bp, Agrobacterium tumefaciens str. C58
  CDS (1)..(981): transl_table=11
atgatccacagccgcaacctgcccttcctcaccacgctgatgatcttcgtgatcgcctatctgctgtgcgtgctgcaatatccggctatcctgtcgacacgggtgataggcaatcttctgaccgacaatgcctttctcggcattgccgccgtcggcatgaccttcgtcatcctgtcgggcggcatcgatctgtccatcggctcggtcatcgccttcaccagtgttttcgtggccgtgatggtcggcacctataatattcacccgcttctggccttcgccatcgtgctcgtggtctccacgctgttcggctgcctgatgggagcgatgatccgcttcctgtcgatcccgcctttcgtggtgacgctggcgggcatgtttctggcgcgcggtgcagcctatctgatctccacgcaatcggtgccgatttcgcaccccttcatcgacgagatccaaggcttttatttccgctttccgggcggtggcaggctgacggcgctcgccatgctgatgctcatcgtctttgccgccggcatgctgattgccagccgcacccgcttcggcgccaatgtctatgcgctgggcggcaacccgcaatcggccgaactgatgggcgttccgatcgggcgcacgacgatcggcatctatgcgctttccggtttcctttccggcctcgctggcatcgtctacacgctctacacctcgtcggggtattcgctggcgacggttggcgtggagctggatgccatcgccgcagtcgtcatcggcggcacgcttctcacaggcggcacgggacttgtggcgggaacctttgtcggcctgctgatccaggggctgatccagacctacatcgtttttgacggaacgctgtcatcctggtggacgaaaatcgtcattggcgtgctgcttttcgtcttcatcgtgttgcagcgcgcaatcatctggtattcaaacaggagactggccggaccacatccggcataa

SEQ ID NO: 40396 - protein, 326 aa, Agrobacterium tumefaciens str. C58
MIHSRNLPFLTTLMIFVIAYLLCVLQYPAILSTRVIGNLLTDNAFLGIAAVGMTFVILSGGIDLSIGSVIAFTSVFVAVMVGTYNIHPLLAFAIVLVVSTLFGCLMGAMIRFLSIPPFVVTLAGMFLARGAAYLISTQSVPISHPFIDEIQGFYFRFPGGGRLTALAMLMLIVFAAGMLIASRTRFGANVYALGGNPQSAELMGVPIGRTTIGIYALSGFLSGLAGIVYTLYTSSGYSLATVGVELDAIAAVVIGGTLLTGGTGLVAGTFVGLLIQGLIQTYIVFDGTLSSWWTKIVIGVLLFVFIVLQRAIIWYSNRRLAGPHPA

SEQ ID NO: 40397 - DNA, 1065 bp, Agrobacterium tumefaciens str. C58
  CDS (1)..(1065): transl_table=11
gtgaggcgcgccgggatttctcgaggaggaacgattatgactacgaacgccgccaacgcacagttggacgcaaaatccggacgcaagccgcaccggcgcatcccgcccgaggccaatatctttttcgtgctgatcggcattgcgctagtttatgaaattctcggctggattttcatcggccagagctttttgcttaaccagcagcgcctgacgatcatgatcctgcaggtatcggtgatcggcataatcgccgttggcgtgacccaggtcatcatcaccggcggtatcgatctttcctccggctccgtcgtcggcctgacggcgatgttggccgccagcgtggggcaatcatccacatggccgcgggcgctttatccggggctgactgatctgcccttcttcattccgctggctgtcggcattctggctggcgcattggccggctttatcaacgggcaacttatagcgcgcacgaaaatcccgcccttcatcgcaaccctcggtatgatggtgacggcgcgtggcctttccaaatggtacaccaagggccagccgatttccggtctgactgacggtttcaccttcatcggtacaggtgtctggccggtcgtggtgttcctcgtcgtcgccatcattttccacgtcgcgctgcgttatacgcgttatggcaagttcacctacgccatcggcgccaaccagcaggcggcccgcgtttccggtatcaatatcgaagcgcatctgatcaaggtctatgccattgccggtctgctggccggtctcgccggcgtcgtcaccgccgcccgtgcacagacagcgcaggccggcatgggtgtgatgtatgaacttgacgccatcgctgcggccgtcatcggaggcacatcgctcgccggcggcgctggccggattaccggaactgtcatcggcaccatcattcttggcgtcatgacttcaggcttcacgttcctcagggtcgacgcctattaccaggagatcgtcaagggcctgatcatcgtggccgccgttgttgccgacgtttaccgccagaagaaacgcgcaaagcgctga

SEQ ID NO: 40398 - protein, 354 aa, Agrobacterium tumefaciens str. C58
MRRAGISRGGTIMTTNAANAQLDAKSGRKPHRRIPPEANIFFVLIGIALVYEILGWIFIGQSFLLNQQRLTIMILQVSVIGIIAVGVTQVIITGGIDLSSGSVVGLTAMLAASVGQSSTWPRALYPGLTDLPFFIPLAVGILAGALAGFINGQLIARTKIPPFIATLGMMVTARGLSKWYTKGQPISGLTDGFTFIGTGVWPVVVFLVVAIIFHVALRYTRYGKFTYAIGANQQAARVSGINIEAHLIKVYAIAGLLAGLAGVVTAARAQTAQAGMGVMYELDAIAAAVIGGTSLAGGAGRITGTVIGTIILGVMTSGFTFLRVDAYYQEIVKGLIIVAAVVADVYRQKKRAKR

SEQ ID NO: 40399 - DNA, 1002 bp, Agrobacterium tumefaciens str. C58
  CDS (1)..(1002): transl_table=11
atgcaacgtctactcaaaaatcgcgaatggctgctggcgggtatcatcatcatcatgattgccggctttgccctgcgcgcgcccggcttcggccggcccggcaatctcgtcaatatcttcaatgacacgtccatcctcatcatcctggcgcttggccagatggcggtcattctcaccaaatccatcgacctctcagtcgccgccaatctcgcctttaccggcatggcggtggcgatgaccaatgccgcctttccgggcgtacccctgccgctgctcatcgtcatggcggtcggcatcggcgcgtttctgggctcgctcaacggtatcctcgtctggtggctcggcattccgcccattgtcgtgacgctcggcacgctcaccatctatcgcggcatggctttcgtgctctcgggcggcggttgggtgaatgcgcatcagttttcgccgaccttcctcaacgtgccgcgcacgatgatccttggcatgccggttctgtcttgggtcgccattctcatcatcgcgggagcctggctggtgctcacccgtacctctttcggccgctcagcctatgcgtccggcggcaacccgggtgcggcggtctatgcgggcatcgatgtcggccgcacgcgcttcttcgccttcgtgctctcaggcgctctggctggcctcgccagctatctctgggtgtcgcgttacgccgtcgcctatgtagatatcgccgccggtttcgagctggacagcgtggcggccaatgtaatcggcggcatttcgattgccggcggtatcggctcggtggccggtgcggtgctcggcgcgctgttcctcggcgtcatcaagaacgcgctgcccgtcatcggcatctcgcccttcgcgcagatggcgatatcaggcgtggtcatcgtgctcgccgttgtcttcaacgcccgcgccgaagccagaaaaggccgtatcatcctgcgtgaccgggccgcggcagaccatgggaaggaagcatctgcatga

SEQ ID NO: 40400 - protein, 333 aa, Agrobacterium tumefaciens str. C58
MQRLLKNREWLLAGIIIIMIAGFALRAPGFGRPGNLVNIFNDTSILIILALGQMAVILTKSIDLSVAANLAFTGMAVAMTNAAFPGVPLPLLIVMAVGIGAFLGSLNGILVWWLGIPPIVVTLGTLTIYRGMAFVLSGGGWVNAHQFSPTFLNVPRTMILGMPVLSWVAILIIAGAWLVLTRTSFGRSAYASGGNPGAAVYAGIDVGRTRFFAFVLSGALAGLASYLWVSRYAVAYVDIAAGFELDSVAANVIGGISIAGGIGSVAGAVLGALFLGVIKNALPVIGISPFAQMAISGVVIVLAVVFNARAEARKGRIILRDRAAADHGKEASA

SEQ ID NO: 40401 - DNA, 1314 bp, Agrobacterium tumefaciens str. C58
  CDS (1)..(1314): transl_table=11
atggccgacatgacacaatccaattccacgacgtcccccaagacggaaaagaccggctcgatttcgcgtttcatcagtgccacggagctcgatacgcggctgcttggcatggtcggcgcgcttcttctgatctggatcggtttccatattctttcgggtggactgttcctgacgccgagaaacctctggaacctctccgtccagaccgcttcggtcgcggtgatggcgacgggcatggtgcttgttatcgttacccgcaacatcgatctgtcggtcgggtcgatcctcggcttttccggcatgatcatgggtgtcatgcaggcggaaatcctgccgcaaatcctcggcttcgaacattgggcgacatggatcgtcacgcttctggtcggtattctcgtcggcggcgcaatcggcatgctgcagggctcgatcatcgccttcctcaacgtgccgtccttcatcgtaacacttggtggcctgctcgtctggcgcggcggcacctggttcgtcaccagcggccgcaccgtggcaccgatggattccaccttccgcctgatgggcggcggcaccagcggctcgatcggcgcgacatggagctggatcgcagcgatcgtcgcctgcgtcgctattgtcgcggcgatcctcaattcccgtcaccagcgccgccgtttcggctttccgctgcggcccgtctgggcggaatatttcctggtggcgcttggctgcttcgtcgtcgtcggtttcgtggctgtcgtcaacagctatccctggccgatcaacattgcccgcaactatgccgatgccaatggcatagcctggccggatggcggcctgttcattccgcacggcattgccattcctgtgctgatggcgctcgcagtcggtgccgtcatgaccttcatcgcgacgaggctgcgcttcggacgttatgttttcgccatcggcggcaacccggaagcggcggaactggccggcatcaagacccgctgggtcacggtgaagatattcacgctgatgggcgttctgtgcgccatcgccgcggcaatttccactgcccgcctcaacgctgccaccaatgcccagggtgaactcgacgaactttatacgatcgcggccgcggtcatcggcggcacctcgcttgccggcggcgtcggcaccatagcgggcgcgatgctcggcgcgctcgtcatgcaatcgctgcaatccggcatggtgctggtgggcatcgatacgcccttccagcgcatcgtcgtcggtgtggtcctggtcgtcgccgtctggctcgacaccatctaccgcgcccgcgccaagtaa

SEQ ID NO: 40402 - protein, 437 aa, Agrobacterium tumefaciens str. C58
MADMTQSNSTTSPKTEKTGSISRFISATELDTRLLGMVGALLLIWIGFHILSGGLFLTPRNLWNLSVQTASVAVMATGMVLVIVTRNIDLSVGSILGFSGMIMGVMQAEILPQILGFEHWATWIVTLLVGILVGGAIGMLQGSIIAFLNVPSFIVTLGGLLVWRGGTWFVTSGRTVAPMDSTFRLMGGGTSGSIGATWSWIAAIVACVAIVAAILNSRHQRRRFGFPLRPVWAEYFLVALGCFVVVGFVAVVNSYPWPINIARNYADANGIAWPDGGLFIPHGIAIPVLMALAVGAVMTFIATRLRFGRYVFAIGGNPEAAELAGIKTRWVTVKIFTLMGVLCAIAAAISTARLNAATNAQGELDELYTIAAAVIGGTSLAGGVGTIAGAMLGALVMQSLQSGMVLVGIDTPFQRIVVGVVLVVAVWLDTIYRARAK

SEQ ID NO: 40403 - DNA, 984 bp, Agrobacterium tumefaciens str. C58
  CDS (1)..(984): transl_table=11
ttgaacatgtcgcttgatgcaaacaccggcgttgccgcgaaaacgggcggtttcagtttcagtgccatgctgcgctcgccgctcgccctgccgctggcgggtctcatcgtcgtatccatcctcatgggtcttgcgagcgacaatttcttcagcgtcaacaacatcatgaacgtgctgcggcaggtttccgtcgttggcattctcgctgttggcatgaccttcgtcatcctgaccggcggcatcgatctttcggtcggtgcggtcatggcgctggtcggcacgctgtcggccggcctgatggtgaatacgggcctgtctcccgcgattgccctgccggccggcctcttcatcgggctcggcattggcatcttcaacggggcgctggtcgcttggggcaggatgccggccatcatcgtcacgctcgccaccatgggcatggcccgtggcctcggcctcatctattccggcggctacccggtcagcggcattccgagctggatttcctggttcggcgttggccgcgtcggcatcgttccggtgcccgtcatcatcatggtggtgatctatgcggtggcctgggtgctgttgcagcgcacagccttcggccgccacgtctatgcgcttggcggtaacgaactggcggcccgtctttcgggtgtgaagacccggcgcgtcaagcttgccgtctatggcatctcgggtgtcacggcagctttcgccgccctcatactgaccggtcgcctgatgagcggccagcccaatgccggcgtcggcttcgaactggacgccattgcggcggtcgttctgggcggcacggcgattgccggcggcaggggcctcatcctcggcacgctcatcggcgcggtgctgcttggcatcctcaataacggcctcaacctgatgggcatcaacccctatcttcaggatgtcatcaagggcggcatcattctgttggccatctatatcgggcgcgaatggcgctga

SEQ ID NO: 40404 - protein, 327 aa, Agrobacterium tumefaciens str. C58
MNMSLDANTGVAAKTGGFSFSAMLRSPLALPLAGLIVVSILMGLASDNFFSVNNIMNVLRQVSVVGILAVGMTFVILTGGIDLSVGAVMALVGTLSAGLMVNTGLSPAIALPAGLFIGLGIGIFNGALVAWGRMPAIIVTLATMGMARGLGLIYSGGYPVSGIPSWISWFGVGRVGIVPVPVIIMVVIYAVAWVLLQRTAFGRHVYALGGNELAARLSGVKTRRVKLAVYGISGVTAAFAALILTGRLMSGQPNAGVGFELDAIAAVVLGGTAIAGGRGLILGTLIGAVLLGILNNGLNLMGINPYLQDVIKGGIILLAIYIGREWR

SEQ ID NO: 40405 - DNA, 1164 bp, Brucella melitensis 16M
  CDS (1)..(1164): transl_table=11
gtgatcgtggctgcaagaatgcctgaggaaaagatgatgagcgaacccaattccgaaacgaaggccgcagcggcggcacccgccgatgagcggctgaaatcggccagcaccttgcagcgcctgttgagcaggccggaactgggcgcggtgtccggtctggttctcatcacgatcttctttgtttcaaccgccaattcggccatgtttaccgcagccgggatcatgaatttcatggccccggcctcgcagctcggtattcttgctgtcgcagcggcgctgttgatgatcggcggcgagttcgatctttccattgggtctatggtggcctttgccggcctgatttttgccgcagcccttgtcgtctggcaggtgccgcttgccgttgccattatcgttaccttgctgtttgcggcgctggtgggggcggtgaatgcgcagatcgtcatcagaacgggtctgccgtcctttatcgtcacgctggcctttctcttcatattgcgcggcctttcgcttgtcgggctgaagtgggcaaccggcggtgcgacgcagctgcgcggtgtgaaggaagcggtcagcggcagctatctggccggcctcttttccggcgatgcatttccggggcttttcgcatggctggcggaaaaggatttgattgcgaaatttccaaatggcgagccggcagtgaaaggtgtgccggtcgaggtgctgtggtttgtcgtgattgcccttgtcgcgacctatattctggtgcgcacccgcttcggcaactggatttttgcggcgggcggcgatgcgcttgccgcgcgcaattccggtgttccggtgcgccgcgtcaaaaccacgctcttcatgtgcacggccatggaggcagcacttgtggctatcctgactgttctcgatgccgggtccaccgatgcacggcgcggtttccagaaagaattcgaggcaatcatcgcggccgtgatcggcgggtgcctgctgaccggcggttatggctcggccatcggcgctttcttcggcgcgatcattttcggcatggtgctgatcgggctgacctatacgcagatcgaccaggactggtatcttgtgtttctcgggggaatgcttctgatcgctgtgctcttcaataatttcatccgcaagcacgccacgggcgagcgttga

SEQ ID NO: 40406 - protein, 387 aa, Brucella melitensis 16M
MIVAARMPEEKMMSEPNSETKAAAAAPADERLKSASTLQRLLSRPELGAVSGLVLITIFFVSTANSAMFTAAGIMNFMAPASQLGILAVAAALLMIGGEFDLSIGSMVAFAGLIFAAALVVWQVPLAVAIIVTLLFAALVGAVNAQIVIRTGLPSFIVTLAFLFILRGLSLVGLKWATGGATQLRGVKEAVSGSYLAGLFSGDAFPGLFAWLAEKDLIAKFPNGEPAVKGVPVEVLWFVVIALVATYILVRTRFGNWIFAAGGDALAARNSGVPVRRVKTTLFMCTAMEAALVAILTVLDAGSTDARRGFQKEFEAIIAAVIGGCLLTGGYGSAIGAFFGAIIFGMVLIGLTYTQIDQDWYLVFLGGMLLIAVLFNNFIRKHATGER

SEQ ID NO: 40407 - DNA, 1170 bp, Brucella melitensis 16M
  CDS (1)..(1170): transl_table=11
atgacgttgacaggcaaaagcctcagaaaatttctctcagaatacaaaatcgtggcactgctgattgttgtcgccctgatctgggcattcttcgccatcatgacctacgatcccgagatgggccggtcgcagtttctcaccgcgcgcaatttctccaatcttttgcgccagatggcaatcaccggcatgctggcttcagccatggtgtttgtcatcgtggcgggtgaaatcgatctgtcggtgggggctttgctcggcctgttaggcggtgtcgcggcggtgctcgatgtggtttacggctggccgttatgggccactatcgctacggttctggtgctgggtggagtgcttggcggtttcaacggctggctcaccgcctatctcggcattccgtccttcatcgttacgctgggcgggcaattggtgtttcgcggtattgtgctgggtatcatgggcggtgtcaccattgcgccgatttcgcccgagttcaaatatatcgggcaaggctatttgcccggctggcttggcaatgtctgtgccatggcgctgtttacagtgcttgtcctgattacgctcagaacccgttccagcaagcgcaaacacaatttgcaaacgctttcaccggcgatggaaaccgctcgccttctgggcacgggtatcctgatccttggttttatcctggtcctcaacagctatcagggcgtaccggttccggttcttgtgctgctggttattcttggcgtcttcaccgttatttcccgccagactgttttcggccggcatatttatgcggtcggttccaatcctgaagccacgcgcttttccggtgtcaacgtgaatttcgtcaaaatggccgtgtttgcgctgatgggacttatggcggcagtggcgggcctcaccacgactgcgcgccttgcggccggtacgccatcggcaggtttgggcggcgaacttgatgccatcgcatcatgctttatcggcggcacatccatgcgcggcggcgtgggatccgtgattgctgcgctggtcggtgcgcttatcatgtcaagcctcgataatggtatgtcgatgctgggcgtcgatacattctggcagcaaatcatcaagggcagtattcttgtgctggccgtttatctcgatatcgtatcatcaggcacacgtcgcgcctga

SEQ ID NO: 40408 - protein, 389 aa, Brucella melitensis 16M
MTLTGKSLRKFLSEYKIVALLIVVALIWAFFAIMTYDPEMGRSQFLTARNFSNLLRQMAITGMLASAMVFVIVAGEIDLSVGALLGLLGGVAAVLDVVYGWPLWATIATVLVLGGVLGGFNGWLTAYLGIPSFIVTLGGQLVFRGIVLGIMGGVTIAPISPEFKYIGQGYLPGWLGNVCAMALFTVLVLITLRTRSSKRKHNLQTLSPAMETARLLGTGILILGFILVLNSYQGVPVPVLVLLVILGVFTVISRQTVFGRHIYAVGSNPEATRFSGVNVNFVKMAVFALMGLMAAVAGLTTTARLAAGTPSAGLGGELDAIASCFIGGTSMRGGVGSVIAALVGALIMSSLDNGMSMLGVDTFWQQIIKGSILVLAVYLDIVSSGTRRA

SEQ ID NO: 40409 - DNA, 1191 bp, Brucella melitensis 16M
  CDS (1)..(1191): transl_table=11
atgagcgagaatgtaatccagagcggccagcagagcagcgtggggcgctatctcaagaacaatctgcgtgaatccgggatgctgctttcgctcgttgcaatcatgatcttcttccatatcgtgaccggcggcgttctcatgaagccgctgaacctcaccaatctcgttttgcagaacagctatatcgtcatcatggcgcttggaatgctgctcatcatcgtcacgggccatatcgatctttcggtcggttcggtctgcggctttatcggggcgctcgctgccgtcatgatggtaaagctcggcattccctttcccattgcggccattctctgcctcattgtcggcgggttgatcggcgcgatccagggtttttgggtcgcctatttcaatatcccctccttcattgtgacattggccggtatgctcgtgttcaaggggctgatgcttgccgttctgggcggacagtcggtcggaccttttccggtcgtgttccagaagctctcgtcgggcttcattccagaggtgatcggcacgtttgacggcgtttatctcacctcgctcatcatcggcgttctgcttgcggttttcctcatctggcagagcatgcggtcgcgcgcgcgccatattgcccatgaggtggagaccgagcccttcggccttttcgtggtcaagtgcatcctctatttcgtcgcaattgcctatctttcgctgctcatttcctcacatcgcggtatgccgaacgtactcatcatcatggcggtgctgattgccgcctatgcgtttctcaccaatcgcaccgtgatcggccgccagatctatgcggtgggcggcaatcgtcacgccgccaagctttccggcgtgaaaaccgagcggctgacgtttctcaccttcgtcaatatgggtgtgctggcagcacttgcgggtctcgtcttcgccgcccgtctcaatacggcgacgccgaaagctggcatcggctttgaactggacgtcatcgcggcctgcttcatcggtggcgcttcggcctatggcggtgtggggcgggttacgggtgccgtgatcggcgcgctcatcatgggcgtgatgaacaacggcatgtcgatcctcggcatcggtatcgactatcagcaggtcatcaagggtatcgtgctgctgggggcggtttgtatcgacgtctataaccagaaacgctga

SEQ ID NO: 40410 - protein, 396 aa, Brucella melitensis 16M
MSENVIQSGQQSSVGRYLKNNLRESGMLLSLVAIMIFFHIVTGGVLMKPLNLTNLVLQNSYIVIMALGMLLIIVTGHIDLSVGSVCGFIGALAAVMMVKLGIPFPIAAILCLIVGGLIGAIQGFWVAYFNIPSFIVTLAGMLVFKGLMLAVLGGQSVGPFPVVFQKLSSGFIPEVIGTFDGVYLTSLIIGVLLAVFLIWQSMRSRARHIAHEVETEPFGLFVVKCILYFVAIAYLSLLISSHRGMPNVLIIMAVLIAAYAFLTNRTVIGRQIYAVGGNRHAAKLSGVKTERLTFLTFVNMGVLAALAGLVFAARLNTATPKAGIGFELDVIAACFIGGASAYGGVGRVTGAVIGALIMGVMNNGMSILGIGIDYQQVIKGIVLLGAVCIDVYNQKR

SEQ ID NO: 40411 - DNA, 1197 bp, Brucella melitensis 16M
  CDS (1)..(1197): transl_table=11
gtgcgccacgataaaggcgtttctggcgccatccgcacctttatcgaccgggtcaagtcgggcgatctcggttcattgccggtcattattggccttctcatcatctggacagttttccagacgttgaacccggttttcctttccagcaacaacctcgtgaacctgctattcgattgctcgaccatcggcgtcatttcgctcggcatcgtctgcgtattgatgctgggtgagatcgacctttcggtcggttccattagtgggctttcttcggctatcatcggtgtattatgggtcaataatggctggccggtgggcgtcgccatcattgcagcactttgcgcaggcgcactggctggcttcctctacgcgctcctctataaccgcttcagcatgccaagcttcgtttccacactggctgggctgctcgcagcccttgggcttcagctttacctcctcggcaatacaggctccatcaatctgccttacggttcgtggctggtcagcttcggccagcttctggtaatgccgcgtccgctttcttatgcgctggcgctggtcgcgggacttgcgatctttttcacgggttttcgcgccgcgcagcgccgccgcacggcagggctttccgctccctcggctgcgggcattgcgctcaaagctttggtcatcacgctcattatcggctgtggggtattttatctcaaccagtcgcgcggcgtgccatggatgtttgccctgttcgtggcgctggtgatcgcgatgaactatgcgcttacgcgcaccagatggggccgctgcgtgcaggcggttggcggcaatcgcgaggctgcgcgtcgtgccggcatcaatgtgaatttcatctatgtctcggccttcatggcctgctccacactcgcggctgccggtggtatcatggcggcggcgcgtctggcctcatccagccagcaggcaggcaccggtgacgtcaacctcaatgctatcgcggcagcggttatcggcggtaccagcctattcggcgggcgcggcagcgcgtggtcggccctgctcggtattatcgtcatccagtcgattgcgagcggtttgacgcttctcgatctgtcgtcttcgcttcgctacatgattacgggtgcagtgcttgccatcgccgtgattgtcgattcccttgcccgccgttcgcgccagtcgcacggccgcgcctag

SEQ ID NO: 40412 - protein, 398 aa, Brucella melitensis 16M
MRHDKGVSGAIRTFIDRVKSGDLGSLPVIIGLLIIWTVFQTLNPVFLSSNNLVNLLFDCSTIGVISLGIVCVLMLGEIDLSVGSISGLSSAIIGVLWVNNGWPVGVAIIAALCAGALAGFLYALLYNRFSMPSFVSTLAGLLAALGLQLYLLGNTGSINLPYGSWLVSFGQLLVMPRPLSYALALVAGLAIFFTGFRAAQRRRTAGLSAPSAAGIALKALVITLIIGCGVFYLNQSRGVPWMFALFVALVIAMNYALTRTRWGRCVQAVGGNREAARRAGINVNFIYVSAFMACSTLAAAGGIMAAARLASSSQQAGTGDVNLNAIAAAVIGGTSLFGGRGSAWSALLGIIVIQSIASGLTLLDLSSSLRYMITGAVLAIAVIVDSLARRSRQSHGRA

SEQ ID NO: 40413 - DNA, 1029 bp, Clostridium perfringens str. 13
  CDS (1)..(1029): transl_table=11
atgcaaaccaaatcaaagaaaaagtttaatttaaatagccaatggttaatgaataatgctatttatatagttttagtggccttattaataggaatttgtattatttcaccagattttttatcattaaaaaactttattaatatattaagccaatcctcttctcgtataataatagctcttggagttggaggaatacttttaactgaaggtactgacctttctgctggtagaacagttggacttgctgccgtagtatcagcttctttacttcaagctggagattatgcatataaaatgtatcctaatttacctgaattacctatattcattccaattttaatagcaatggctgtttgtggaatagttggtcttgtaaatggattagttgtttctaaatttaatgttcctccatttatagctactctaggaatgatgacaggaatatatggacttaactcaatatactttgatagacctccatatggagctatgccaataggtggtcttagccaatcctttagtaattttacacttggttccattcctatatatggaaatataaaaataccttatttagttatatatgcaattattgtaatagctgtaatttggactttatggaataaaactaaatttggtaaaaacctttatgccataggtggtaacagagaagctgcagtggtttcaggtgtaaatgttgttagaacacttttattagtttatatgttagctggagttctttatggttttgcaggtactctagaagctggtcgtgttggtagtgctactgctagtactggtgaaatgtatgaactagatgccatagcttcctgtgttgttggtggtgtttccactgctggtggtgttggtactgttcctggaatagtaactggtgttttaatattccaagttataaactatggtctagcttttataggtgttagcccttatttacaattcgttataaaaggtttaattatagttctagctgtagctcttgatatgagaaaatacatgaaaaagaactaa

SEQ ID NO: 40414 - protein, 342 aa, Clostridium perfringens str. 13
MQTKSKKKFNLNSQWLMNNAIYIVLVALLIGICIISPDFLSLKNFINILSQSSSRIIIALGVGGILLTEGTDLSAGRTVGLAAVVSASLLQAGDYAYKMYPNLPELPIFIPILIAMAVCGIVGLVNGLVVSKFNVPPFIATLGMMTGIYGLNSIYFDRPPYGAMPIGGLSQSFSNFTLGSIPIYGNIKIPYLVIYAIIVIAVIWTLWNKTKFGKNLYAIGGNREAAVVSGVNVVRTLLLVYMLAGVLYGFAGTLEAGRVGSATASTGEMYELDAIASCVVGGVSTAGGVGTVPGIVTGVLIFQVINYGLAFIGVSPYLQFVIKGLIIVLAVALDMRKYMKKN

SEQ ID NO: 40415 - DNA, 936 bp, Clostridium perfringens str. 13
  CDS (1)..(936): transl_table=11
atgaaagcgaatgttaaagcaaatatatctaaatataaatcccttataggactagtattattatgtatagttattactatagttactccaaactttttaagtgtatctaatataactaacgtatttacacaggtttcagttaatgcaatcatagcaataggtatgactttcgtaattttaactggtggaatagacttatcagttggatctactttagctattagtggtgccgtaggggcttctattgttaagtcgactggaaacgtattcttagcaattatagtggcagctgttattggtatagcagttggattaataaatggtttattagtatcaaaaggaaaactacaagcattcatagttactttagctacaatgacaatatttagaggagctactttagtatttacagatggtactccaatatcaaaattacctgaagcttttgttaaaataggaaatggtaaacttggatttatgccaataccagttataataacaataataatagcaatcatagcagtatatgctttatcacaaacaagatttggaagatatttatatgctttaggtggaaatgaagatgcttcaagattatcaggaataaatacagataagataaaaactttagtttatgtggtatcaggttttgcctcagctattgcaggggtaataataacaagtagaataggatctgcttcacctaatgcaggaacaggatttgaattagatgctatcgctgctgtagtaataggaggaacttctttagcagggggagaaggaacaatcacaggtactttaataggtgctcttattataggtgtacttaataatggattaaaccttatgaatgtatcaccattctatcaatcaatagtaaaaggtttagttatattaatagcagtacttttagataaaaagagcagaaaaaattaa

SEQ ID NO: 40416 - protein, 311 aa, Clostridium perfringens str. 13
MKANVKANISKYKSLIGLVLLCIVITIVTPNFLSVSNITNVFTQVSVNAIIAIGMTFVILTGGIDLSVGSTLAISGAVGASIVKSTGNVFLAIIVAAVIGIAVGLINGLLVSKGKLQAFIVTLATMTIFRGATLVFTDGTPISKLPEAFVKIGNGKLGFMPIPVIITIIIAIIAVYALSQTRFGRYLYALGGNEDASRLSGINTDKIKTLVYVVSGFASAIAGVIITSRIGSASPNAGTGFELDAIAAVVIGGTSLAGGEGTITGTLIGALIIGVLNNGLNLMNVSPFYQSIVKGLVILIAVLLDKKSRKN

SEQ ID NO: 40417 - DNA, 915 bp, Corynebacterium glutamicum ATCC 13032
  CDS (1)..(915): transl_table=11
atgctcaataacggtgcgttggtggggctgattgcactgtgtgttggactttttattgcaacaccccactttctcaccattcctaacctgatcaacatcggtatccaatcggcgacggtggcgatcctggcgttcggcatgaccttcgtcatcgttaccgcaggcattgatttgtctgtgggatcagtggctgcgttgggtgcgatgacctcggcgtatttcttcgcggaagttggtttgccgggctggatcacgctgctgattggcctgttcatcggattgttggcgggtgcgatctctggcatttctattgcttatggcaagttgcctgcgtttattgccaccttggccatgatgtcgatcgccaggggaatcaccttggtcatttcccaaggctcaccaattcccagtgcaccagctgtgaacgctttggggcgcacctactttggcatcccgatgccgattctgatgatggcactggctggcattgtgtgttggtttattttgagccgcaccgtgctgggacggtccatgtacgccattggcggaaacatggaagcagcccgactatctggtctgccagtgaagaaaatcctggtcatggtctatgcactggctggtgtgtatgcagcacttgcgggtctggtcatgacgggacgcttgtcgtccgcgcagccgcaggcaggcgtgggatacgaactcgatgcgattgccgccgtggtcattggtggtgcgtcacttgctggcggaaccggaaaagcaacgggcactttgattggtgccatcttgttggccgtgatccgcaatggcttgaacattttgaacgtgtcctcgttctggcagcagattgtcatcggttgtgtcatcgcgcttgcggtgggcttcgatgtcatccgaaacaaaacctctaagtaa

SEQ ID NO: 40418 - protein, 304 aa, Corynebacterium glutamicum ATCC 13032
MLNNGALVGLIALCVGLFIATPHFLTIPNLINIGIQSATVAILAFGMTFVIVTAGIDLSVGSVAALGAMTSAYFFAEVGLPGWITLLIGLFIGLLAGAISGISIAYGKLPAFIATLAMMSIARGITLVISQGSPIPSAPAVNALGRTYFGIPMPILMMALAGIVCWFILSRTVLGRSMYAIGGNMEAARLSGLPVKKILVMVYALAGVYAALAGLVMTGRLSSAQPQAGVGYELDAIAAVVIGGASLAGGTGKATGTLIGAILLAVIRNGLNILNVSSFWQQIVIGCVIALAVGFDVIRNKTSK

SEQ ID NO: 40419 - DNA, 1020 bp, Fusobacterium nucleatum subsp. nucleatum ATCC 25586
  CDS (1)..(1020): transl_table=11
atgattgcaagaactaatgaaggaaaaatagattataaaaaaattattatagaaagtggactgtatcttgtattattttgtatgcttgttgcaataataataaaagagcctacttttttaagtttaagaaactttaaaaatattcttacacaatcatctgtaagaacaattattgcacttggtgttgctggacttatagtaacacaaggtactgacttatcagcaggtagacaagttggactttctgctgtaatttctggaacacttttacaatcaatgacaaatgtaaataaagcatttccaaaattaggagaattttcaatatttacaactatattgattgttgttgtagttggtgtagttatagcaagtataaatggagtggttgttgctacattaaatgttcacccatttatagctactatgggaacaatgactattgtgtatggaataaactctctttactatgataaagcaggagctgctccaatttctggatttgtagaaaaatatagtaaatttgcacaaggttatataaaaataggctcatatacaataccatatttaattatctatgcagctattgcaacattaattatgtggactttatggaacaaaacaaagtttggtaagaatgtatttgcagttggaggaaatccagaagctgcaaaagtatcaggagtaaatgttgttttaactcttatgggaatttatgcattatctggagcgtattatgcttttggtggtttcttagaagctggacgtattggttctgcaactaacaacctaggatttatgtatgaaatggatgctatcgctgcctgtgtaattggtggagtttcattctatggtggtgttggtagaatttctggagttatcacaggagttataattttaacaattataaactatggacttacttatacaggtgttagcccatactggcaatatattataaaaggtataataattgttactgctgttgcatttgactctattaaatatgctaagaaaaaataa

SEQ ID NO: 40420 - protein, 339 aa, Fusobacterium nucleatum subsp. nucleatum ATCC 25586
MIARTNEGKIDYKKIIIESGLYLVLFCMLVAIIIKEPTFLSLRNFKNILTQSSVRTIIALGVAGLIVTQGTDLSAGRQVGLSAVISGTLLQSMTNVNKAFPKLGEFSIFTTILIVVVVGVVIASINGVVVATLNVHPFIATMGTMTIVYGINSLYYDKAGAAPISGFVEKYSKFAQGYIKIGSYTIPYLIIYAAIATLIMWTLWNKTKFGKNVFAVGGNPEAAKVSGVNVVLTLMGIYALSGAYYAFGGFLEAGRIGSATNNLGFMYEMDAIAACVIGGVSFYGGVGRISGVITGVIILTIINYGLTYTGVSPYWQYIIKGIIIVTAVAFDSIKYAKKK

SEQ ID NO: 40421 - DNA, 957 bp, Thermoanaerobacter tengcongensis MB4
  CDS (1)..(957): transl_table=11
ttgaagctaccgaacgaaaaagcaatgaaaataaatattggtgagttgcttttaaaagcgaaatctttaataggtttattgggattaattatcgcgttttcaatattatctccacgttttttggattactataaccttacaaatgtattaagacaaacctctctaaatgcaataatggctgtagggatgacatttgtgatattgacaggtgggatagacctatctgtgggttctatattggcgttttcaagtgcagttacagccggtatgttgaaagatggtatgcccctaatcatagctttattggcgggattgataataggtactggtttaggattgtttaatggttttgttataatcaggtggaatattcctccatttattgctacatttgctatgatgacaatagcaagagggcttacgcttgtgtatactaatggccaaccaataactggcttaggaaaagctttcggatatatcggcaatgggtatgttggttccattcctgttccaataattatcacaattctcgtttttgtaataggatactatattttaaaaaacaacagattaggaagatatgtatatgcaaccggaggaaatttacaagctgctaaactggcaggaattaatactaataaaataattctatttgtatatgctttaagtggttttttagcagcagtaagtggcttaataattacttcaagattaaactcagctgccccaacagctggacaaggtgcagagcttgatgcaatagctgctgttgtactaggaggtacaagtttatctgggggcgaaggtggaataattgggactttgataggtgctttaataataggtgtgttgaacaatggtctgaatttgcttaacgtttcacctttttatcaatatattgtaaaaggtgtagtaatattacttgctatagctttagacaaaaaagaaagtgagtaa

SEQ ID NO: 40422 - protein, 318 aa, Thermoanaerobacter tengcongensis MB4
MKLPNEKAMKINIGELLLKAKSLIGLLGLIIAFSILSPRFLDYYNLTNVLRQTSLNAIMAVGMTFVILTGGIDLSVGSILAFSSAVTAGMLKDGMPLIIALLAGLIIGTGLGLFNGFVIIRWNIPPFIATFAMMTIARGLTLVYTNGQPITGLGKAFGYIGNGYVGSIPVPIIITILVFVIGYYILKNNRLGRYVYATGGNLQAAKLAGINTNKIILFVYALSGFLAAVSGLIITSRLNSAAPTAGQGAELDAIAAVVLGGTSLSGGEGGIIGTLIGALIIGVLNNGLNLLNVSPFYQYIVKGVVILLAIALDKKESE

SEQ ID NO: 40423 - DNA, 1191 bp, Thermoanaerobacter tengcongensis MB4
  CDS (1)..(1191): transl_table=11
atgagatctttttatgggcatttaaaagagtttttaagggaaaatgtcagagactatgcaatgtttattgctttattggttataatgatagtttttgcaattctctctggcggcgattttctcctgcccgttaatataagcaacttggtggatcagacaggttatattgcggttttgtcaattggggagaccttgataatagtcatacgtcatatagacctttctgtagggtttttgtcaggatttttaggggcaattgccgccattctgatgcagtttcaccatttttcagcttttactgctatactcatagtcctgatattgggtactttagcagggcttttaaacgggtcattggtagcttatcttagaattcctgcttttgtggcaacactagcaggatggcttgcttatagaggagcacttcttcttgctacaaaagggcctggtaccataataataacaaataagacctttaatgctataggaaatgacttcataccagatttgccttttttgaagaatttcatgccaggttatcacaaactcacccttttgataggcataataggagtagtgttaattgtatatttttcgcttaagaacagaaatgagcaagcaagaaggggatttgatgtactgccatgggatatgttccttttaaaaatggtatttataagtgggctgttgttgtatttgacctttactttggctcgctacagaggtatttcctggacatttgtaatagttttgattgtaacagcagtatacagttttataacaaatagaacggtattaggaaggcatatatacgctgtagggggaaaccctgaagcagctgcgttaagtggtatagacgttaataagataactctcattgtatttgcctccatgggatttctctcagggctttctggagtactttttgcatccagacttcaatctgctacgactactgccggtaccttgtttgagctttacgctattgctggtgccttcataggaggagtgtcagcaagcggcggtgtgggtaaagttgtaaattctctcattggagcttttgtgatgagtaccttgacaaacggcatgaacttgctgggagtcgatatttcacttcagtatataattttagggctggttttagctacagctgtgatattcgatgtggcaactagaagcagaggaagataa

SEQ ID NO: 40424 - protein, 396 aa, Thermoanaerobacter tengcongensis MB4
MRSFYGHLKEFLRENVRDYAMFIALLVIMIVFAILSGGDFLLPVNISNLVDQTGYIAVLSIGETLIIVIRHIDLSVGFLSGFLGAIAAILMQFHHFSAFTAILIVLILGTLAGLLNGSLVAYLRIPAFVATLAGWLAYRGALLLATKGPGTIIITNKTFNAIGNDFIPDLPFLKNFMPGYHKLTLLIGIIGVVLIVYFSLKNRNEQARRGFDVLPWDMFLLKMVFISGLLLYLTFTLARYRGISWTFVIVLIVTAVYSFITNRTVLGRHIYAVGGNPEAAALSGIDVNKITLIVFASMGFLSGLSGVLFASRLQSATTTAGTLFELYAIAGAFIGGVSASGGVGKVVNSLIGAFVMSTLTNGMNLLGVDISLQYIILGLVLATAVIFDVATRSRGR

SEQ ID NO: 40425 - DNA, 975 bp, Thermoanaerobacter tengcongensis MB4
  CDS (1)..(975): transl_table=11
atgcaaaatttggataaaaaagtagtaacttcggaaccaaataacaaaagaaaattttctactagattacaattattttctacgtggggagcgcttgctattttggtagtatttttcagtattacttctgacaagtttttaacagtagataatttgttaacagtagctttgcaaacctctataatagcaataatagcaatgggccaaacttatgtaattattactggtggtatagatctttctattggttccaatatagcgttaggtggtgtggtagcagcgcttttaatggctaatggattttctattcctgtttctatagtgatagcattattggtaggactatttgtaggaacgttaaatggtacattgattgcatacggtaagattcctcctttcatagtaactttgggagcaatgagtataattagagggacggcatatgtgttaacaggtggtattccaataacaaacgtgccactagaattttctgcttttgggatggggagaatactcagaataccagtgcctgttataataatggtcatcttgattgcaatttttggttttatcctcgcaaaaactaaattaggtagatacatttatgcagtgggaagcaatagagaagcagctcgattagcaggaataaatattcctacagttttaattgcagtatatgcaataagtggatttttagcagtatgggctggaataattgtagctggtaggataatttcaggtcaaccggcagctggaatgggctatgaattagatgctgtagctgcttcagttataggtggggcaagtctttttggtggtgaaggaactattttaggaacaattgcaggtgcttttgtaatgggtgtgttaagaaatggtttaaacttgttaaatgtgtctgctttttggcagcaaatcataattggagctgtaattatcggagcagtgttcttagatactataagaaggcgttag

SEQ ID NO: 40426 - protein, 324 aa, Thermoanaerobacter tengcongensis MB4
MQNLDKKVVTSEPNNKRKFSTRLQLFSTWGALAILVVFFSITSDKFLTVDNLLTVALQTSIIAIIAMGQTYVIITGGIDLSIGSNIALGGVVAALLMANGFSIPVSIVIALLVGLFVGTLNGTLIAYGKIPPFIVTLGAMSIIRGTAYVLTGGIPITNVPLEFSAFGMGRILRIPVPVIIMVILIAIFGFILAKTKLGRYIYAVGSNREAARLAGINIPTVLIAVYAISGFLAVWAGIIVAGRIISGQPAAGMGYELDAVAASVIGGASLFGGEGTILGTIAGAFVMGVLRNGLNLLNVSAFWQQIIIGAVIIGAVFLDTIRRR

SEQ ID NO: 40427 - DNA, 1245 bp, Streptomyces coelicolor A3(2)
  CDS (1)..(1245): transl_table=11
atgagcacggacgtgaccgccaagaccccggcaccggcgccgcccggcagagagggctcggcctccggcggcgggctgctgcagctgatgctcgacggcatgcgccgcaacatgcgccagtacggcatgctgatggccctcggtctgatcgtggtgctgttcgcggtgtggtcggacggcgacctgctgctgccgcgcaacgtctccaacctggtgctgcagaacagctacatcctgatcctcgcgatcggcatgatgctcgtcatcatcgcgggccacatcgacctgtcggtgggttcgctgaccgccttcgtcggcgcgaccgccgccgtcctgatggtcaaccacgacctgccctggccggtggcggtgatcctctgcctggccatcggcgccgccgccggtgccgtgcagggcttcttcatcgcctatctcggcataccgtcgttcatcgtgaccctcgcgggcatgctgctcttccgcggtctgacggagatcttcctcaagggccagaccctcggcccgttccccaaggaccttcagaagatcgccaacggcttcctgcccgaggtcggcccgaacaccaactaccacaacctcaccctgctgctgggcttcgccctgatcgccttcgtggtgtaccaggaggtccgcgaccgcaagcggcagctggagttctccctcgacgtgccgccgctcaagctgttcctgctcaagctggtcgcgctggtcgccgcggtcctcgtggtcacgctgctgctggccagctacaagggcgcgccgatcgtgctgctcatcctgggcgtgctggtggtcggcttcggctatctgatgcgcaacgcgatcatcggccgccacatctacgccatcggcggcaacctgcccgcggccaagctgtcgggcgtgaaggacaagaaggtcaccttcctggtcttcctgaacatgggcatgctcgcggccctggcgggtctggtcttcgccgcccgcttcaacgcggcctcgcccaaggcgggcctcaacttcgagctggaggccatcgccgcctcgttcatcggcggcgcgtcgatgagcggcggcgtcggcacggtcctcggcgcgatcatcggcggtctggtcctgggtgtgctcaacaacggcatgaacctcgtcggcatcggcaccgactggcagcaggtcatcaagggcgcggtgctgctggcggcggtcgggttcgacgtgtggaacaagcgcagggtcggttcgtaa

SEQ ID NO: 40428 - protein, 414 aa, Streptomyces coelicolor A3(2)
MSTDVTAKTPAPAPPGREGSASGGGLLQLMLDGMRRNMRQYGMLMALGLIVVLFAVWSDGDLLLPRNVSNLVLQNSYILILAIGMMLVIIAGHIDLSVGSLTAFVGATAAVLMVNHDLPWPVAVILCLAIGAAAGAVQGFFIAYLGIPSFIVTLAGMLLFRGLTEIFLKGQTLGPFPKDLQKIANGFLPEVGPNTNYHNLTLLLGFALIAFVVYQEVRDRKRQLEFSLDVPPLKLFLLKLVALVAAVLVVTLLLASYKGAPIVLLILGVLVVGFGYLMRNAIIGRHIYAIGGNLPAAKLSGVKDKKVTFLVFLNMGMLAALAGLVFAARFNAASPKAGLNFELEAIAASFIGGASMSGGVGTVLGAIIGGLVLGVLNNGMNLVGIGTDWQQVIKGAVLLAAVGFDVWNKRRVGS

SEQ ID NO: 40429 - DNA, 1956 bp, Streptomyces coelicolor A3(2)
  CDS (1)..(1956): transl_table=11
gtggccactgacacgctcaagagcaagccgggcgcgcagggcgccacgggcggtctgcgccgcctgctgctcgacaacggcgcgctgaccgcgctgatcgtcctcgtcgtcgtcatgtcggcgctgtccggggacttcctgaccgccgacaacctcctcaacgtcggcgtccaggccgccgtcaccgcgatcctcgcgttcggcgtcaccttcgtcatcgtctcggcgggcatcgacctgtcggtcggctcggtcgccgcgctgtcggccaccgtgctggcctggagcgccaccgaggccgggatgccggtcgcgctcgcggtgctgctgtccgtcctgacgggcatcgcctgcggtctggtgaacggtttcctcatctcgtacgggaagctgccgccgttcatcgcgacgctcgccatgctgtcggtgggccgcggtctgtcgctggtcatctcgcagggctcgccgatcgccttcccggactcggtctcgcacctcggtgacacgctcggcgggtggctgccggtgccggtgctcgtgatgatcgtgatggggctgatcaccgcgttcgtcctcggccggacctacatcggccggtccatgtacgccatcggcggcaacgaggaggcggcgcggctgtccgggctgcgggtgaagcggcagaagctcgccatctacgccttctccggcctgttcgccgccgccgcgggcatcgtgctcgcctcccggctctcctccgcgcagccgcaggccgcgcagggctacgagctggacgccatcgccgccgtcgtcatcggcggcgcctcgctggcgggcggcaccggcaaggcctcgggcacactgatcggcgcgctgatcctcgcggtgctgcgcaacggcctcaacctgctgtccgtctccgcgttctggcagcaggtcgtcatcggtgtcgtcatcgcgctcgcggtgctcttcgacacgctgcgccgcaaggcgggcgcggtcactccggcggccggggcgtcgggcggcggcaaccggggcaggcaggcactcacgtacgtgatcgcggccgtcgtcgcggtggccgtggtcggcgccacctcgctgctgcacaacggctcctccggcggcaagagccagaagatagggctgtcgctgtccacgctgaacaacccgttcttcgtgcagatcaggaacggcgcggaggaggaggcgaagaagctgggcgtggacctgacggtcacggacgcccagaacgacgcctcccagcaggccaaccagctccagaacttcgtcagcggcagcctgtccgcggtcatcgtcaacccggtggactccgacgcggccggtccctcggtgcgctccgccaacaaggacgacatcccggtcatcgccgtggaccgcggcgtcaacaaggcggagacgtccgcgctggtcgcctccgacaacgtcgagggcggtgagctgggcgccaaggcgctcgccgagaagctcggcggcaagggcaccatcgtcatcctccagggccaggccggcacctccgccagccgggagcgcggggcgggcttcgcggccgggctcaaggcgtacccgggcatcaaggtcgtcgccaagcagcccgcggacttcgaccgcaccaagggcctggacgtgatgacgaacctgctccaggcgcacccggacgtcgacggcgtcttcgcggagaacgacgagatggcgctgggcgcgatcaaggcactgggttccaaggccggcaagtcggtccaggtcgtcggcttcgacggcaccccggacgggctgaaggcggtccaggacggcacgttgtacgcgtcggtggcgcagcagccgaaggaactgggcaggatcgccgtacggaacgcgctgcgggcggccgaggacaagaaggtggagcagacggtgaaggtgcccgtgaaggtcgtcacccagcagaacgtggcgggtttcgagggctga

SEQ ID NO: 40430 - protein, 651 aa, Streptomyces coelicolor A3(2)
MATDTLKSKPGAQGATGGLRRLLLDNGALTALIVLVVVMSALSGDFLTADNLLNVGVQAAVTAILAFGVTFVIVSAGIDLSVGSVAALSATVLAWSATEAGMPVALAVLLSVLTGIACGLVNGFLISYGKLPPFIATLAMLSVGRGLSLVISQGSPIAFPDSVSHLGDTLGGWLPVPVLVMIVMGLITAFVLGRTYIGRSMYAIGGNEEAARLSGLRVKRQKLAIYAFSGLFAAAAGIVLASRLSSAQPQAAQGYELDAIAAVVIGGASLAGGTGKASGTLIGALILAVLRNGLNLLSVSAFWQQVVIGVVIALAVLFDTLRRKAGAVTPAAGASGGGNRGRQALTYVIAAVVAVAVVGATSLLHNGSSGGKSQKIGLSLSTLNNPFFVQIRNGAEEEAKKLGVDLTVTDAQNDASQQANQLQNFVSGSLSAVIVNPVDSDAAGPSVRSANKDDIPVIAVDRGVNKAETSALVASDNVEGGELGAKALAEKLGGKGTIVILQGQAGTSASRERGAGFAAGLKAYPGIKVVAKQPADFDRTKGLDVMTNLLQAHPDVDGVFAENDEMALGAIKALGSKAGKSVQVVGFDGTPDGLKAVQDGTLYASVAQQPKELGRIAVRNALRAAEDKKVEQTVKVPVKVVTQQNVAGFEG

SEQ ID NO: 40431 - DNA, 1293 bp, Streptomyces coelicolor A3(2)
  CDS (1)..(1293): transl_table=11
gtgagcatcgacaagacctccaccccggccgaggaccacgcggtggagaaccccgccgcggccgccggcgccgccgccgcggtcgacccgcggctgctggtgcgcgagcagggcttcgcgggctatctgagcgagttcaagcggaagatgaaggccggtgacctcgggtccatcccggtcgtcgtcggtctgctgatcatctgggccatcttcaccagcctgaactccaacttcctcaccgccggcaacttctccgacatgtcggtcgccatggtcggcaccggcatgatcgccgtcggtatcgtcttcgtcctgctgctcggcgagatcgacctgtcggtcggctcggtcagcggtgtcgcgggcgccaccttcgcggtgctgagcgtcacgcacgggatgaacgagtggctcgccctgctgctgtccgtcctcaccggcaccgtggccggtgccatccacggcttcgtcttcgcccgcatcggcgtgccggccttcgccgtgacgctggccggactgctgttctggcagggcttcatgctgcagatcctgggcagcaacggcacgatcaacctcgactccgagggcatcgtcgtcaagatgaccagctactacttcagcgacgtggccgccgcctacggcctggcggtcgtcgtgaccgcggggtacttcctcagcgcgttcttcgacagccggcgccgcgaggccgccggggtgccctcgcggccgctgaacgagatcatcgtgcgcacggtgctgctggcgatcctggcgttcgtcgtggcgatcgtcttcaaccagtacaagggcctgccgctggccgtggtgatcttcctggcgttcctgctgctcacggacttcgtcctgcgccgcaccgcctacggtcgcaagatcttcgccctcggtggcagcgtcgaggcgtcccgccgcgccggcatcaacgtggagctgatccggatctcggtcttcgcgatcgccggcggcttcgccgcgataggcggcctcttcgtggcctcgaagatcgccgccgccaaccagggcgcgggcaccggtgagttcctgatgaacgtcatcgccgcggccgtgatcggcggcacgtccctcttcggcggccgcggccgcacctgggacgcgctgctcggtgtcatggtcatcgtctcgatccagtacggcctcgccctggagggcatcgcctcgccggtccagtacatgatcaccggtggcgtgctgctggcgaccgtcgtcatcgacgcgatcacccgcaagacgcagaagacggccggccgcgcgtag

SEQ ID NO: 40432 - protein, 430 aa, Streptomyces coelicolor A3(2)
MSIDKTSTPAEDHAVENPAAAAGAAAAVDPRLLVREQGFAGYLSEFKRKMKAGDLGSIPVVVGLLIIWAIFTSLNSNFLTAGNFSDMSVAMVGTGMIAVGIVFVLLLGEIDLSVGSVSGVAGATFAVLSVTHGMNEWLALLLSVLTGTVAGAIHGFVFARIGVPAFAVTLAGLLFWQGFMLQILGSNGTINLDSEGIVVKMTSYYFSDVAAAYGLAVVVTAGYFLSAFFDSRRREAAGVPSRPLNEIIVRTVLLAILAFVVAIVFNQYKGLPLAVVIFLAFLLLTDFVLRRTAYGRKIFALGGSVEASRRAGINVELIRISVFAIAGGFAAIGGLFVASKIAAANQGAGTGEFLMNVIAAAVIGGTSLFGGRGRTWDALLGVMVIVSIQYGLALEGIASPVQYMITGGVLLATVVIDAITRKTQKTAGRA

SEQ ID NO: 40433 - DNA, 1020 bp, Streptomyces coelicolor A3(2)
  CDS (1)..(1020): transl_table=11
atgacgcagcacgtgtccccgccacggggcagcaccgacaaggcggcacccgtggagggtccgcccgcctggcgggtccggttgggccgcgccgacgtccgcaccctcaccctgctcggcgtgctcgccgcactggtcctcatcggcggcatcacccagcccgacgcgttcctcgacacccgcaacctgcaactggtgctcacccaggcgtccgtgatcggcatcgtcaccgtcggcgtcaccttcgtgatcatctccgggggcatcgacctgtcggtcggcgccatcgtcgccctctcctcggtgtgggcgaccacggtggccacccaggagtacggcttcgccggcatcctcttcacggcgatcgtggtcggtgtcggctgcggcctggtcaacggcctgctcatctccttcggcgggatggtccccttcatcgccaccctggccatgctggcctcggcgcgcggactcgcgctccagatcaccgacggccgcacccaggtcgtcaccgtcccgagcgtcctcgacctcgccgagcgcgactcgtacgtgctcggcataccgccgctggtgctggtcttcgcggccgtcaccgtcgtcggctggctggtcctgaaccggaccaccttcggccgccgcaccgtcgccgtcggcggcaacgccgaggccgcccggctggccggcatcgacgtccgccgccagcggctctacctctacctgctgtccgggctgtgctgcggcatcgccgccttcctgctggtggccctcgccggctccggccagaacaccaacggcaacctctacgaactcgacgccatcgccgccgcgatcatcggcggaacgctgctgaccggcggccggggccacatcctcggttccgtgctcggcgtcctgatcttcaccacgatcaccaacatcttcgccctgaacaacctgcagagcgacgtccagcagatcgccaagggcgcgatcatcgtcgccgccgtgctggtccagcgccgtaccgcaagcacgcattga

SEQ ID NO: 40434 - protein, 339 aa, Streptomyces coelicolor A3(2)
MTQHVSPPRGSTDKAAPVEGPPAWRVRLGRADVRTLTLLGVLAALVLIGGITQPDAFLDTRNLQLVLTQASVIGIVTVGVTFVIISGGIDLSVGAIVALSSVWATTVATQEYGFAGILFTAIVVGVGCGLVNGLLISFGGMVPFIATLAMLASARGLALQITDGRTQVVTVPSVLDLAERDSYVLGIPPLVLVFAAVTVVGWLVLNRTTFGRRTVAVGGNAEAARLAGIDVRRQRLYLYLLSGLCCGIAAFLLVALAGSGQNTNGNLYELDAIAAAIIGGTLLTGGRGHILGSVLGVLIFTTITNIFALNNLQSDVQQIAKGAIIVAAVLVQRRTASTH

SEQ ID NO: 40435 - DNA, 1146 bp, Yersinia pestis KIM
  CDS (1)..(1146): transl_table=11
atgatgaaagcaacaactggcacggcgttggcgagtcacctgcccggtggagcgtcatggtcacgggaaaatatgctgctgcttctgttaaagatgcgcacctttattgccctgtttctgatcctgggtttcttttcaatcatggtccctgggttcttagccacggggagtttgatcatcatggtgaagcatattgcgattaatgccttcctcgcattaggcatcacctttgtcattatcaccgcaggtatcgatctctccatcggcgcgacgctggggctgtgcggcatgattgccggttggatgatcacccaaggcattgtcttgccgatgtttggcatcgctatcttccccagtgtttgggttgtggttccggtggtgttagttatcggggcactcatcggtgcggttaatggctggatcattactcgctacaacgtcgccccgtttatttgcacccttggcaccatgtatgtggtgcgaggtgcctcgatgttgatctctggtggcgaaaccttccccggcttacaaggcaatccgcaactggggaataccggttttgacctgctgggctcgggaacgctactggggttgccgatcgccatctggatcatgttcattctggcgctggtgattgcttacgttgcccgccgccttccgtttggccgccatgtttatgccatcggggataacgaacgcgctgctgaactttctggtgtcaaagtgcgtcaggtgaaagtctgggtttacaccctatccggcttctgtgccgcgatagcggggattatcgtgtctgcccaattggttgccagccacccggccaatggcagtggcttcgaaatgaatgctatcgccgctgttgttctgggcgggacatcgctggcaggcgggcgagggaccattcttggtacgctgattggcgcttttgttatcggcatcttggctgatgggctggtgatgatgggcatcagtgaattctggcaaatggtgatcaaaggcatcgtgattatcgtggccgtgattatcgatcagatgcaaaaccggatgcagcacaaggcggcgattgtgtcgcaaaaagtgaccgccatcccctctgacgtcacctctcaggcgggaatcatctctcagacggtaaaaagtgagtag

SEQ ID NO: 40436 - protein, 381 aa, Yersinia pestis KIM
MMKATTGTALASHLPGGASWSRENMLLLLLKMRTFIALFLILGFFSIMVPGFLATGSLIIMVKHIAINAFLALGITFVIITAGIDLSIGATLGLCGMIAGWMITQGIVLPMFGIAIFPSVWVVVPVVLVIGALIGAVNGWIITRYNVAPFICTLGTMYVVRGASMLISGGETFPGLQGNPQLGNTGFDLLGSGTLLGLPIAIWIMFILALVIAYVARRLPFGRHVYAIGDNERAAELSGVKVRQVKVWVYTLSGFCAAIAGIIVSAQLVASHPANGSGFEMNAIAAVVLGGTSLAGGRGTILGTLIGAFVIGILADGLVMMGISEFWQMVIKGIVIIVAVIIDQMQNRMQHKAAIVSQKVTAIPSDVTSQAGIISQTVKSE

SEQ ID NO: 40437 - DNA, 1065 bp, Yersinia pestis KIM
  CDS (1)..(1065): transl_table=11
gtgaaggagttaatcatgtctagcgttactttgagttcggataaaaagaacccggtatcaactgaatcaaacggtgggatcccacaacctcagcaaccacagaatgcgccgactaaaagtggcttaggattatcccgtatctgggacagctacggcatgctggtggtcttcgccgtggtctttattggttgcgtgatttttgtgcctaattttggctcctttatcaatatgaaagggttggggctggctatctcaatgtctgggatggtggcgtgcggtatgcttttttgtttggcatccggcgattttgacctctctgtggcctcggtcattgcctgcgcgggtgttaccaccgcggtggtgatcaatatgacagagagcctatggataggggtgggcgcaggtttgttattaggggcggcatgtgggctaattaatggttttgtgattgcccggctaaaaatcaatgcgctgatcaccacattggcgacgatgcaaattgttcgtggcctggcgtatatcatttctgatggtaaagccgtgggtatcgaagatgagcgcttcttcgccttgggttataccaactggtttggtctgccagcacccatctggatcaccgttgcctgtttggtgctgtttggtttcttactgaataaaaccacctttggccgtaacacgttggcgattggggggaatgaagatgctgcgcgtctggccggtgtgccggtcgtgcggaccaaaatcattatttttgtgctgtcaggtttggtgtctgccgccgcagggattattttggcttcacgcatgacgagcggccagccaatgacctcgattggttatgagctcattgttatctctgcttgcatattaggcggggtatcactaaaaggcggcattggtaaaatttcttacgtcattgcggggatcttgattctgggaacagtagaaaatgccatgaacctattaaatatctccccgttctcacaatatgtggttcgtggtttgatcctgctggcggcggttatcttcgaccgttacaaacagttagctaaacggacgatataa

SEQ ID NO: 40438 - protein, 354 aa, Yersinia pestis KIM
MKELIMSSVTLSSDKKNPVSTESNGGIPQPQQPQNAPTKSGLGLSRIWDSYGMLVVFAVVFIGCVIFVPNFGSFINMKGLGLAISMSGMVACGMLFCLASGDFDLSVASVIACAGVTTAVVINMTESLWIGVGAGLLLGAACGLINGFVIARLKINALITTLATMQIVRGLAYIISDGKAVGIEDERFFALGYTNWFGLPAPIWITVACLVLFGFLLNKTTFGRNTLAIGGNEDAARLAGVPVVRTKIIIFVLSGLVSAAAGIILASRMTSGQPMTSIGYELIVISACILGGVSLKGGIGKISYVIAGILILGTVENAMNLLNISPFSQYVVRGLILLAAVIFDRYKQLAKRTI

SEQ ID NO: 40439 - DNA, 996 bp, Yersinia pestis KIM
  CDS (1)..(996): transl_table=11
gtgagcaaagaattacccctaccagacgtgcagccttggcgtcaccagttgtttgattttctctacaaatggggaatgttgctcaccgttgttgcgttaatcgcgctatttggtttggcatcggataacttcctcgatccaaacaatatcatcaacattttacgttctatcgccattgtgaccgtaattgccatcggggtgtctatctcgctgtcgattggcggttttgacctgtcagtaggctccacggcctcgttggcgaatgccgtcgtggtatcattgtttgtctggtatggcttcggtaccacgggcgcaataatcctgacgctgctgatttgcacactggtcggtctgtttaatgctttcctgattgtggtgctgaaaatccccgatatgctagccaccctggccagcctgtttgtgattcagggggtcgccatgacttacagccgcggcggttcgatcactcaaagtatgttgttgcccagtggcgatatggcggaaggggttattccagaaattttttccgcactcggccaggtaccggttatcgtgctgattatgttagcggtcaccgtggtggtgcagttgtatttatcgctgaccaagcacgggcggcggatgtacgccattggcggtaacccacaagccgcgcggctggcggggatccgcacggttcgctatcgggtactggcttatgtgctctccgctcaattggcggcactcggtgggatcttgctggcttcacgcattggttcatcgcaggtgaatgctggcagtggttatttgatggacgccgtcgccgccgcctatatcggcttttcactggctggctcgggtaaacctaatgcgttcggcaccttaattggcgcgataattttgggtgtcttgcaaaatgggttggtgatgttgtcagtgccttattatgcgatggatattattaaaggcttggtattagctatggccctggcactgacttatattcagaaacggtga

SEQ ID NO: 40440 - protein, 331 aa, Yersinia pestis KIM
MSKELPLPDVQPWRHQLFDFLYKWGMLLTVVALIALFGLASDNFLDPNNIINILRSIAIVTVIAIGVSISLSIGGFDLSVGSTASLANAVVVSLFVWYGFGTTGAIILTLLICTLVGLFNAFLIVVLKIPDMLATLASLFVIQGVAMTYSRGGSITQSMLLPSGDMAEGVIPEIFSALGQVPVIVLIMLAVTVVVQLYLSLTKHGRRMYAIGGNPQAARLAGIRTVRYRVLAYVLSAQLAALGGILLASRIGSSQVNAGSGYLMDAVAAAYIGFSLAGSGKPNAFGTLIGAIILGVLQNGLVMLSVPYYAMDIIKGLVLAMALALTYIQKR

SEQ ID NO: 40441 - DNA, 1026 bp, Yersinia pestis KIM
  CDS (1)..(1026): transl_table=11
ttgaaggttcttattatgaatgtgttaaataagaaagatatgctcacttactttaaagagagcgggatttatgtggtgttgtttgtgctattggcaattattattatcaaggatccgacttttttaagtttgatgaatttaagtaacattctgactcaatcttcggtgcgtattattatcgcgttaggggtcgcgggtttgattgttacccaaggcacggatttgtccgcaggtcgtcaggtagggttagccgcagtggtcgctgcgacaatgctacaatcgatggataacgtgaataaagttttcccggacttgcagactgtacctattccagtggtcattctcgttgtctgcctgattggggcggttattggtttgattaacggtataattattgcgtacctgaatgtgactccatttattaccacattaggcactatgattatcgtttatggcgttaactcgctgtattacgattttgtcggtgcttcaccgattgccggttttgatcctgctttttcgacttttgctcaaggtttcttgcggtttggtgattttaaactgtcctatattaccttttacgccttaatagcaattatgtttgtatgggtactgtggaataagacccgttttggcaagaatatttttgctattggcggcaacccggaggcggcgaaagtctctggtgtgaatgtgccactgaatttgatcatgatttatgcattgtcgggggtgttctatgcctttggcggtatgctggaagcagggcgtatcggcagtgcgacgaacaatctcggatttatgtatgagctagatgcgatagcagcctgcgtggtgggtggggtgtccttcagtggtggcgtcggtaccgtgatcggcgtggtgaccggggttatcatcttcactgtcattaactatgggctcacgtatattggtgtgaacccgtactggcaatacattatcaagggcgggattatcatctttgcggttgcgttggattcactgaagtatgcgaagaagaaatag

SEQ ID NO: 40442 - protein, 341 aa, Yersinia pestis KIM
MKVLIMNVLNKKDMLTYFKESGIYVVLFVLLAIIIIKDPTFLSLMNLSNILTQSSVRIIIALGVAGLIVTQGTDLSAGRQVGLAAVVAATMLQSMDNVNKVFPDLQTVPIPVVILVVCLIGAVIGLINGIIIAYLNVTPFITTLGTMIIVYGVNSLYYDFVGASPIAGFDPAFSTFAQGFLRFGDFKLSYITFYALIAIMFVWVLWNKTRFGKNIFAIGGNPEAAKVSGVNVPLNLIMIYALSGVFYAFGGMLEAGRIGSATNNLGFMYELDAIAACVVGGVSFSGGVGTVIGVVTGVIIFTVINYGLTYIGVNPYWQYIIKGGIIIFAVALDSLKYAKKK

SEQ ID NO: 40443 - DNA, 999 bp, Yersinia pestis KIM
  CDS (1)..(999): transl_table=11
atggataaggcaaccgagacccgccgcgagggagcacctaccgcgagcaaactcaacggccaggccatgctgggctgggttttacaccatattgtctggatctggctgattgcactggttgtcatctttggtgtcttcaatgaatttttcctgacgatatccaatctgcaaaacgtgatggtgcaggccacggttttgggaaccttagggctggcggtggcactgccgctgctggtggctgagattgacttgtcgattccggcaaatgcgggtttctcggcggcggtgggggcgatggcttatgccgaactggggctgccgtggcctattgcagcattaataggtttactggttggcacatttatcggtttcttcaatggggtgtgcatcacccgattgaaaatggtctcgctgatagagacgttggcgatgatgattattatccagggcgcgctgttggcgctgacacagggcaagaccctgacaaacctttctgaaggttatatttggattggccaggcgaccatcggggggtggcccctgatgccggtggtgtttcttctggtgctggcggtgatgggggcggtgctgaagtatacggtgttaggccgttcgatctatgccgtcggtggtaatcctgttgcgtcaaactccgccgggattcgggtcgcgcgggtcaaaattattgcttacacgatttcagggttccttgccgcacttgctggctttttgttggcatcgtggcagatggccatcacctcaaaccaaggctcgagctacttgctctacgccatcgccgcgcccattatcggcggcgtcagtgtttttggtgggcacggtaacgtcaagggggtgctgggcggtgtgctgctgctgacggtgatccaagttggcctcgccattgtcaatgtcccttcgttctatgtcggcatgattggcggggtgatcatttttatcgctgtcgccattgatgctttccggatccgttacttcggatag

SEQ ID NO: 40444 - protein, 332 aa, Yersinia pestis KIM
MDKATETRREGAPTASKLNGQAMLGWVLHHIVWIWLIALVVIFGVFNEFFLTISNLQNVMVQATVLGTLGLAVALPLLVAEIDLSIPANAGFSAAVGAMAYAELGLPWPIAALIGLLVGTFIGFFNGVCITRLKMVSLIETLAMMIIIQGALLALTQGKTLTNLSEGYIWIGQATIGGWPLMPVVFLLVLAVMGAVLKYTVLGRSIYAVGGNPVASNSAGIRVARVKIIAYTISGFLAALAGFLLASWQMAITSNQGSSYLLYAIAAPIIGGVSVFGGHGNVKGVLGGVLLLTVIQVGLAIVNVPSFYVGMIGGVIIFIAVAIDAFRIRYFG

SEQ ID NO: 40445 - DNA, 1011 bp, Yersinia pestis KIM
  CDS (1)..(1011): transl_table=11
ttggtaatgtctctgacacggaccagtaaattcaggaaggccattcatcaatacgggatcatacttgcctttgttggcttgtgtgcggtcattgctctggctggtgaatttgcagtaaacagcgggacatggagcgagaattattttttatcacgggataatacactcattattctgcgccaggtctcgatcaacggcatcctggccattgggatgacgttcgttattatcaccgcgggtgttgatctctccgttggcgcggttttaggcttggccggtattgtcgccgcgcgttttgcgacgaataacagtgccatcgccttaggggggaccgattggccactgttagtacccatcgtgattgccattggcatcggtttagtctgcggcgctatcaatggctttatcttaggcaaatatcgtctgcaaccctttattgtcacaatggggatgttatctgtcgcccgtggcctgacattactgactactggcggaaacccggtatcacaattaaccgatgaattccgttggttaggtaacggttatattttgggtattcccgtaccggtgttgatctttattattctgttcgccattgcctggtttgtcttgaataagatgacgtttggccgttacgtctacgcggtgggcgggaatgaaaaaagtgcccgcacatccgggatcaacgtattacgtattaaagtggcggtatataccctttgcggtattttggcggcgatcgcgggtttaattttaaccgcacgtactggctcggcacaaactggcgctggcgtatcctatgaattggatgctatcgcggcggtcgttattggcggcaccagtatggctggcggtattggaactctgcgcggaaccttatttggtgtgctgataataggtgtgatgaacaatgggcttgatttactcggcgtacaatcctattaccagcaaattatcaaaggtgttctgattgtctttgctgtcatgcttgacccatcccgtaagcaataa

SEQ ID NO: 40446 - protein, 336 aa, Yersinia pestis KIM
MVMSLTRTSKFRKAIHQYGIILAFVGLCAVIALAGEFAVNSGTWSENYFLSRDNTLIILRQVSINGILAIGMTFVIITAGVDLSVGAVLGLAGIVAARFATNNSAIALGGTDWPLLVPIVIAIGIGLVCGAINGFILGKYRLQPFIVTMGMLSVARGLTLLTTGGNPVSQLTDEFRWLGNGYILGIPVPVLIFIILFAIAWFVLNKMTFGRYVYAVGGNEKSARTSGINVLRIKVAVYTLCGILAAIAGLILTARTGSAQTGAGVSYELDAIAAVVIGGTSMAGGIGTLRGTLFGVLIIGVMNNGLDLLGVQSYYQQIIKGVLIVFAVMLDPSRKQ

SEQ ID NO: 40447 - DNA, 1194 bp, Yersinia pestis KIM
  CDS (1)..(1194): transl_table=11
gtgaaacccatgtcacaagctaatcaatctgaatttaactcaccagaaaatggggataaaaagccattttttcggcttaaatccttaaatttacaagtttttgtcatgctggccgcgatcgccattattatgttgttcttcaccttcacgacagaaggggcctatctcagcgccagaaatatctctaacttgctgcgccagacggcgatcaccggcatcttggcggtcggtatggtgtttgtcattatctccgccgaaattgacttgtctgttggctcaatgatggggttattgggtggcatagcggccatttttgatgtctggctcggctggccgttgccgctgaccattgtcgttacgctggcgctggggctggtattaggggcatggaacggttggtgggtcgcgtatcgcaaagtgccttcgtttattgttacgctcgcgggcatgttggcttttcgtggcattttaattggtatcaccaatggcacgacggtttcgccgaccagtaatgcgatgtcgcagattggccagagctatctgccaagtggcattggttttggcatcggtgctattggcctgatgttgtttgtggcctggcaatggcgtcggcgtaatcaccgcatccgcttggggttaccggttgccgccccgcaaggggatgtgactcgccaaactattaccgcagttatcgttctgggtgccatatatttattgaatgattatcgtggtgtacctacgccggtactaatccttactgcattaatgctggcgggggtatttatggctactcgcaccgcttttggtcgccggatctacgctattggcggcaatattgatgcggcgcgcctgtctggaattaatgtagagcgcactaaactggcagtattcgcgattaacggactgatggtggcgatggctggtttgatcctcagttcacgtttaggcgcaggttcgccttctgcgggcaatatcgctgaactggatgcgattgcggcgtgtgtcattggcggtaccagcctggccggaggcgttggcagtgtggcgggggccgtaatgggcgcatttattatggcttctctcgataatgggatgagcatgctagatgtgccgacgttctggcagtacattgtcaaaggcgcaattttgctgctggccgtgtggatggattccgccaccaaacggcgggtgtga

SEQ ID NO: 40448 - protein, 397 aa, Yersinia pestis KIM
MKPMSQANQSEFNSPENGDKKPFFRLKSLNLQVFVMLAAIAIIMLFFTFTTEGAYLSARNISNLLRQTAITGILAVGMVFVIISAEIDLSVGSMMGLLGGIAAIFDVWLGWPLPLTIVVTLALGLVLGAWNGWWVAYRKVPSFIVTLAGMLAFRGILIGITNGTTVSPTSNAMSQIGQSYLPSGIGFGIGAIGLMLFVAWQWRRRNHRIRLGLPVAAPQGDVTRQTITAVIVLGAIYLLNDYRGVPTPVLILTALMLAGVFMATRTAFGRRIYAIGGNIDAARLSGINVERTKLAVFAINGLMVAMAGLILSSRLGAGSPSAGNIAELDAIAACVIGGTSLAGGVGSVAGAVMGAFIMASLDNGMSMLDVPTFWQYIVKGAILLLAVWMDSATKRRV

SEQ ID NO: 40449 - DNA, 933 bp, Streptococcus agalactiae 2603V/R
  CDS (1)..(933): transl_table=11
atgatgaaatatatatcagagttaacaaccctgattgcgttagctggtttaatggttattatcacactcattaatcctaatttcctcacaaccaataatctactcaatttattattacaagtaactgcaaatggttttatcgctttcgggatgaccttcgttattttgactggcggtattgatttatcagtcgggtccatattagccctatctagtgcattaacagctggattaatcggccacggagtacccgttggtattgctatcgttttatctgttgccttaggtggcatcttgggaatgctaaacggactcttcatttcttacggaaaattagcaccatttatcgttacactggcaacaatgactatctttagaggagcaacgctagtttattcaaacggcaacccaattaccgctggcttatccgatagttttctattccaatttttgggacaaggctatattgttggtatcccattcccagtcattctcatgtttcttacttttattattttgtatattttgttacataaaacagccttcgggaaatctgtttacgctttaggaggtaatgaaaaagcagcgtatatctcgggtattaagttaaacaaagttaaaattatcatctacactatctcaggtatcatggcttccatttctgggttaattatcacatcacgccttagctcagcacaaccaacagctggagcaagttatgagatggatgctattgccgccgttgtcttaggtggaacgtctttatctggtgggaaaggacgtatcattggaacattgattggtgctcttattattggtgtcctgaacaatggattaaacatcattggtgtctctgcattttggcaacaagttgtgaaaggtatcgttattttaatggctgttttacttgatcgctttaaagtagcaaaatag

SEQ ID NO: 40450 - protein, 310 aa, Streptococcus agalactiae 2603V/R
MMKYISELTTLIALAGLMVIITLINPNFLTTNNLLNLLLQVTANGFIAFGMTFVILTGGIDLSVGSILALSSALTAGLIGHGVPVGIAIVLSVALGGILGMLNGLFISYGKLAPFIVTLATMTIFRGATLVYSNGNPITAGLSDSFLFQFLGQGYIVGIPFPVILMFLTFIILYILLHKTAFGKSVYALGGNEKAAYISGIKLNKVKIIIYTISGIMASISGLIITSRLSSAQPTAGASYEMDAIAAVVLGGTSLSGGKGRIIGTLIGALIIGVLNNGLNIIGVSAFWQQVVKGIVILMAVLLDRFKVAK

SEQ ID NO: 40451 - DNA, 939 bp, Oceanobacillus iheyensis HTE831
  CDS (1)..(939): transl_table=11
atgaataataataaaatggcttcgatgtggcaaaaagtaatcccgttaatagctttagtattgctaataatcactgttacgatcatgaacccggcatttttagatccagctaatattatgaatctactaagacaaatttccattaatggattaattgcttttggtatgacttttgtaattctaacaggtggaattgatttatcggtaggatctattcttgcattgtctagtgctttagctgcaataatgatgacatcgggcattgatccaattttagcagtaattataggtgtattattaggtgcagtatttggtgcattgaatggtattttggtttcaaaaggtaacttagcaccgtttatcgttacattagcaacaatgacgatatttagagggttaacattagtatttacagatggaaaaccgataactggattaggagactcctatgcttttcaattatttggtaaaggatactttttaggaataccagtaccagcagtaacgatgatcattgcatttgtaattctttggtttttacttcataaaatgtcatttgggcgtaaaacatatgcaatcggcggaaatgagaaggcggcaaaaatttcaggtataaaagtagatcgtgtcaaaatctttatttattctattagtggaatgatggcagctctagcaggaatgattcttacttcccgccttaattctgctcaaccaactgcaggtacttcttatgaaatggatgctattgcggcagtagttctaggtggtacaagccttgctggcgggaaaggtcgtatagcaggtacgtttatcggagtattaattatcggtattttaaataatggaatgaacttacttggaatttcctctttctatcaacaagtagtaaaaggtgttgttatcttaatcgcagtgctactagatcgtaaaaaatcctaa

SEQ ID NO: 40452 - protein, 312 aa, Oceanobacillus iheyensis HTE831
MNNNKMASMWQKVIPLIALVLLIITVTIMNPAFLDPANIMNLLRQISINGLIAFGMTFVILTGGIDLSVGSILALSSALAAIMMTSGIDPILAVIIGVLLGAVFGALNGILVSKGNLAPFIVTLATMTIFRGLTLVFTDGKPITGLGDSYAFQLFGKGYFLGIPVPAVTMIIAFVILWFLLHKMSFGRKTYAIGGNEKAAKISGIKVDRVKIFIYSISGMMAALAGMILTSRLNSAQPTAGTSYEMDAIAAVVLGGTSLAGGKGRIAGTFIGVLIIGILNNGMNLLGISSFYQQVVKGVVILIAVLLDRKKS

SEQ ID NO: 40453 - DNA, 1218 bp, Bifidobacterium longum NCC2705
  CDS (1)..(1218): transl_table=11
atgagcgccgcaactgcaacacctgcaaagaaagaagaaaagaccggcctgctggccacggtcgccaacaatgcccgtcaatacggtattgtcggcgcactgctgatcatcgtcgtggccttcgagatcctgaccggaggtgtgctgctgaagccgaactccttcgtgtccctgatccagcagaacgcctacgtgatcatcctggccattggtatggtgatggtcatcatcgccacccacatcgacctttcggttggttccttggtggccttcatcggtggtgtgtgtgcactgctgatggaacgcgccggagtcaactggatgctcgccatcgtcatcgctctggtcgtcggcctgatcgtcggcgtctggcagggcttctgggtcgccgtcatcggcatcccgggcttcattaccactctggccggcatgttgatcttccgtggtctcgccaccgtgatcgtcggcgaatccgtgccgattacctccctcgaattccgtggcattgcccgtaactacctgcccaacatccttggctggtggggtccgttcgacggtctgaccattgtgctcggcatcctgtgcattgtcggctttgcctggagccagctgcgcaagcgcgcccgtgtggccaaggtcggcctggtgcccgagccgatgagcctgaccgtcctcaagattgtgcttgtcgcggtcgtcatcgccttcgtcacctacctgctggcttcctccggtaacgctgatcagggtggtaccccgatcatgctggtgatcgtcggtgtgctggtcttcatctacaacttcatcctgaccaagaccgtgttcggtcgccacgtgtacgccgttggtggcaaccgcaaggccgccatcctctccggtatcaacacccgccgcgtggacttcctgctgttcgtccacatgggcttcctgtccgcagtggccgctgtctgcatgctttcccgtctggcttccgcaactgctcaggccggtatggagttcgagatggacgccatcgctgcctgcttcatcggtggcacggccgtcaccggtggtattggtaccatcccgggcgctgtgattggtgcattcgtgatgggtgttatcaaccagggtctgtcgattatgggtgttgacaccgccgtggtgaagaccatcaagggcctcgtgctcctgctggccgtcgccgtggacatcatatccaagcgcaagaagagctga

SEQ ID NO: 40454 - protein, 405 aa, Bifidobacterium longum NCC2705
MSAATATPAKKEEKTGLLATVANNARQYGIVGALLIIVVAFEILTGGVLLKPNSFVSLIQQNAYVIILAIGMVMVIIATHIDLSVGSLVAFIGGVCALLMERAGVNWMLAIVIALVVGLIVGVWQGFWVAVIGIPGFITTLAGMLIFRGLATVIVGESVPITSLEFRGIARNYLPNILGWWGPFDGLTIVLGILCIVGFAWSQLRKRARVAKVGLVPEPMSLTVLKIVLVAVVIAFVTYLLASSGNADQGGTPIMLVIVGVLVFIYNFILTKTVFGRHVYAVGGNRKAAILSGINTRRVDFLLFVHMGFLSAVAAVCMLSRLASATAQAGMEFEMDAIAACFIGGTAVTGGIGTIPGAVIGAFVMGVINQGLSIMGVDTAVVKTIKGLVLLLAVAVDIISKRKKS

SEQ ID NO: 40455 - DNA, 1128 bp, Brucella suis 1330
  CDS (1)..(1128): transl_table=11
atgagcgaacccaattccgaaacgaaggccgcagcggcggcacccgccgatgagcggctgaaatcggccagcaccttgcagcgcctgttgagcaggccggaactgggcgcggtgtccggtctggttctcatcacgatcttctttgtttcaaccgccaattcggccatgtttaccgcagccgggatcatgaatttcatggccccggcctcgcagctcggtattcttgctgtcgcagcggcgctgttgatgatcggcggcgagttcgatctttccattgggtctatggtggcctttgccggcctgatttttgccgcagcccttgtcgtctggcaggtgccgcttgccgttgccattatcgttaccttgctgtttgcggcgctggtgggggcggtgaatgcgcagatcgtcatcagaacgggtctgccgtcctttatcgtcacgctggcctttctcttcatattgcgcggcctttcgcttgtcgggctgaagtgggcaaccggcggtgcgacgcagctgcgcggtgtgaaggaagcggtcagcggcagctatctggccggcctcttttccggcgatgcatttccggggcttttcgcatggctggcggaaaaggatttgattgcgaaatttccaaatggcgagccggcagtgaaaggtgtgctggtcgaggtgctgtggtttgtcgtgattgcccttgtcgcgacctatattctggtgcgcacccgcttcggcaactggatttttgcggcgggcggcgatgcgcttgccgcgcgcaattccggtgttccggtgcgccgcgtcaaaaccacgctcttcatgtgcacggccatggcggcagcacttgtggctatcctgactgttctcgatgccgggtccaccgatgcacggcgcggtttccagaaagaattcgaggcaatcatcgcggccgtgatcggcgggtgcctgctgaccggcggttatggctcggccatcggcgctttcttcggcgcgatcattttcggcatggtgctgatcgggctgacctatacgcagatcgaccaggactggtatcttgtgtttctcgggggaatgcttctgatcgctgtgctcttcaataatttcatccgcaagcgcgccacgggcgagcgttga

SEQ ID NO: 40456 - protein, 375 aa, Brucella suis 1330
MSEPNSETKAAAAAPADERLKSASTLQRLLSRPELGAVSGLVLITIFFVSTANSAMFTAAGIMNFMAPASQLGILAVAAALLMIGGEFDLSIGSMVAFAGLIFAAALVVWQVPLAVAIIVTLLFAALVGAVNAQIVIRTGLPSFIVTLAFLFILRGLSLVGLKWATGGATQLRGVKEAVSGSYLAGLFSGDAFPGLFAWLAEKDLIAKFPNGEPAVKGVLVEVLWFVVIALVATYILVRTRFGNWIFAAGGDALAARNSGVPVRRVKTTLFMCTAMAAALVAILTVLDAGSTDARRGFQKEFEAIIAAVIGGCLLTGGYGSAIGAFFGAIIFGMVLIGLTYTQIDQDWYLVFLGGMLLIAVLFNNFIRKRATGER

SEQ ID NO: 40457 - DNA, 1239 bp, Brucella suis 1330
  CDS (1)..(1239): transl_table=11
atgaacgatatcaatacgctgcttgatcgtcaggatgtacgggtgcgccacgataaaggcgtttctggcgccatccgcacctttatcgaccgggtcaagtcgggcgatctcggttcattgccggtcattgttggccttctcatcatctggactgttttccagacgttgaacccggttttcctttccagcaacaacctcgtgaacctgctattcgattgctcgaccatcggcgtcatttcgctcggcatcgtctgcgtattgatgctgggtgagatcgacctttcggtcggttccattagtgggctttcttcggctatcatcggtgtattatgggtcaataatggctggccggtgggcgtcgccatcattgcagcactttgcgcaggcgcactggctggcttcctctacgcgctcctctataaccgcttcagcatgccaagcttcatttccacactggctgggctgctcgcagctcttgggcttcagctttacctcctcggcaatacaggctccatcaatctgccttacggttcgtggctggtcagcttcggccagcttctggtaatgccgcgtccgctttcttatgcgctggcgctggtcgcgggacttgcgatctttttcacgggttttcgcgccgcgcagcgccgccgcacggcagggctttccgctccctcggctgcgggcattgcgctcaaagctttggtcatcacgctcattatcggctgtggggtattttatctcaaccagtcgcgcggcgtgccatggatgtttgccctgttcgtggcgctggtgatcgcgatgaactatgcgcttacgcgcaccagatggggccgctgcgtgcaggcggttggcggcaatcgcgaggctgcgcgtcgtgccggcatcaatgtgaatttcatctatgtctcggccttcatggcctgctccacactcgcggctgccggtggtatcatggcggcggcgcgtctggcctcatccagccagcaggcaggcaccggtgacgtcaacctcaatgctatcgcggcagcggttatcggcggtaccagcctattcggcgggcgcggcagcgcgtggtcggccctgctcggtattatcgtcatccagtcgattgcgagcggtttgacgcttctcgatctgtcgtcttcgcttcgctacatgattacgggtgcagtgcttgccatcgccgtgattgtcgattcccttgcccgccgttcgcgccagtcgcacggccgcgcctag

SEQ ID NO: 40458 - protein, 412 aa, Brucella suis 1330
MNDINTLLDRQDVRVRHDKGVSGAIRTFIDRVKSGDLGSLPVIVGLLIIWTVFQTLNPVFLSSNNLVNLLFDCSTIGVISLGIVCVLMLGEIDLSVGSISGLSSAIIGVLWVNNGWPVGVAIIAALCAGALAGFLYALLYNRFSMPSFISTLAGLLAALGLQLYLLGNTGSINLPYGSWLVSFGQLLVMPRPLSYALALVAGLAIFFTGFRAAQRRRTAGLSAPSAAGIALKALVITLIIGCGVFYLNQSRGVPWMFALFVALVIAMNYALTRTRWGRCVQAVGGNREAARRAGINVNFIYVSAFMACSTLAAAGGIMAAARLASSSQQAGTGDVNLNAIAAAVIGGTSLFGGRGSAWSALLGIIVIQSIASGLTLLDLSSSLRYMITGAVLAIAVIVDSLARRSRQSHGRA

SEQ ID NO: 40459 - DNA, 1191 bp, Brucella suis 1330
  CDS (1)..(1191): transl_table=11
atgagcgagaatgtaatccagagcggccagcagagcagcgtggggcgctatctcaagaacaatctgcgtgaatccgggatgctgctttcgctcgttgcaatcatgatcttcttccagatcgtgaccggcggcgttctcatgaagccgctgaacctcaccaatctcgttttgcagaacagctatatcgtcatcatggcgcttggaatgctgctcatcatcgtcacgggccatatcgatctttcggtcggttcggtctgcggctttatcggggcgctcgctgccgtcatgatggtaaagctcggcattccctttcccattgcggccattctctgcctcattgtcggcgggttgatcggcgcgatccagggtttttgggtcgcctatttcaatatcccctccttcattgtgacattggccggtatgctcgtgttcaaggggctgatgcttgccgttctgggcggacagtcggtcggaccttttccggtcgtgttccagaagctctcgtcgggcttcattccagaggtgatcggcacgtttgacggcgtttatctcacctcgctcatcatcggcgttctgcttgcggttttcctcatctggcagagcatgcggtcgcgcgcgcgccatattgcccatgaggtggagaccgagcccttcggccttttcgtggtcaagtgcatcctctatttcgtcgcaattgcctatctttcgctgctcatttcctcacatcgcggtatgccgaacgtactcatcatcatggcggtgctgattgccgcctatgcgtttctcaccaatcgcaccgtgatcggccgccagatctatgcggtgggcggcaatcgtcacgccgccaagctttccggcgtgaaaaccgagcggctgacgtttctcaccttcgtcaatatgggtgtgctggcagcacttgcgggtctcgtcttcgccgcccgtctcaatacggcgacgccgaaagctggcatcggctttgaactggacgtcatcgcggcctgcttcatcggtggcgcttcggcctatggcggtgtggggcgggttacgggtgccgtgatcggcgcgctcatcatgggcgtgatgaacaacggcatgtcgatcctcggcatcggtatcgactatcagcaggtcatcaagggtatcgtgctgctgggggcggtttgtatcgacgtttataaccagaaacgctga

SEQ ID NO: 40460 - protein, 396 aa, Brucella suis 1330
MSENVIQSGQQSSVGRYLKNNLRESGMLLSLVAIMIFFQIVTGGVLMKPLNLTNLVLQNSYIVIMALGMLLIIVTGHIDLSVGSVCGFIGALAAVMMVKLGIPFPIAAILCLIVGGLIGAIQGFWVAYFNIPSFIVTLAGMLVFKGLMLAVLGGQSVGPFPVVFQKLSSGFIPEVIGTFDGVYLTSLIIGVLLAVFLIWQSMRSRARHIAHEVETEPFGLFVVKCILYFVAIAYLSLLISSHRGMPNVLIIMAVLIAAYAFLTNRTVIGRQIYAVGGNRHAAKLSGVKTERLTFLTFVNMGVLAALAGLVFAARLNTATPKAGIGFELDVIAACFIGGASAYGGVGRVTGAVIGALIMGVMNNGMSILGIGIDYQQVIKGIVLLGAVCIDVYNQKR

SEQ ID NO: 40461 - DNA, 1170 bp, Brucella suis 1330
  CDS (1)..(1170): transl_table=11
atgacgttgacaggcaaaagcctcagaaaatttctctcagaatacaaaatcgtggcactgctgattgttgtcgccctgatctgggcattcttcgccatcatgacttacgatcccgagatgggccggtcgcagtttctcaccgcgcgcaatttctccaatcttttgcgccagatggcaatcaccggcatgctggcttcagccatggtgtttgtcatcgtggcgggtgaaatcgatctgtcggtgggggctttgctcggcctgttaggcggtgtcgcggcggtgctcgatgtggtttacggctggccgttatgggccactatcgctacggttctggtgctgggtggagtgcttggcggtttcaacggctggctcaccgcctatctcggcattccgtccttcatcgttacgctgggcgggcaattggtgtttcgcggtattgtgctgggtatcatgggcggtgtcaccattgcgccgatttcgcccgagttcaaatatatcgggcaaggctatttgcccggctggcttggcaatgtctgtgccatggcgctgtttacagtgcttgtcctgattacgctcagaacccgttccagcaagcgcaaacacaatttgcaaacgctttcaccggcgatggaaaccgctcgccttctgggcacgggtatcctgatccttggttttatcctggtcctcaacagctatcagggcgtaccggttccggttctcgtgctgctggttattcttggcgtcttcaccgttatttcccgccagactgttttcggccggcatatttatgcggtcggttccaatcctgaagccacgcgcttttccggtgtcaacgtgaatttcgtcaaaatggccgtgtttgcgctgatgggacttatagcggcagtggcgggcctcaccacgactgcacgccttgcggccggtacgccatcggcaggtttgggcggcgaacttgatgccatcgcatcatgctttatcggcggcacatccatgcgcggcggcgtgggatccgtgattggtgcgctggtcggtgcgcttatcatgtcaagcctcgataatggtatgtcgatgctgggcgtcgatacattctggcagcaaatcatcaagggcagtattcttgtgctggccgtttatctcgatatcgtatcatcaggcacacgtcgcgcctga

SEQ ID NO: 40462 - protein, 389 aa, Brucella suis 1330
MTLTGKSLRKFLSEYKIVALLIVVALIWAFFAIMTYDPEMGRSQFLTARNFSNLLRQMAITGMLASAMVFVIVAGEIDLSVGALLGLLGGVAAVLDVVYGWPLWATIATVLVLGGVLGGFNGWLTAYLGIPSFIVTLGGQLVFRGIVLGIMGGVTIAPISPEFKYIGQGYLPGWLGNVCAMALFTVLVLITLRTRSSKRKHNLQTLSPAMETARLLGTGILILGFILVLNSYQGVPVPVLVLLVILGVFTVISRQTVFGRHIYAVGSNPEATRFSGVNVNFVKMAVFALMGLIAAVAGLTTTARLAAGTPSAGLGGELDAIASCFIGGTSMRGGVGSVIGALVGALIMSSLDNGMSMLGVDTFWQQIIKGSILVLAVYLDIVSSGTRRA

SEQ ID NO: 40463 - DNA, 1029 bp, Shigella flexneri 2a str. 301
  CDS (1)..(1029): transl_table=11
atgctgaagtttattcagaacaaccgtgaaatcacggcattgctggcggtggtgctgctgtttgtattacccggttttctcgaccgccagtatttaagtgtgcaaacgctgaccatggtttatagcagcgcgcaaatcctgatcctgctggcaatgggcgcgacgctggtaatgcttacgcgcaatattgatgtttcagtgggttcgattaccggaatgtgcgcggtgctgttggggatgttactgaacgcaggatattcactacctgttgcctgtgtcgcgactttactgcttggtttgctcgcgggatttttcaacggtgccctggtcgcgtggctaaagatccctgccattgttgccacccttggcacgttagggttgtacagaggcatcatgttgctgtggactggcggtaaatggattgaagggttacccgccgaactgaaacagctctccgccccgctgctgcttggcatttcagcaattggttggttgacgataattctggtggcatttatggcctggctgctggcgaagacggcgtttggacgcagtttttatgccacgggcgataatttacagggcgctcgtcaactgggcgttcgtacggaagccattcgcattgtggcattttcgttgaacggctgcatggcggcactggcgggaattgtgtttgcttcgcagattggttttatcctcaaccagaccggtaccgggctggagatgaaagcaattgcagcctgcgtgctgggcggcattagtttgctcggtggttccggtgcgatcatcggtgcggtactcggcgcatggttcctgacgcagatcgatagcgtactggtgctgttgcgcattccggcatggtggaatgattttatcgcgggtctggttctgctggcggtgctggtgtttgatggacgcctgcgttgtgcgctggaacgtaatctacggcggcaaaaatatgcccgctttatgacgccaccgccatccgttaaacccgcttcgtcaggtaaaaaacgggaggccgcataa

SEQ ID NO: 40464 - protein, 342 aa, Shigella flexneri 2a str. 301
MLKFIQNNREITALLAVVLLFVLPGFLDRQYLSVQTLTMVYSSAQILILLAMGATLVMLTRNIDVSVGSITGMCAVLLGMLLNAGYSLPVACVATLLLGLLAGFFNGALVAWLKIPAIVATLGTLGLYRGIMLLWTGGKWIEGLPAELKQLSAPLLLGISAIGWLTIILVAFMAWLLAKTAFGRSFYATGDNLQGARQLGVRTEAIRIVAFSLNGCMAALAGIVFASQIGFILNQTGTGLEMKAIAACVLGGISLLGGSGAIIGAVLGAWFLTQIDSVLVLLRIPAWWNDFIAGLVLLAVLVFDGRLRCALERNLRRQKYARFMTPPPSVKPASSGKKREAA

SEQ ID NO: 40465 - DNA, 1011 bp, Shigella flexneri 2a str. 301
  CDS (1)..(1011): transl_table=11
atgagtgcgttaaataagaaaagttttcttacttacctgaaagagggcggtatttacgtcgttcttttagttttgctggcgattattattttccaggacccaacatttttaagtctgttgaacttaagtaatattctcacccagtcatcggtgcgtattattatcgcgctcggtgtggcagggttaattgtcacccaggggaccgatctttctgctggtcgtcaggtagggctggcggcagtggtggctgcgacattattgcagtccatggataacgccaacaaagtgttcccggaaatggcgacgatgccgattgcgctggttattctgattgtctgtgccattggtgcggtgatcggtttgatcaacggtctgattatcgcttatctcaacgtgacgccgttcattaccacgctcggcacgatgatcatcgtctatggcatcaactcgctctattacgactttgtcggggcgtcgccaatttctggttttgacagtggcttctctacctttgctcagggctttgtcgcgctggggagtttccgtctctcttacatcaccttctacgcgttgattgcggtggcgttcgtctgggtgttgtggaacaaaacccgcttcggtaagaacatttttgccattggcggtaacccggaagcggcaaaaatatctggtgtcaacgtcggcctgaacctgctgatgatctacgcgttgtctggcgtgttctatgcctttggcgggatgttagaagccggacgtatcggctctgccaccaacaacctcggctttatgtatgagctggatgctatcgcggcgtgcgtggtaggcggtgtatcgttcagcggcggtgtggggacggtgattggcgtggtgaccggggtaattatttttaccgtcatcaactatggcctgacgtatatcggcgtaaacccatactggcagtacatcatcaaaggggcgattattatcttcgccgtagcgctggattcactgaaatacgcgcgtaagaagtga

SEQ ID NO: 40466 - protein, 336 aa, Shigella flexneri 2a str. 301
MSALNKKSFLTYLKEGGIYVVLLVLLAIIIFQDPTFLSLLNLSNILTQSSVRIIIALGVAGLIVTQGTDLSAGRQVGLAAVVAATLLQSMDNANKVFPEMATMPIALVILIVCAIGAVIGLINGLIIAYLNVTPFITTLGTMIIVYGINSLYYDFVGASPISGFDSGFSTFAQGFVALGSFRLSYITFYALIAVAFVWVLWNKTRFGKNIFAIGGNPEAAKISGVNVGLNLLMIYALSGVFYAFGGMLEAGRIGSATNNLGFMYELDAIAACVVGGVSFSGGVGTVIGVVTGVIIFTVINYGLTYIGVNPYWQYIIKGAIIIFAVALDSLKYARKK

SEQ ID NO: 40467 - DNA, 999 bp, Shigella flexneri 2a str. 301
  CDS (1)..(999): transl_table=11
atgtatgcttcgtcattaccattgccgcagggcaagagcgtctcgctcaaacaatttgtcagtcgccatattaatgagatcggtttgctggtggtgattgccattctttatctggtcttctccctgaacgcgcctggctttatctcattgaataaccagatgaacgtgctgcgcgatgccgccaccattgggattgccgcctgggcgatgacgctgattattatctccggtgaaattgatgtcagcgttgggccgatggtggcttttgtctcggtgtgcctggcatttttgctgcaatttgaagttccgttggcgattgcttgtctgctggtgttgctgttaggcgcgctgatgggaacgctcgccggggtgctgcgcggcgtgtttaacgtaccaagtttcgttgccacactggggctgtggagcgctctgcgcggaatggggctgtttatgaccaacgcactgccagtgccgattgacgaaaacgaggtgctggactggctgggcggacaatttctcggtgtgccagtatccgcgctgatcatgatggtgttgtttgcgctgtttgtgttcattagccgaaaaaccgccttcgggcgctcggtttttgccgttggcggtaatgccacggcggcgcagttgtgcggtattaacgttcgtcgagtgcgcattcttatctttaccctttcgggattattagcggcggtgaccggcattttgttggcggcacgcctcggttccggtaacgcaggtgccgcaaacggtctggagtttgacgtcatcgccgcggtcgtggtcggcggtacggcactttccggcggtcgcggttccctgttcggtacattgcttggtgtgctggtgattacgctaatcggtaacggtctggtgctgctcggtattaactcctttttccagcaggtggtacgcggcgtcatcatcgtggtggcggtgctggcgaatatcttgctgacccagcgaagcagtaaagcgaaacgctaa

SEQ ID NO: 40468 - protein, 332 aa, Shigella flexneri 2a str. 301
MYASSLPLPQGKSVSLKQFVSRHINEIGLLVVIAILYLVFSLNAPGFISLNNQMNVLRDAATIGIAAWAMTLIIISGEIDVSVGPMVAFVSVCLAFLLQFEVPLAIACLLVLLLGALMGTLAGVLRGVFNVPSFVATLGLWSALRGMGLFMTNALPVPIDENEVLDWLGGQFLGVPVSALIMMVLFALFVFISRKTAFGRSVFAVGGNATAAQLCGINVRRVRILIFTLSGLLAAVTGILLAARLGSGNAGAANGLEFDVIAAVVVGGTALSGGRGSLFGTLLGVLVITLIGNGLVLLGINSFFQQVVRGVIIVVAVLANILLTQRSSKAKR

SEQ ID NO: 40469 - DNA, 966 bp, Shigella flexneri 2a str. 301
  CDS (1)..(966): transl_table=11
atgataacccagactgtctctggtcgccgttatttcacgaaagcgtggctgatggagcagaaatcgcttatcgctctgctggtgctgatcgcgattgtctcgacgttaagcccgaactttttcaccatcaataacttattcaatattctccagcaaacttcggtgaacgccattatggcggtcgggatgacgctggtgatcctgacgtcgggcatagacttgtcggtaggttctctgttggcgctaaccggcgcagttgctgcatctatcgtcggcattgaagtcaatgcgctggtggctgtcgctgctgctctcacgttaggtgccgcaattggtgcggtaaccggggtgattgtagcgaaaggtcgcgtccaggcgtttatcgctacgctggttatgatgcttttactgcgcggcgtgaccatggtttataccaacggtagcccagtgaataccggctttactgagaacgccgatctgtttggctggtttggtattggtcgtccgctgggcgtaccgacgccagtctggatcatggggattgtcttcctcgcggcctggtacatgctgcatcacacgcgtctggggcgttacatctacgcgctgggcggcaacgaagcggcaacgcgtctttctggtatcaacgtcaataaaatcaaaatcatcgtctattctctttgtggtctgctggcatcgctggccgggatcattgaagtggcgcgtctctcctctgcacaacccacggcggggactggctatgagctggatgctattgctgcggtggttctgggcggtacgagtctggcgggcggaaaaggtcgcattgttgggacgttgatcggcgcattaattcttggcttccttaataatggattgaatttgttaggtgtttcctcctattaccagatgatcgtcaaagcggtggtgattttgctggcggtgctggtagacaacaaaaagcagtaa

SEQ ID NO: 40470 - protein, 321 aa, Shigella flexneri 2a str. 301
MITQTVSGRRYFTKAWLMEQKSLIALLVLIAIVSTLSPNFFTINNLFNILQQTSVNAIMAVGMTLVILTSGIDLSVGSLLALTGAVAASIVGIEVNALVAVAAALTLGAAIGAVTGVIVAKGRVQAFIATLVMMLLLRGVTMVYTNGSPVNTGFTENADLFGWFGIGRPLGVPTPVWIMGIVFLAAWYMLHHTRLGRYIYALGGNEAATRLSGINVNKIKIIVYSLCGLLASLAGIIEVARLSSAQPTAGTGYELDAIAAVVLGGTSLAGGKGRIVGTLIGALILGFLNNGLNLLGVSSYYQMIVKAVVILLAVLVDNKKQ

SEQ ID NO: 40471 - DNA, 942 bp, Streptococcus agalactiae NEM316
  CDS (1)..(942): transl_table=11
gtgaaaaatatgatgaaatatatatcagagttaacaaccctgattgcgttagctggtttaatggttattatcacactcattaatcctaatttcctcacaaccaataatctactcaatttattattacaagtaactgcaaatggttttatcgctttcgggatgaccttcgttattttgactggcggtattgatttatcagtcgggtccatattagccctatctagtgcattaacagctggattaatcggccacggagtacccgttggtattgctatcgttttatctgttgccttaggtggcatcttgggaatgctaaacggactcttcatttcttacggaaaattagcaccatttatcgttacactggcaacaatgactatctttagaggagcaacgctagtttattcaaacggcaacccaattaccgctggcttatccgatagttttctattccaatttttgggacaaggctatattgttggtatcccattcccagtcattctcatgtttcttacttttattattttgtatattttgttacataaaacagccttcgggaaatctgtttacgctttaggaggtaatgaaaaagcagcgtatatctcgggtattaagttaaacaaagttaaaattatcatctacactatctcaggtatcatggcttccatttctgggttaattatcacatcacgccttagctcagcacaaccaacagctggagcaagttatgagatggatgctattgccgccgttgtcttaggtggaacgtctttatctggtgggaaaggacgtatcattggaacattgattggtgctctcattattggtgtcctgaacaatggattaaacatcattggtgtctctgcattttggcaacaagttgtgaaaggtatcgttattttaatggctgttttacttgatcgctttaaagtagcaaaatag

SEQ ID NO: 40472 - protein, 313 aa, Streptococcus agalactiae NEM316
MKNMMKYISELTTLIALAGLMVIITLINPNFLTTNNLLNLLLQVTANGFIAFGMTFVILTGGIDLSVGSILALSSALTAGLIGHGVPVGIAIVLSVALGGILGMLNGLFISYGKLAPFIVTLATMTIFRGATLVYSNGNPITAGLSDSFLFQFLGQGYIVGIPFPVILMFLTFIILYILLHKTAFGKSVYALGGNEKAAYISGIKLNKVKIIIYTISGIMASISGLIITSRLSSAQPTAGASYEMDAIAAVVLGGTSLSGGKGRIIGTLIGALIIGVLNNGLNIIGVSAFWQQVVKGIVILMAVLLDRFKVAK

SEQ ID NO: 40473 - DNA, 990 bp, Escherichia coli CFT073
  CDS (1)..(990): transl_table=11
atgatgtcttctgtttctacatcgggttctggcgcacctaagtcgtcattcagcttcgggcgtatctgggatcagtacggcatgctggtggtgtttgcggtgctttttatcgcctgtgccatttttgtcccaaattttgccaccttcattaatatgaaagggttgggcctggcaatttccatgtcggggatggtggcttgtggcatgttgttctgccttgcttccggtgactttgacctttctgtcgcctccgtaattgcctgtgcgggtgtcaccacggcggtggttattaatctgactgaaagcctgtggattggcgtggcagcggggttgctgctgggcattctctgtggtctggtcaatggctttgttatcgccaaactcaaaataaatgccctgatcacgacactggcaacgatgcagattgttcgaggtctggcgtacatcatttcagacggtaaagcggtcggtatcgaagatgaaagcttctttgcccttggttacgccaactggttcggtctgcctgcgccaatctggctcaccgtcgcgtgtctgatcatctttggcttgctgctgaataaaaccacctttggtcgtaataccctggcgattggcgggaacgaagaggctgcgcgtctggcgggtgtaccggttgttcgcaccaaaattattatctttgttctctctggcctggtatcagcgatagccggaattattctggcttcacgtatgaccagtgggcagccaatgacgtcgattggctatgagctgattgtgatctccgcctgcgttttaggtggcgtttctctgaaaggcggcatcggaaaaatctcatatgtggtggcgggtatcttaattttaggcaccgtggaaaacgccatgaacctgcttaatatttctcctttcgcacagtacgtagttcgcggcttaatcctgctggcagcggtgattttcgaccgttacaagcaaaaagcgaaacgcactgtctga

SEQ ID NO: 40474 - protein, 329 aa, Escherichia coli CFT073
MMSSVSTSGSGAPKSSFSFGRIWDQYGMLVVFAVLFIACAIFVPNFATFINMKGLGLAISMSGMVACGMLFCLASGDFDLSVASVIACAGVTTAVVINLTESLWIGVAAGLLLGILCGLVNGFVIAKLKINALITTLATMQIVRGLAYIISDGKAVGIEDESFFALGYANWFGLPAPIWLTVACLIIFGLLLNKTTFGRNTLAIGGNEEAARLAGVPVVRTKIIIFVLSGLVSAIAGIILASRMTSGQPMTSIGYELIVISACVLGGVSLKGGIGKISYVVAGILILGTVENAMNLLNISPFAQYVVRGLILLAAVIFDRYKQKAKRTV

SEQ ID NO: 40475 - DNA, 1011 bp, Escherichia coli CFT073
  CDS (1)..(1011): transl_table=11
atgagtgcattaaataagaaaagttttcttacttacctgaaagagggcggtatttacgtcgttcttttagttttgctggcgattattattttccaggacccaacatttttaagtctgttgaacttaagtaatattctcacccagtcatcggtgcgtattattatcgcgcttggtgtggcagggttaattgtcacccaggggactgacctttccgcaggtcgccaggtggggctggcggcagtagtagcagcgacgttattgcagtccatggataacgccaacaaagtgttcccggaaatggcgacgatgccgattgcgctggttattctgattgtctgtgccattggtgcggtgatcggtttgatcaacggcttgattatcgcctatctcaacgtgacgccgttcattaccacgctcggtacgatgattatcgtctacggcattaactcgctctattacgactttgtcggggcatcgccaatttccggttttgacagtggtttctccacttttgcccaaggctttattgcgctggggagtttccgtctctcttacatcaccttctatgcgttgattgcggtggtgtttgtctgggtgttatggaacaaaacccgcttcggtaagaacatttttgccattggcggtaacccggaagcggcgaaagtatctggtgtcaacgtcggcctgaacctgctgatgatttacgcgttgtctggtgtgttctatgccttcggcgggatgttagaagccggacgtatcggctcagccaccaacaacctcggctttatgtatgagctggatgctatcgcggcgtgcgtggtaggcggcgtatcgttcagcggcggtgtggggacggtaattggtgtggtgaccggggtgattatttttaccgtcatcaactatggtctgacgtacatcggcgtaaacccgtactggcagtacatcatcaaaggggcgattattatcttcgccgtggcgctggattcactgaaatacgcgcgtaagaagtga

SEQ ID NO: 40476 - protein, 336 aa, Escherichia coli CFT073
MSALNKKSFLTYLKEGGIYVVLLVLLAIIIFQDPTFLSLLNLSNILTQSSVRIIIALGVAGLIVTQGTDLSAGRQVGLAAVVAATLLQSMDNANKVFPEMATMPIALVILIVCAIGAVIGLINGLIIAYLNVTPFITTLGTMIIVYGINSLYYDFVGASPISGFDSGFSTFAQGFIALGSFRLSYITFYALIAVVFVWVLWNKTRFGKNIFAIGGNPEAAKVSGVNVGLNLLMIYALSGVFYAFGGMLEAGRIGSATNNLGFMYELDAIAACVVGGVSFSGGVGTVIGVVTGVIIFTVINYGLTYIGVNPYWQYIIKGAIIIFAVALDSLKYARKK

SEQ ID NO: 40477 - DNA, 999 bp, Escherichia coli CFT073
  CDS (1)..(999): transl_table=11
atgtctgcttcgtcattaccattgccgcagggcaagagcgtctcgctcaaacaatttgtcagtcgccatattaatgagatcggtttgctggtggtgattgccattctttatctggtcttctccctgaatgcgcctggctttatctcattgaataaccagatgaacgtgctgcgcgatgccgccaccattgggatcgccgcctgggcgatgacgctgattattatctccggtgaaattgatgtcagcgttgggccgatggtggcttttgtttcagtgtgcctggcgtttttgctgcaatttgacgttccgctggcgattgcttgtctgctggtgttgctgttaggtgcgctgatgggaacgctcgccggggtgctgcgcggcgtgtttagcgtgccaagttttgttgccacgctgggtttatggagcgccctgcgcggaatggggctgtttatgacgaacgccttgccagtgccaattaacgaaaacgaagtgctggattggctgggcggacaatttctcggtgtgccggtatccgcgctgatcatgatggtgttatttgcgctgtttgtgttcattagccgcaaaactgccttcgggcgctcggtttttgctgttggcggtaatgccactgcagcgcagttgtgcggtattaacgttcgtcgggtacgcattcttatttttaccctttcgggattattagcggcggtgaccggcattttgttggcggcccgcctcggttccggtaacgcaggtgccgcaaacggtctggagtttgacgtcatcgccgcggtcgtggtcggcggtacggcgctttccggcggtcgcggctcgttgttcggtacgctgcttggcgtactggtgattacgctaatcggtaacggtctggtgctgctcgggattaactcctttttccagcaggtggtgcgcggcgtcatcatcgtggtggcggtgctggcgaatatcttgctgacccagcgtagcagtaaagcgaaacgctaa

SEQ ID NO: 40478 - protein, 332 aa, Escherichia coli CFT073
MSASSLPLPQGKSVSLKQFVSRHINEIGLLVVIAILYLVFSLNAPGFISLNNQMNVLRDAATIGIAAWAMTLIIISGEIDVSVGPMVAFVSVCLAFLLQFDVPLAIACLLVLLLGALMGTLAGVLRGVFSVPSFVATLGLWSALRGMGLFMTNALPVPINENEVLDWLGGQFLGVPVSALIMMVLFALFVFISRKTAFGRSVFAVGGNATAAQLCGINVRRVRILIFTLSGLLAAVTGILLAARLGSGNAGAANGLEFDVIAAVVVGGTALSGGRGSLFGTLLGVLVITLIGNGLVLLGINSFFQQVVRGVIIVVAVLANILLTQRSSKAKR

SEQ ID NO: 40479 - DNA, 990 bp, Escherichia coli CFT073
  CDS (1)..(990): transl_table=11
atgacagagaaaactcttgccagtccgaaaccttcggaaattcccattgcaaataattttaaaaaagtcttcaggcaatatggtggtatcctcagtggaatggtggtgttaatcattctgttcagttttattaatgacagtttttttaccgccaataacattactaatattattcttcaggtttcgataattgcaattaccgcctatggaatgacttatgtgcttttgcttggcgatattgatttatcggtcggttcaaccattgcattgattggcacatttgctgcgcttggggcttcatggggaattccatttgttttattggtcccattatccattattgcagcactggctttggggatgataaatggtggcttgacggctatagcggggatcccttcgtttattgtcaccgttgctactatggggatcttccgtggtatcgcttatatagtgaccgatggtatgcccatcatgattaaagatgatgcttttctggcgctggggaatggagaatttctctatatacctattcctatatggatattaatcatcttattgctgataaaccacttcattcttactaaaacaacctttggacgaaaaatttatatcactggtggtaataaagaagcggcaatttattcagggataaatgtcacccgcttgaaaattaaagtctttatgattacagccgtgctggcaggtatcagcgggatgatccttgcctcacgcctctattccgggcaaccgaattccgcgttgagctacgaactggatgctattgccgcggctgtactgggaggcaccagcctgaatggcggctatggaaccgtggtggggacggtgatcggcgcattaaccatcggcgttattaataatggcatgaacttaatgaatgttccttatttttaccagatggtggttaaaggattagtcattcttgtagccgtttattttgacgtaagaaataaaagaaaacgcagctaa

SEQ ID NO: 40480 - protein, 329 aa, Escherichia coli CFT073
MTEKTLASPKPSEIPIANNFKKVFRQYGGILSGMVVLIILFSFINDSFFTANNITNIILQVSIIAITAYGMTYVLLLGDIDLSVGSTIALIGTFAALGASWGIPFVLLVPLSIIAALALGMINGGLTAIAGIPSFIVTVATMGIFRGIAYIVTDGMPIMIKDDAFLALGNGEFLYIPIPIWILIILLLINHFILTKTTFGRKIYITGGNKEAAIYSGINVTRLKIKVFMITAVLAGISGMILASRLYSGQPNSALSYELDAIAAAVLGGTSLNGGYGTVVGTVIGALTIGVINNGMNLMNVPYFYQMVVKGLVILVAVYFDVRNKRKRS

SEQ ID NO: 40481 - DNA, 987 bp, Vibrio vulnificus CMCP6
  CDS (1)..(987): transl_table=11
atgagtagtgaaatcatgagcaaaagaaaatcaaatgagacaaacaaaacttggatcagtaaagagtggctcattgagcagaaatcgctcatcgcgttacttttcctcatcgtggtggtctcttttctcaatccaaactttttcaccgtagacaacattctcaacattcttcgtcaaacctcggtgaacgcgatcatcgccgtggggatgaccttggttattctgactgcgggcatcgatttgagtgtggggtcggtgttggccctatgtggcgcgtttgctgctagccttgtcgcgatggaagtcccggtattcatcgcggtgccaaccgcgctgttagcgggggcaacgttgggggccattagcggcattattatcgccaaaggcaaagttcaagcctttatcgccacactggtgacgatgaccttgctgcgtggtgtcaccatggtgtataccgatggccgtcctatctctacgggttttaccgatactgccgatgcgtttgcttggtttggcactggctatgcgctaggcattccggtaccggtttggttgatggtggtggtgtttgcggccgcttggtatctgcttaatcacacccgctttggtcgctatgtgtatgcactgggtgggaacgagtctgccactcgtctatccggtatcaacgtcgacaaagtcaaaatcggtgtttacgcgatttgcggcctacttgctgctttggcaggcatcatcgtcacatcacgtctatcttcggctcaaccaacggcagggatgggctatgagcttgatgcgattgccgccgtggtgcttggtggtaccagtttaatgggtggtaaaggacggattatgggtacgttgattggtgcgttaatcatcggtttcctaaacaacgcgctgaacttactcgatgtttcttcttactaccaaatgatcgccaaagctgctgttattttgctggcggtaatggtggataacaaaaataaatga

SEQ ID NO: 40482 - protein, 328 aa, Vibrio vulnificus CMCP6
MSSEIMSKRKSNETNKTWISKEWLIEQKSLIALLFLIVVVSFLNPNFFTVDNILNILRQTSVNAIIAVGMTLVILTAGIDLSVGSVLALCGAFAASLVAMEVPVFIAVPTALLAGATLGAISGIIIAKGKVQAFIATLVTMTLLRGVTMVYTDGRPISTGFTDTADAFAWFGTGYALGIPVPVWLMVVVFAAAWYLLNHTRFGRYVYALGGNESATRLSGINVDKVKIGVYAICGLLAALAGIIVTSRLSSAQPTAGMGYELDAIAAVVLGGTSLMGGKGRIMGTLIGALIIGFLNNALNLLDVSSYYQMIAKAAVILLAVMVDNKNK

SEQ ID NO: 40483 - DNA, 1086 bp, Bradyrhizobium japonicum USDA 110
  CDS (1)..(1086): transl_table=11
gtgatggccatgcccctggaatccccgatcaccttctcgaatgtcggcaagatcaagtggtggcagcgcggcatcttcgcctcccagaccggctacgtgctgctcgcgctggccgtgctgctggtgatcatgcatttcgccagcccgtatttcttcacccagggcaacatgcagaacgtggcgaagaacttttccttcatcgccatcgccaccctcggcgtcaccttcgtgatcatcaccggcggcatcgatctctcggtcggctcgatgatgtgcttctcggccatgatcacctcgatggtcatgaccgagctgtcgacgccgggcgggctcggcgcctcgctcttcgtgcacatggcggccgacggcaagacggtgctggccaatgtccccggcctgatcctgctgatctccgtcgtcgcgggccttggcgtcgcgctgatcgccggtctcgtcaacggcttctgcatcgcggtgctgggcctgtcgccgttcgtgaccacgctcggcatgctctcgatcgtgcgcgggctcggctatgtcgtctccaacgggcgcggcagctttcctggcgggccggacgccgattacttctacgcgctcacctcgggcgacgtgctcggcgtgcccgtaccgttcatctatctcgtgatccttgcgctggcgatggcggtggtgctgcaccacacctcgttcggccgccacgtcttcgcgctcggcggcaacgagaaggcggccgaactgaccggcatcccggtcgtgcgcgtgaagatcgaggtctatgtgctctgcgcgctcgccgctggcctccagggcatcatcatctccggctggctcggatcggcacccgccaacatggcgacctcctacgagctcaacgtgatcgcggcggccgtcatcggcggtgccaaccttgccggcggcatcggcgggccgctgggggccattgtcggctgcgtgctgctggaggtgatccgcaacggtctcgtgctggcacaggtcagctcctactggcagcagacgctggtgggcgtgatcatcatcctggccgtgctggtcgatcgtgtgcgctcgcggatgatctga

SEQ ID NO: 40484 - protein, 361 aa, Bradyrhizobium japonicum USDA 110
MMAMPLESPITFSNVGKIKWWQRGIFASQTGYVLLALAVLLVIMHFASPYFFTQGNMQNVAKNFSFIAIATLGVTFVIITGGIDLSVGSMMCFSAMITSMVMTELSTPGGLGASLFVHMAADGKTVLANVPGLILLISVVAGLGVALIAGLVNGFCIAVLGLSPFVTTLGMLSIVRGLGYVVSNGRGSFPGGPDADYFYALTSGDVLGVPVPFIYLVILALAMAVVLHHTSFGRHVFALGGNEKAAELTGIPVVRVKIEVYVLCALAAGLQGIIISGWLGSAPANMATSYELNVIAAAVIGGANLAGGIGGPLGAIVGCVLLEVIRNGLVLAQVSSYWQQTLVGVIIILAVLVDRVRSRMI

SEQ ID NO: 40485 - DNA, 978 bp, Bradyrhizobium japonicum USDA 110
  CDS (1)..(978): transl_table=11
atgaccgacatcaccaaggaggcgatcgtgccgccccgctccttcctgtcgcaggacgcgatccaggtgttctatcgcctgctcgcagctttgctgatctgcgccgtgctggccgtgctcagcgattccttcctgagcctcggcaacatcctcaatgtgctgaggcaggcgagcctgaccttcttcatcgcctccggcctgacgctggtggtgctgaccgcgggcctcgatctctccgtcggcgccaatgtcgcgctgtcggcctgtatcgccggaaccgtgatccacaagaccggctcgccggcactcggcatcctcaccggccttgcctgcggcggcatcgtcggccttctcaacggtgtcatggtcaccgcgctgcgcatcccctccttcatcgcgacctatggcatgctctgggtgctgaacggcctgacctactggtacatggcgggcgagacccttcacggttttccggcaggcttccgccagatcggcagcggctatctgttcggcctgccgatcccggtctacctgctgctggtcttcctcggcatcggaacgctgtttgcccagcgcacgatctggggccaggagatctacgcgatcggcgccaatccggtcgcggcgcggctctccggcattccggtcgcgcggcgcctgctgctggtctatgccgtctccggcaccatggcggggctcgcctcgatcatcttcctgtcgcggctcaattcggccgaggccgacatcggcgagagcctgacgctaccggcaatcgcggccgtgctgatcggcggcacctcgctgttcggcggtgtcggcaccgtgttcggcaccttcatcggcgcgttgatcctgacgctggtgctgaacggcatgaacctgctctcggtcagcgccaactggcagccgctcgtcaccggcgtcatcgtcatcctcgcggtctggctcgacatgaagacccgccgccgcgcgcaatga

SEQ ID NO: 40486 - protein, 325 aa, Bradyrhizobium japonicum USDA 110
MTDITKEAIVPPRSFLSQDAIQVFYRLLAALLICAVLAVLSDSFLSLGNILNVLRQASLTFFIASGLTLVVLTAGLDLSVGANVALSACIAGTVIHKTGSPALGILTGLACGGIVGLLNGVMVTALRIPSFIATYGMLWVLNGLTYWYMAGETLHGFPAGFRQIGSGYLFGLPIPVYLLLVFLGIGTLFAQRTIWGQEIYAIGANPVAARLSGIPVARRLLLVYAVSGTMAGLASIIFLSRLNSAEADIGESLTLPAIAAVLIGGTSLFGGVGTVFGTFIGALILTLVLNGMNLLSVSANWQPLVTGVIVILAVWLDMKTRRRAQ

SEQ ID NO: 40487 - DNA, 1191 bp, Bradyrhizobium japonicum USDA 110
  CDS (1)..(1191): transl_table=11
atgaccgacaagacggtttcgctgcccgaggagcgccggcacggcagcttcatcaagaataatttgcgcaattacggcatgctgatgtcgctgatcgcgatcatgctgttcttccaggtcatgaccggcggcacgctgctccagccgctcaatttgaccaacctggtgctccagaacagctacatcgtcatcatggcgctcggcatgctgctggtgatcgtcaccggccatatcgacctctcggtcggttcggtcgcgggcttcgtcggcgcggtggccgccgtgctgatggtgacctacaaggtcgactacacgctggccttcatcgcctgcctgctgctgggcgccgcgatcggcgcggcgcagggctattgggtggcctatttcaagatcccgtccttcatcgtgacgctggccggcatgctcgtgttcaagggtcttgcgcttgcggtgttgcagggccagtcgctcgggccgttcccggcgaccttccagaaactgtcctcgggcttcattccggagatcctgcccgaggccggcacgctgcatccgacctccatgctgatcggcgccgtgctcgcgctcggcctcgtttatgtcagcgccaagggccggtcgcgcgagcagtcgcacggcatcgaggtcgagccttatgccttcttcctcggcaagagcattttgctggcctgcgccgtgctctacttcacctatctgatcgcctcgcatcgcggcctgcccaacgtgctggtgatcatgggcgcgctgatcgcgctctacggcttcgtcacccgtcgcaccgtgatcgggcggcagatctacgcggtcggtggcaatgccaaggcggcaagcctgtcgggcatcaagaccgagcggctgaccttcctcaccttcgtcaacatgggcgtgctggccgcgctcgccggcctcgtcttcgccgcgcgtctcaacaccgcgacgccgaaggcgggcctgggcttcgagctcgacgtcatcgccgcctgcttcatcggcggcgcctcggcctatggcggcgtgggccgcgtcggcggcgccgtggtcggcgccatgatcatgggcgtgatgaacaacggcatgtccatcctcggcatcggcatcgactatcagcaggtcatcaagggcctggtgctgctgggagcggtgtgcatcgacgtgtataatcagcggcggtga

SEQ ID NO: 40488 - protein, 396 aa, Bradyrhizobium japonicum USDA 110
MTDKTVSLPEERRHGSFIKNNLRNYGMLMSLIAIMLFFQVMTGGTLLQPLNLTNLVLQNSYIVIMALGMLLVIVTGHIDLSVGSVAGFVGAVAAVLMVTYKVDYTLAFIACLLLGAAIGAAQGYWVAYFKIPSFIVTLAGMLVFKGLALAVLQGQSLGPFPATFQKLSSGFIPEILPEAGTLHPTSMLIGAVLALGLVYVSAKGRSREQSHGIEVEPYAFFLGKSILLACAVLYFTYLIASHRGLPNVLVIMGALIALYGFVTRRTVIGRQIYAVGGNAKAASLSGIKTERLTFLTFVNMGVLAALAGLVFAARLNTATPKAGLGFELDVIAACFIGGASAYGGVGRVGGAVVGAMIMGVMNNGMSILGIGIDYQQVIKGLVLLGAVCIDVYNQRR

SEQ ID NO: 40489 - DNA, 1029 bp, Bradyrhizobium japonicum USDA 110
  CDS (1)..(1029): transl_table=11
atggcgagcagtgagacggcctttgctgaagctcatcgggcgcgcggtctggcgcccttcctgcgctcgcagatgcgcaacatcgcgccgttcctgacgctgatcttcctgtccgccttcttcgccgtcgccagcccctccttcgccacgctcgacaatctcggcaacatcctgacgcaggtgtcggtaacaggcatcatcgccgtcggcctcaccttcgtgatcctctgcgccgagatcgacctgtcgatcgccagcatcgccaatgtcaccggcatcgcggttgcctatttcacgctgcaggagtcctacgtcaacatcgccaacatccccctgcccggcgcggttgcgatcatcctgtcgatcctgctctgcgccctgctcggcctcgtcaatgcgctgggcctgaccgtgatcggcatcccctccttcatcatgaccttggcgatgatgcagatcgcggccggcatctcggcgctgctggtgcgcggccagatcgcctacaaggtgcccggcctgatcacgacgctcggctccggatcgatcggcggcatcccctggatcgtcatcgtcgcggccatcatgctgctcggcggccatctggtgctgacctacacgcgcttcggccgctacgtctacatggtcggcggcaaccgcgaggccgccgaatattccggcctcaacgtcaagttcatcctcggcgcggtgatggtgatctcggcggtgtgctccggcatcggcggcatgctgggcgtcgcccatttcggcagcgcgcagcagaacgagttcgacacctatttgctcgactccatcgccgccgtcgtggtcggcggcaccagcctgttcggcggccgcggcggcatcggcaacaccatcgtcgggctcttcgtcctgggggtcctgaataacggcctcgaccacgtcaacatcgacagctttttgaagatcctgatccgtggcctgatcctgctggcggccttgatcatcaacgtctacgcccagcggttgagggagaaggcggcggagtag

SEQ ID NO: 40490 - protein, 342 aa, Bradyrhizobium japonicum USDA 110
MASSETAFAEAHRARGLAPFLRSQMRNIAPFLTLIFLSAFFAVASPSFATLDNLGNILTQVSVTGIIAVGLTFVILCAEIDLSIASIANVTGIAVAYFTLQESYVNIANIPLPGAVAIILSILLCALLGLVNALGLTVIGIPSFIMTLAMMQIAAGISALLVRGQIAYKVPGLITTLGSGSIGGIPWIVIVAAIMLLGGHLVLTYTRFGRYVYMVGGNREAAEYSGLNVKFILGAVMVISAVCSGIGGMLGVAHFGSAQQNEFDTYLLDSIAAVVVGGTSLFGGRGGIGNTIVGLFVLGVLNNGLDHVNIDSFLKILIRGLILLAALIINVYAQRLREKAAE

SEQ ID NO: 40491 - DNA, 1041 bp, Bradyrhizobium japonicum USDA 110
  CDS (1)..(1041): transl_table=11
atgcctgataacggatcgacgcaggcgaaggccgccacggcaaacggcctggccgccgcccaggagaccaggcgtcagcgcatcaggcttctgatccgcgcggccggcatgctgccggtgctgctgctgctatgcgccggctttcactacctgtcggatggccgtttcttcaccggacagaatctcggcatcgtcttgcagcaggccgccgtcaacaccgtgcttgccgcgggcatgaccttcgtcatcctgaccggcggcatcgatctctcggtcggctcgatcctggcggcgtccgcgatggccggcctgacgatctcgaaactgccggagctcggggcgctgtggctgccggccgccgttctcaccggcctcggcttcggtgtcgtcaatggcgcgctgatcgcgctgttgcgcctgccgccgttcatcgtgacgctgggctcgctcaccgccgtgcgcggtctggcgcggctgctcggcgccgacaccacggtgttcaatccttccattccctacgccttcatcggcaacggctcgctgacgctcgttccgggcgttgcttcgatcccgtggctctcggtgatcgctttgctcgtcatcctcgtctcgtggctggtgctgcgccggaccgtgctcggcgtgcacatctacgcggtgggcggcaacgagagcgcggcgcggcttgccggcatcaaggtctgggccgtgctgatcttcgtctacggcgcatcggggctgctggccggacttggcggcgccatgcaggcggcgcggctctatgcggccaacggccttcaactcggccagtcctatgaactcgacgccatcaccgccgtgatcctcggcggcacctctttcgtcggcggtatcggctcgatctggggcacgctggtcggcgcgctgatcatcgcggtcctgtcgaacggcctgatcctcaccggcgtctcggacatctggcaatatgtgatcaagggcctggtgatcatcggcgccgtggcgctggaccgctaccggttgcaaggctcggccagaacctga

SEQ ID NO: 40492 - protein, 346 aa, Bradyrhizobium japonicum USDA 110
MPDNGSTQAKAATANGLAAAQETRRQRIRLLIRAAGMLPVLLLLCAGFHYLSDGRFFTGQNLGIVLQQAAVNTVLAAGMTFVILTGGIDLSVGSILAASAMAGLTISKLPELGALWLPAAVLTGLGFGVVNGALIALLRLPPFIVTLGSLTAVRGLARLLGADTTVFNPSIPYAFIGNGSLTLVPGVASIPWLSVIALLVILVSWLVLRRTVLGVHIYAVGGNESAARLAGIKVWAVLIFVYGASGLLAGLGGAMQAARLYAANGLQLGQSYELDAITAVILGGTSFVGGIGSIWGTLVGALIIAVLSNGLILTGVSDIWQYVIKGLVIIGAVALDRYRLQGSART

SEQ ID NO: 40493 - DNA, 1011 bp, Clostridium tetani E88
  CDS (1)..(1011): transl_table=11
atgtcggaatttgtaaacaaggagaaaaaaataaatacaaaaaatataaaagaatttgcaggtaagtatgcaatatatttggttcttttagctttgttattatccataggatttctagatagtaatttcctttcaaaacgaaatattataaatgtattaattatagcatctgtacgtgtaataatagcactaggtgttggtggagcattgattaccagaggaacagatttatcagcaggacgtgtagttggatttactgcatgtatatcggctagtttattacaaagaccagattatgcatataaactatttaaaaatgcacctcaactacctttaataatacctatattattagtaatatttatagggcttcttataggtgtaataaatggattagttgtagcttacttaaaagtacctccttttatagctactttaggaatgatggttatagtatatggagcagcatgtatatatactaatgctcaacctataggaggtctaagaaaagatttttcagaactgggaacagggtcaacgctaggtatacctaatttaataataattgctggactagtaatacttgtaatgtggtttatattaaataaaactaagtttggaaaacatatatatgccatagggggaaatccaaatgctgcagaagtttcaggggtaaatgtagatcttacacttgtaaaagtttatgcattagcgggagctttatatggattagcaggagcattactagctgcaagaacaggtggagctacaaataattatggtctaatgtatgaattagatgccatagctgcggctactataggaggagtttcaacttcaggtggaattggaacggttcaaggtataataacaggtgttttaatatttgaggttttaaataatggattagttatcttaggtgtatctgcatattggcaacaagttataaagggaattataatcataggagctgtagcctttgatattagaaaatatattgctaaaaaataa

SEQ ID NO: 40494 - protein, 336 aa, Clostridium tetani E88
MSEFVNKEKKINTKNIKEFAGKYAIYLVLLALLLSIGFLDSNFLSKRNIINVLIIASVRVIIALGVGGALITRGTDLSAGRVVGFTACISASLLQRPDYAYKLFKNAPQLPLIIPILLVIFIGLLIGVINGLVVAYLKVPPFIATLGMMVIVYGAACIYTNAQPIGGLRKDFSELGTGSTLGIPNLIIIAGLVILVMWFILNKTKFGKHIYAIGGNPNAAEVSGVNVDLTLVKVYALAGALYGLAGALLAARTGGATNNYGLMYELDAIAAATIGGVSTSGGIGTVQGIITGVLIFEVLNNGLVILGVSAYWQQVIKGIIIIGAVAFDIRKYIAKK

SEQ ID NO: 40495 - DNA, 987 bp, Clostridium tetani E88
  CDS (1)..(987): transl_table=11
gtgataggaggaaaaaatatgactgaattaagcagagaaaataataaagttagtaaaaaggatattatacaaaagtttagtacagttttgattttagtaatgctgatgattgctctaacagttatgaaacctgtttttatgactagaaataatattatgacaatcttacttcaaacagctgttattgcggttatagctataggtgaaactttagtaataataacatctggtatagatctttctgtaggatctttagttgcaatctcaggtgttgctagtgctatttttatgagagatggtatgaatatgatcctagcttgcatgcttggtatacttataagtacagcttgtggattaattaatggatttatagtagctaaaggaaatattccagagtttatagtaacacttggtatgatgagtatagttagaggtgcttcattagttgttacacaaggcttacctgtttcaggattaccagatggctttcaagtattaggtactggaaaattatttggggttattccagttccagcagtgataatgattattttagccatgatttttaccctgatattaagaaaaacacttataggaagatatacttatgctataggaagtaatgaagaagctacaaagctttcaggaataaatacagatagagttaaaattacggtttatggattaagtggattattagcaggaatagctggtatattacttacagcaagacttatatctgcacaaccaacagctgggacaggctatgaattagatgctatagctgcggctgttattggaggagctagtcttgcaggtggagaaggaactataacaggaactataataggggctttaataatgggtgtattaagaaatggacttaaccttttaaatgtttcagcattttggcaacaaatagttataggagctataattatagctgctgtatatggagataagttgaaaaataaaaaattaaattag

SEQ ID NO: 40496 - protein, 328 aa, Clostridium tetani E88
MIGGKNMTELSRENNKVSKKDIIQKFSTVLILVMLMIALTVMKPVFMTRNNIMTILLQTAVIAVIAIGETLVIITSGIDLSVGSLVAISGVASAIFMRDGMNMILACMLGILISTACGLINGFIVAKGNIPEFIVTLGMMSIVRGASLVVTQGLPVSGLPDGFQVLGTGKLFGVIPVPAVIMIILAMIFTLILRKTLIGRYTYAIGSNEEATKLSGINTDRVKITVYGLSGLLAGIAGILLTARLISAQPTAGTGYELDAIAAAVIGGASLAGGEGTITGTIIGALIMGVLRNGLNLLNVSAFWQQIVIGAIIIAAVYGDKLKNKKLN

SEQ ID NO: 40497 - DNA, 951 bp, Clostridium tetani E88
  CDS (1)..(951): transl_table=11
atgaaaggaaataaaatgaacaacaatataaaagaattccttttgaagtttaaatcgttatttggattgatattactatgtataataatttctatattaacaccaagatttttaaatgtatctaacataatgaatgtatttactcaagtatctgttaatgcaatattagctataggaatgtcttttgtaattttaactggaggaattgatttatctgtgggatcaacacttgctataacaggtgccctttctgctagtataataagacttactaatagtatctttttatccttggttgtagctttaataattggagcagcaattggactgatgaatggagtaacagtagctaaaggaaagatacaagcttttatagtaactttagcaactatgactgtatttagaggggttactatggtatatacaaatggtacgccaatatcaggactatctgagaagtttatggtaataggtaataaaaagatattaggatatataccagttccagctataataactataataatacttattatggcatggtatgttttaagtcaaactagatatggaagatatgtttacgctcttggaggtaatgaagattcagctaggctttcaggaataaatacagataaagttaaaatgcttgtgtatgtaatatgtggcatgacagctgctttaagtggtgtaattacaactagcagggtgggaacagcttctccaaatgctggacttggttttgaactggatgctatagcagcagtagtacttggtggaactagtttagctggtggggaaggaacagttgttggaactataataggagctatgataataggtgttttgaataatggattaaacttagcaggagtatcggcatattatcaatctattgtaaaggggttagtaatacttctagctgttttaatagataaaaagagtaaaaaataa

SEQ ID NO: 40498 - protein, 316 aa, Clostridium tetani E88
MKGNKMNNNIKEFLLKFKSLFGLILLCIIISILTPRFLNVSNIMNVFTQVSVNAILAIGMSFVILTGGIDLSVGSTLAITGALSASIIRLTNSIFLSLVVALIIGAAIGLMNGVTVAKGKIQAFIVTLATMTVFRGVTMVYTNGTPISGLSEKFMVIGNKKILGYIPVPAIITIIILIMAWYVLSQTRYGRYVYALGGNEDSARLSGINTDKVKMLVYVICGMTAALSGVITTSRVGTASPNAGLGFELDAIAAVVLGGTSLAGGEGTVVGTIIGAMIIGVLNNGLNLAGVSAYYQSIVKGLVILLAVLIDKKSKK

SEQ ID NO: 40499 - DNA, 1233 bp, Tropheryma whipplei str. Twist
  CDS (1)..(1233): transl_table=11
atggaaataatgaaaattaaacttttttctagtagaaattttgggattcttgttgcagccgttgcggtcgctctgttttttcaggtagcttcaggcggtaggatgctgacaagcgacaatgtgctcaatattgtcaatggaaacagccatatctttattgtgtcgattggcatggtgcttgtaattgtttcgggcaatattgatctttcagttggttctgttgctgcctttgttggaatagttgttgccgttgctaccgatagctttcatttaagcgcatggcaagccattatcctggggctgctaattgggcttgtagtcgggtgttggcaggctttttgggttgcctttgtgggtatcccggcttttattgccactttggctggcatgcttactttcagaggtctcaatcagcttgtgggcaattctcggtcagtacccgtgccagatgattttacttactttggtgccggttatctccccgatatattcactaacactgcgttcaatgtcccgacagttattttgggctttgttgtcttcctgctgttagtgataatgcagatacttcgcaggcgcaacaggaaactacttggcattcagcaagagaatattcccgtatttttactgagaatcgcaatatatgggcttgccgtggcgtatctcacatatctctttgccacaggtcatcccgggacaagcttcccaattcctggtctaatatttgttgttattgcttttatctatgtattcatctccgagagaaccatccttggaaggcatatatatgctgttggcggtaatagaaatgcagccattctctctggtgtcagtgtgaaaagagttaatttctttgtcatggcaaacatgtcaattcttgccagtattgcgggcatgatgtttgttggtcgctctggagggtctggtccatctgatggtgttggatgggaacttgacgcaatagctgctgtatttgtcggcggcgcggccgtcagcggtggtgttgggacagttattggcgcatgccttggtggtgtggttgttgcccttctaagtaacggcttgcttatcatgggtattagtgctgatatagctgcgattatcaagggtttagttttgttggcagctgtttcttttgatgtcgttagtaaaaaccgggaaaaaccgtctataatcagattgtttgtacgacgaagtggactttcgcgggataaggccggtggtcgaggatga

SEQ ID NO: 40500 - protein, 410 aa, Tropheryma whipplei str. Twist
MEIMKIKLFSSRNFGILVAAVAVALFFQVASGGRMLTSDNVLNIVNGNSHIFIVSIGMVLVIVSGNIDLSVGSVAAFVGIVVAVATDSFHLSAWQAIILGLLIGLVVGCWQAFWVAFVGIPAFIATLAGMLTFRGLNQLVGNSRSVPVPDDFTYFGAGYLPDIFTNTAFNVPTVILGFVVFLLLVIMQILRRRNRKLLGIQQENIPVFLLRIAIYGLAVAYLTYLFATGHPGTSFPIPGLIFVVIAFIYVFISERTILGRHIYAVGGNRNAAILSGVSVKRVNFFVMANMSILASIAGMMFVGRSGGSGPSDGVGWELDAIAAVFVGGAAVSGGVGTVIGACLGGVVVALLSNGLLIMGISADIAAIIKGLVLLAAVSFDVVSKNREKPSIIRLFVRRSGLSRDKAGGRG

SEQ ID NO: 40501 - DNA, 1224 bp, Tropheryma whipplei TW08/27
  CDS (1)..(1224): transl_table=11
atgaaaattaaacttttttctagtagaaattttgggattcttgttgcagccgttgcggtcgctctgttttttcaggtagcttcaggcggtaggatgctgacaagcgacaatgtgctcaatattgtcaatggaaacagccatatctttattttgtcgattggcatggtgcttgtaattgtttcgggcaatattgatctttcagttggttctgttgctgcctttgttggaatagttgttgccgttgctaccgatagctttcatttaagcgcatggcaagccattatcctggggctgctaattgggcttgtagtcgggtgttggcaggctttttgggttgcctttgtgggtatcccggcttttattgccactttggctggcatgcttactttcagaggtctcaatcagcttgtgggcaattctcggtcagtacccgtgccagatgattttacttactttggtgccggttatctccccgatatattcactaacactgcgttcaatgtcccgacagttattttgggctttgttgtcttcctgctgttagtgataatgcagatacttcgcaggcgcaacaggaagctacttggcattcagcaagagaatattcccgtatttttactgagaatcgcaatatatgggcttgccgtggcgtatctcacatatctctttgccacaggtcatcccgggacaagcttcccaattcctggtctaatatttgttgttattgcttttatctatgtattcatctccgagagaaccatccttggaaggcatatatatgctgttggcggtaatagaaatgcagccattctctctggtgtcagtgtgaaaagagttaatttctttgtcatggcaaacatgtcaattcttgccagtattgcgggcatgatgtttgttggtcgctctggagggtctggtccatctgatggtgttggatgggaacttgacgcaatagctgctgtatttgtcggcggcgcggccgtcagcggtggtgttgggacagttattggcgcatgccttggtggtgtggttgttgcccttctaagtaacggcttgcttatcatgggtattagtgctgatatagctgcgattatcaagggtttagttttgttggcagctgtttcttttgatgtcgttagtaaaaaccgggaaaaaccgtctataatcagattgtttgtacgacgaagtggactttcgcgggataaggccggtggtcgaggatga

SEQ ID NO: 40502 - protein, 407 aa, Tropheryma whipplei TW08/27
MKIKLFSSRNFGILVAAVAVALFFQVASGGRMLTSDNVLNIVNGNSHIFILSIGMVLVIVSGNIDLSVGSVAAFVGIVVAVATDSFHLSAWQAIILGLLIGLVVGCWQAFWVAFVGIPAFIATLAGMLTFRGLNQLVGNSRSVPVPDDFTYFGAGYLPDIFTNTAFNVPTVILGFVVFLLLVIMQILRRRNRKLLGIQQENIPVFLLRIAIYGLAVAYLTYLFATGHPGTSFPIPGLIFVVIAFIYVFISERTILGRHIYAVGGNRNAAILSGVSVKRVNFFVMANMSILASIAGMMFVGRSGGSGPSDGVGWELDAIAAVFVGGAAVSGGVGTVIGACLGGVVVALLSNGLLIMGISADIAAIIKGLVLLAAVSFDVVSKNREKPSIIRLFVRRSGLSRDKAGGRG

SEQ ID NO: 40503 - DNA, 1005 bp, Pseudomonas syringae pv. tomato str. DC3000
  CDS (1)..(1005): transl_table=11
atggacgccaaagcccctgttcatcaggccgccgcaaaaccgtcaggccgtgtgtggttgctcaagctgctgcccaacaatatcggcgggccattgattggtctggccctgctgttagtcgtcttttctttcagctccgaattcttcttcaccctgcgcaacggcctgaacattcttgatcaggtaacagtgctgggcattctcgccatcggcatgacagcggtgatcgtcatcggcggcattgacctatctgtcggttcggtactggcgttttcgatgatgatgctcggctggctgtatcaggatcaaggcctggcgcttggcctggcgatcccggtagcaatagcaactggcatgctcgcaggcctggtgtccggcttgttgattacctacgcccgactgcccgctttcatcgccacgctgaccatgatgtcggtcgcccgcggcctggcaaacattctcaccgagggccggcagatcgtcggttatccggagtggttcaccagcctggccacggttcgtcatttcggcttcttatcggctacggtcgggctgtttctggtcatgctggtggtggcctgggtattcctgcgctttcgggccggtggtcgcaacctgtatgccattggcggcagccccgaagtggcgcggctttcggggattaaggtgcgcgccatcaccttgtgggtgtacgccatcagcggtgcgctggccggtatagccgccgtgaccatggctgcccgcctcgactcctcgcaacccagcgccgggctgacgctggaactggacgccatcgccgcggtggtgatcggcggtgccagcctcagcggcggtgtcggcagcgtcggcggcacgctggtcggtgtgctgatcatcggcgtgctgcgtaacggcctcaacctgctcggtgtgtcgcccttcattcaacaggtggtcatcggcgtagtgattgcccttgctgtgaccatcgataccttgcgtcgccgttccaacagtgctcattaa

SEQ ID NO: 40504 - protein, 334 aa, Pseudomonas syringae pv. tomato str. DC3000
MDAKAPVHQAAAKPSGRVWLLKLLPNNIGGPLIGLALLLVVFSFSSEFFFTLRNGLNILDQVTVLGILAIGMTAVIVIGGIDLSVGSVLAFSMMMLGWLYQDQGLALGLAIPVAIATGMLAGLVSGLLITYARLPAFIATLTMMSVARGLANILTEGRQIVGYPEWFTSLATVRHFGFLSATVGLFLVMLVVAWVFLRFRAGGRNLYAIGGSPEVARLSGIKVRAITLWVYAISGALAGIAAVTMAARLDSSQPSAGLTLELDAIAAVVIGGASLSGGVGSVGGTLVGVLIIGVLRNGLNLLGVSPFIQQVVIGVVIALAVTIDTLRRRSNSAH

SEQ ID NO: 40505 - DNA, 990 bp, Pseudomonas syringae pv. tomato str. DC3000
  CDS (1)..(990): transl_table=11
atgaacaataaaaaagaggtgcgtatgtctaccgaatccagccttcaggctccccgtcagggcatgaacctgcgtcgttttgtcgatgactgggtgatgctcctggctgccgtgggaattttcctgctgtgtgccgtgttcatcgacaacttcatgtcaccgctgaacatgcgcggtcttggcctggcgatttctaccgtgggcattgccgcctgcaccatgttgttctgcctggcgtccgggcacttcgacctgtcggtgggctcggtgctggcctgctccggggtcatcgccggtatcgtcattcgcgacaccgacagcgtgtttctcggtgtgtcggcagcgctggcgctggggctggtggttggccttatcaacggcatcgtcatcgccaagctgcgtatcaatgcgctgattgcgacattggcgaccatgcagatcgtgcgcgggctggcctatatcttctccaacggcaaggccgtcggtgtttccaacgaagacttcttcatcttcggcaatggccagatctacggcgtgccggtgcctattctgatcaccatcgcctgcttcatgttcttcggctggttgctcaactacaccacctacgggcgcaacacgatggccatcggcggtaaccaggaagccgcgctgctggcgggcgtgcatgtcgatcgcaccaagatcatcatcttcgcagtacacggcctgatcggtgcgttggcgggtgtggtactggcttcccgcatgacctcgggccaaccgatgatcggccagggctttgagctgaccatcatctcggcttgtgtgctgggcggggtctcgctaagtggcggtatcggcatgattcgtcatgtgatcgctggcgtgctgattctggcaatcatcgagaacgcgatgaacctgaagaacatcgacaccttctaccagtacgtgattcgcggcacgattctgctgttggcggtgatcattgaccggatgaagcgtcgctga

SEQ ID NO: 40506 - protein, 329 aa, Pseudomonas syringae pv. tomato str. DC3000
MNNKKEVRMSTESSLQAPRQGMNLRRFVDDWVMLLAAVGIFLLCAVFIDNFMSPLNMRGLGLAISTVGIAACTMLFCLASGHFDLSVGSVLACSGVIAGIVIRDTDSVFLGVSAALALGLVVGLINGIVIAKLRINALIATLATMQIVRGLAYIFSNGKAVGVSNEDFFIFGNGQIYGVPVPILITIACFMFFGWLLNYTTYGRNTMAIGGNQEAALLAGVHVDRTKIIIFAVHGLIGALAGVVLASRMTSGQPMIGQGFELTIISACVLGGVSLSGGIGMIRHVIAGVLILAIIENAMNLKNIDTFYQYVIRGTILLLAVIIDRMKRR

SEQ ID NO: 40507 - DNA, 1137 bp, Pseudomonas syringae pv. tomato str. DC3000
  CDS (1)..(1137): transl_table=11
atgaatcaggtcaaacagttcttcacccgctacaaaatgctcgcgctggtgattgccattgccgttatctggctgtttttcagctggcagacggagggcggatttctgaccccgcgcaacctctccaacctgctgcgacagatgtccatcaccggcattctggcgtgtggcatggtgctggtcatcatcagtggcgagatcgacctgtcggtgggctcgatgctcggcctgctcggcggcctggcggcaattctcgatgtcgtttaccacgtaccgctgctggcaaacctgagcctggttgcgctgtgcgggctgatgatcggcctggccaatggttacatgactgcctacctgcgcattccgtccttcattgtcgggctgggcggcatgctggcctttcgcggcattctgctggggattaccggtggcacgaccatcgctccggtgtcgccttcgctggtctacgtcggccaagggtatttgccgcattctgtcggtacagggcttggcgtactgctgctggcgctgacgctgtttctgacctggaaacaacggcgcaacagagccctccacgggctaacggcccattcgatggttcgcgatgtgttacgcgtggtattgatcggcgcggtgctgggcgggtttgtctacatcctcaacagctacgacgggattccggttccggtgttgctgctgctggttttgctcggtgtgttcagttacgtcaccagccagacagtattcggacggcgcgtctatgccgtgggcagcaacatggaagccacgcggttatccggcatcaacgtacaggcggtgaagctttggatcttcggcatcatgggcgtgatgtgcgccttcgccgggctggtcaacaccgcgcgcctggccgcaggctcgccctcggccggcaacatgggcgaactggacgccattgccgcctgtttcatcggcggcacgtccatgcgcggcggctccggcaccgtgtatggcgccctgcttggcgcactggtgattaccagcctggacaacggcatgtcgatgctcgacgtcgacagttactggcagatgatcgtcaagggcggcatcctcgtgctggcggtgtgggtggacgtcagtacacgggccgggcgccggtga

SEQ ID NO: 40508 - protein, 378 aa, Pseudomonas syringae pv. tomato str. DC3000
MNQVKQFFTRYKMLALVIAIAVIWLFFSWQTEGGFLTPRNLSNLLRQMSITGILACGMVLVIISGEIDLSVGSMLGLLGGLAAILDVVYHVPLLANLSLVALCGLMIGLANGYMTAYLRIPSFIVGLGGMLAFRGILLGITGGTTIAPVSPSLVYVGQGYLPHSVGTGLGVLLLALTLFLTWKQRRNRALHGLTAHSMVRDVLRVVLIGAVLGGFVYILNSYDGIPVPVLLLLVLLGVFSYVTSQTVFGRRVYAVGSNMEATRLSGINVQAVKLWIFGIMGVMCAFAGLVNTARLAAGSPSAGNMGELDAIAACFIGGTSMRGGSGTVYGALLGALVITSLDNGMSMLDVDSYWQMIVKGGILVLAVWVDVSTRAGRR

SEQ ID NO: 40509 - DNA, 1026 bp, Pseudomonas syringae pv. tomato str. DC3000
  CDS (1)..(1026): transl_table=11
atgagcaacgcgattctgcaaaacaagccggccctggcgccgaccggaaaaaaaagaaggctgccgaccgagctgagtatttttctggtgctgatcggtataggcctgatctttgaactgttcggctggatcgttcgcgatcaaagctttctgctcaactcccagcgtttggtactgatgattcttcaggtgtcgatcatcggcctgctcgctatcggcgtcacgcaggtgatcatcaccacgggcatcgacctgtcgtccggctcggtattggcgttgtcggcgatgattgccgcgagtctggcgcagacctcggatttttcccgcgcggtgtttccttcgctgactgacctgcccgtatggattccgatcgtggtcgggctcggggtggggttgctggccggcgccatcaacggcagcatcatcgcgatcaccggcatcccgcccttcatcgccacattgggcatgatggtctctgcacgcggcctggcacgcttctacaccgaaggccagccggtgagcatgctctctgattcctacacggccattggccagggcgcgatgccggtcatcatctttctggtggtggcggtcattttccacattgcgctgcgctacaccaagtacggcaaatatacctacgccattggtggcaacatgcaggcggcgcgcacctcggggatcaacgtcaagcgtcacctgatcattgtctacagcatcgccgggctgctggccggattggcaggcgtggttgcctcggcgcgagccgcaaccggccaggcgggcatgggcatgtcctatgagctggatgcgatcgcggcggcagtcatcggcggcaccagcctggcgggcggcgtcgggcgaattaccggcacggtcatcggtgcgctgattctcggggtaatggccagcggcttcacgtttgttggcgtggacgcctacgttcaggacatcatcaagggtctgatcattgtggcggcggtggtaatcgatcaatatcgcaacaagcgcaagaccaagcgctga

SEQ ID NO: 40510 - protein, 341 aa, Pseudomonas syringae pv. tomato str. DC3000
MSNAILQNKPALAPTGKKRRLPTELSIFLVLIGIGLIFELFGWIVRDQSFLLNSQRLVLMILQVSIIGLLAIGVTQVIITTGIDLSSGSVLALSAMIAASLAQTSDFSRAVFPSLTDLPVWIPIVVGLGVGLLAGAINGSIIAITGIPPFIATLGMMVSARGLARFYTEGQPVSMLSDSYTAIGQGAMPVIIFLVVAVIFHIALRYTKYGKYTYAIGGNMQAARTSGINVKRHLIIVYSIAGLLAGLAGVVASARAATGQAGMGMSYELDAIAAAVIGGTSLAGGVGRITGTVIGALILGVMASGFTFVGVDAYVQDIIKGLIIVAAVVIDQYRNKRKTKR

SEQ ID NO: 40511 - DNA, 984 bp, Vibrio parahaemolyticus RIMD 2210633
  CDS (1)..(984): transl_table=11
atgagtaccaataccatgagcaaaccgaccgaaacaagcagcaaaaagctgtttactaaagagtggttgattgaacaaaaatcactgattgcactgctatttttgattgttgtagtgtcttttttaaacccgaatttttttacggtagacaacattcttaacatccttcgtcaaacctcagttaacgcgatcatcgccgtaggtatgactctggttatcttaactgctggtatcgacttgagtgtcggctctgtccttgcgctttgtggtgcatttgccgcgagcctaatcgcgatggaagtgccagttttaattgcggttccaacggctctattagctggtgcagcactgggcgcaatcagtggcatcatcatcgctaaaggcaaagtgcaagccttcatcgcgacgctggtcaccatgacattactgcgcggagtgaccatggtttacaccgacggtcgaccaatttctactggcttcacagacacggcagacgcattcgcatggtttggtacaggctacgcgttaggtattccagtgccagtttggttgatggttgttgtattcgcagcggcttggtacctacttaatcacactcgctttggtcgctatgtttacgcactaggcggcaatgagtctgcgactcgcctgtctggcattaacgtagaccgagtaaagattggtgtgtacgccatctgcggtatgttagctgcacttgcgggcatcatcgtgacttctcgtctgtcttctgctcagccaacggcgggtatgggatacgaactggatgcgattgcagctgtggtacttggcggtacgagcttgatgggcggtaaaggccgtatcatggggacattgattggtgcgctgatcatcggcttcttgaacaatgcgcttaacctactggacgtttcttcttactaccaaatgattgcaaaagcagtggttatcttgctggcggtattggtagacaacaaaaacaaataa

SEQ ID NO: 40512 - protein, 327 aa, Vibrio parahaemolyticus RIMD 2210633
MSTNTMSKPTETSSKKLFTKEWLIEQKSLIALLFLIVVVSFLNPNFFTVDNILNILRQTSVNAIIAVGMTLVILTAGIDLSVGSVLALCGAFAASLIAMEVPVLIAVPTALLAGAALGAISGIIIAKGKVQAFIATLVTMTLLRGVTMVYTDGRPISTGFTDTADAFAWFGTGYALGIPVPVWLMVVVFAAAWYLLNHTRFGRYVYALGGNESATRLSGINVDRVKIGVYAICGMLAALAGIIVTSRLSSAQPTAGMGYELDAIAAVVLGGTSLMGGKGRIMGTLIGALIIGFLNNALNLLDVSSYYQMIAKAVVILLAVLVDNKNK

SEQ ID NO: 40513 - DNA, 990 bp, Vibrio parahaemolyticus RIMD 2210633
  CDS (1)..(990): transl_table=11
atgtctgtaacaagctctacgaaaatactagaacaacaggacgcgaagcgttcatggaattttgctgggatttgggaccgattcggcatgctgatggtgttcgctggtctgtttttattgtgtgctttctttgtgccttacttcgcgacgttcatcaatatgaaaggtctgggtttggcgatctctatgagtggcatggtggcgtgtgccatgctgttttgcttggcgtgtggtgatctggatttgtcggtcgcgtccatcattgcttgctcaggtgtggttaccgccgtcgcgatcaacgcaactagcagcgtggtacttggtgtgggcgcaggtctgctttctggcgttgcctttggcctgttaaacggttttgtcattgctaagttgcaaatcaacgcactgatcaccactttggcgaccatgcagatagcacgaggcttgggctacatcatctcagatggtaaagcggtgggcatcacagaagagagcttctttgcactgggtaactcatcatttattggtatcccaacgcctatttggttgacgatcattacctttggagtttttgctttcttgctgaatcgcactgtttatggtcgtaacacgctcgcgattgggggcaacgaagaagcggctcgcttagcgggtgtgaatgtagtgaaaactaagatgattatcttcaccgtgtctggttttatctcggcattggcgggggttattttggcggcgcgtatgaccagtggtcagcctatgacgtcagtgggctttgaattggtggttatctctgcctgtgtccttggtggtgtgtcgctaaaaggtggcatcggtaaagtctcttacgtgattgctggcgtgctgattttgggtacagtcgaaaatgcaatgaaccttcttaacatgtcaccattcgcgcaatacgtcgtgcgcggtgcaatattacttgctgctgttatttttgaccgctacaaacaaaccagccgcgcataa

SEQ ID NO: 40514 - protein, 329 aa, Vibrio parahaemolyticus RIMD 2210633
MSVTSSTKILEQQDAKRSWNFAGIWDRFGMLMVFAGLFLLCAFFVPYFATFINMKGLGLAISMSGMVACAMLFCLACGDLDLSVASIIACSGVVTAVAINATSSVVLGVGAGLLSGVAFGLLNGFVIAKLQINALITTLATMQIARGLGYIISDGKAVGITEESFFALGNSSFIGIPTPIWLTIITFGVFAFLLNRTVYGRNTLAIGGNEEAARLAGVNVVKTKMIIFTVSGFISALAGVILAARMTSGQPMTSVGFELVVISACVLGGVSLKGGIGKVSYVIAGVLILGTVENAMNLLNMSPFAQYVVRGAILLAAVIFDRYKQTSRA

SEQ ID NO: 40515 - DNA, 1011 bp, Salmonella enterica subsp. enterica serovar Typhi Ty2
  CDS (1)..(1011): transl_table=11
atgagtgcgttaaacaagaaaagctttttgacctggctgaaagagggcggaatttacgtcgttcttttagtgctgctggcgattattattttccaggacccgacttttttaagtttgctgaatttaagtaatattctgacgcaatcttcggtacgtattattatcgcgctgggcgtggcgggactcatcgtcacccaggggacagacctgtcggcggggcgtcaggtagggctggcggcggttgtggcggcaacattactgcaatcaatggaaaacgccaacaaagtgtttccggaaatggcgaccatgccgattgcgctggtcatcctgattgtctgcgcgattggcgcggtgattggcctggtgaacggcatcatcattgcttacctgaacgtgacgccgtttattaccacgcttggcacgatgattatcgtttatggaatcaactccctttactatgactttgtcggcgcttcgcccatttccggctttgacagcggcttttccacctttgcgcagggctttgtggcgatgggcagtttccggctctcctacatcaccttttacgctctgattgcggtagtgtttgtctgggtgctgtggaataagacccgctttggtaaaaacatttttgctattggcggcaacccggaagcggcgaaagtttctggcgtaaacgtggcgctgaacctgctgatgatttatgcgctctccggcgtgttttatgccttcggcggcttactggaagcagggcgtattggttctgccaccaacaacctcggctttatgtatgaactggatgcgattgccgcgtgcgtggtcgggggcgtatcgtttagcggcggagtggggacggtcttcggcgtggtgaccggcgtcattatctttaccgtcatcaactatggcctgacctatatcggggtaaacccgtactggcagtacattatcaaaggcggcattatcattttcgccgtggcgctggactcgctgaaatacgcgcgtaagaagtag

SEQ ID NO: 40516 - protein, 336 aa, Salmonella enterica subsp. enterica serovar Typhi Ty2
MSALNKKSFLTWLKEGGIYVVLLVLLAIIIFQDPTFLSLLNLSNILTQSSVRIIIALGVAGLIVTQGTDLSAGRQVGLAAVVAATLLQSMENANKVFPEMATMPIALVILIVCAIGAVIGLVNGIIIAYLNVTPFITTLGTMIIVYGINSLYYDFVGASPISGFDSGFSTFAQGFVAMGSFRLSYITFYALIAVVFVWVLWNKTRFGKNIFAIGGNPEAAKVSGVNVALNLLMIYALSGVFYAFGGLLEAGRIGSATNNLGFMYELDAIAACVVGGVSFSGGVGTVFGVVTGVIIFTVINYGLTYIGVNPYWQYIIKGGIIIFAVALDSLKYARKK

SEQ ID NO: 40517 - DNA, 1044 bp, Salmonella enterica subsp. enterica serovar Typhi Ty2
  CDS (1)..(1044): transl_table=11
atgttgaaattcatccaaaataaccgggaagcgacggcactgctggcaatagtctgtttattcgtgtttcttggcgcgctggatagccagtatttgagcgtgcaaacgctgacaatggttttcagtagcgcgcaaattttgatgctgttggcgattggcgcgacgatggtaatgctcacccgcaatattgatgtatcggtgggctcgacgacaggaatgtgcgcggtattgctgggagtaatgttaaacgccggctatagcctgccggtcgcctgcctggccacactaatattaggaattgtcgccggattttttaatggcgtactggttgcctggttgaagatacccgccattgtcgccacgctgggaacgctgggcttgtatcgtgggatcatgctgctatggacagggggaaaatggattgaaggattacccgcaggcttaaagcaactctctgctccggtgtttctgggaatttccgcaatcggctggtttaccctggtgttagcgctgcttatggcctggctcctggcgaaaaccgcctttggccgcaatttttacgccaccggcgataacctgcagggcgcccggcaattgggtgtccgtaccgagatggtacgcatcatggcattttcacttaatggcggtatggcggcattggctggaatcgtgtttgcctcgcagattggcttcattcccaatcaaaccggcacggggctggaaatgaaagccatcgcggcctgcgtattggggggaattagcctgttaggcgggtcaggcacggtcatcggcgctattctcggcgcttattttcttacgcaaatcgatagtgtgttagtgctgctgcgcatccccgcctggtggaacgattttattgctggcctggtattgttgggcgtactggtattcgatgggcggctgcgttgcgcattacaacgcaatctgcgccgccagaaatatgcccgttttatatcaccacccactccactacaggcggaagcaaaaacgcacgcacaacagaataaaaacaaagaggtggcatga

SEQ ID NO: 40518 - protein, 347 aa, Salmonella enterica subsp. enterica serovar Typhi Ty2
MLKFIQNNREATALLAIVCLFVFLGALDSQYLSVQTLTMVFSSAQILMLLAIGATMVMLTRNIDVSVGSTTGMCAVLLGVMLNAGYSLPVACLATLILGIVAGFFNGVLVAWLKIPAIVATLGTLGLYRGIMLLWTGGKWIEGLPAGLKQLSAPVFLGISAIGWFTLVLALLMAWLLAKTAFGRNFYATGDNLQGARQLGVRTEMVRIMAFSLNGGMAALAGIVFASQIGFIPNQTGTGLEMKAIAACVLGGISLLGGSGTVIGAILGAYFLTQIDSVLVLLRIPAWWNDFIAGLVLLGVLVFDGRLRCALQRNLRRQKYARFISPPTPLQAEAKTHAQQNKNKEVA

SEQ ID NO: 40519 - DNA, 999 bp, Streptomyces avermitilis MA-4680
  CDS (1)..(999): transl_table=11
atgtccgcatccggtgtcgaggccggcagggggagcggcgtcgtccgcggcgagcggctcagcgccctggcccagcagcacggtgcgctggtggccctcctggtactggcacttgtcgcctcgttctccttcgactccttcgccaccggcgacaacatcgagaacctggccatgacgtcgtcgttcctggccgtggtcgcactcggcatgaccttcgtcatcgtcaccggaggcatcgacctgtccgtcgggtcggtcttcgccctcggtggcgtactcgccgcctggggctcgcggtacggcgccctggtcgccctgctgctgccgctcgcggtctgcggtctgatcggatgcgtcaacggtctgctcatcgccaggacccggctcgcccccttcatcgtcacgctcgccgcgatgctcgccgcacggggtctcatgctcaacatcaccgacgaaggcgccaccacgtatctggtcgacaaggaaacggtcttcgtccacctcggccagggcagactgctgggcgtcggcgcgccggtgtggatcaccggcgcgctgttcctggcgggtgccgtcgccctgcgccgcactcgcttcggccagaacgtctacgccgtcgggggcaacgaggacgccgccgctctcatgggagctccggtcgcccgcaccaagatcacggtgtacacgctttccgcgctgctcgccggattggcaggtgccctgaacgcggcctggctcgcctccggcgtcacgatcctcggttacggcatggagctggacgccatcgccgccgtcgtcatcggcggcacgctgctctccggtggcctcggcttcgtcagcggatccctggtgggtgtgctgctgctgaagacgatccagaacatcatcaaccagatcggctcactcgactccgcctaccagcaggtggtcagcggtggcttcctcgtggtggtcatcatcgcccagacctggctggccaggcggcgccgggtcgcctga

SEQ ID NO: 40520 - protein, 332 aa, Streptomyces avermitilis MA-4680
MSASGVEAGRGSGVVRGERLSALAQQHGALVALLVLALVASFSFDSFATGDNIENLAMTSSFLAVVALGMTFVIVTGGIDLSVGSVFALGGVLAAWGSRYGALVALLLPLAVCGLIGCVNGLLIARTRLAPFIVTLAAMLAARGLMLNITDEGATTYLVDKETVFVHLGQGRLLGVGAPVWITGALFLAGAVALRRTRFGQNVYAVGGNEDAAALMGAPVARTKITVYTLSALLAGLAGALNAAWLASGVTILGYGMELDAIAAVVIGGTLLSGGLGFVSGSLVGVLLLKTIQNIINQIGSLDSAYQQVVSGGFLVVVIIAQTWLARRRRVA

SEQ ID NO: 40521 - DNA, 1020 bp, Streptomyces avermitilis MA-4680
  CDS (1)..(1020): transl_table=11
atgacgcagcccgtatctccgcccaggggcggcaccggccaggcgtcaccggtgagtgaactccccgcatggcgctccctcgccgcccgcgccgacgtccgcacgctctcgctgctcggtgtgctcgccgccctggtcgtcatcggcggcatcaccaaacccgacgagttcctcgacacccgcaatctccaactcgtcctcacccaggcctcggtgatcggcgtcgtcaccgtcggcatgaccttcgtcatcacctccggcggcatcgacctgtccgtcggcgcgatcgtcgccctcgcctccgtatgggccaccaccgtcgccacccaggagtacggcttcgccggcatcctcttcaccgcgatgatcgtcggcgtgggctgcggcctcgtgaacggactgctgatcgcgtacggcgggctggtgccgttcatcgccacgctcgccatgctggcctcggcccgcggcctcgcgctccagatcacggacggcaggacacagatcgtcaccgtcgacacggtcctgaagctgggggagcgcgattcctatctgctcggcatcccgccgctcgtcctggtcttcgcggtcgtgacggtcatcggctggctgatcctgaaccgcaccaccttcgggcggcgcacggtcgccgtcggcggcaacgcggaggcggcccggctcgcgggcatcgacgtacgacgccagcggctgtacctctacctgctctccgggctgtgctgcggcatcgccgccttcctgctgatcatcctgtccggctcgggccagaacaccaacggcaacctgtacgagctcgacgccatcgcggccgcgatcatcggcggcaccctgctcagcggaggccggggcaccatcaccggctcggtcctcggcgtactgatcttcaccacgatcaccgacatcttcgccctgaacaacctgcagagcgacgtccagcagatcgccaagggcgcgatcatcgtcgccgccgtgctggtccagcgccgtaccgcgagcacgacctga

SEQ ID NO: 40522 - protein, 339 aa, Streptomyces avermitilis MA-4680
MTQPVSPPRGGTGQASPVSELPAWRSLAARADVRTLSLLGVLAALVVIGGITKPDEFLDTRNLQLVLTQASVIGVVTVGMTFVITSGGIDLSVGAIVALASVWATTVATQEYGFAGILFTAMIVGVGCGLVNGLLIAYGGLVPFIATLAMLASARGLALQITDGRTQIVTVDTVLKLGERDSYLLGIPPLVLVFAVVTVIGWLILNRTTFGRRTVAVGGNAEAARLAGIDVRRQRLYLYLLSGLCCGIAAFLLIILSGSGQNTNGNLYELDAIAAAIIGGTLLSGGRGTITGSVLGVLIFTTITDIFALNNLQSDVQQIAKGAIIVAAVLVQRRTASTT

SEQ ID NO: 40523 - DNA, 1293 bp, Streptomyces avermitilis MA-4680
  CDS (1)..(1293): transl_table=11
gtgagcatcgaaaagacctccgcgaccgcggaccaggccgccgtcgagaacccggaggcggccgcgggatcggacgtcgccgtcgacccccggctgctcgtgcgcgaacgaggcttcgccggctacatctccgagttcaagcggaagatccgcgccggtgacctgggctccctcccggtcgtcgtcggcttgatcatcatctgggcgatcttcgcgagcctgaactcgaacttcctcaccgcgggcaacctctccgacatctccgtggcgatggtcggtaccggcatgatcgccgtcggcatcgtcttcgtgctgctgctcggcgagatcgacctctccgtcggttccgtcagcggtgtcgcgggcgccgccttcgcggtcctcaacgtcacccacggcatgcccgagtggctggcgctgattctcgccatcctcacgggtacggtcgcgggcgccatccacggcttcgtcttcgcgcgcatcggtgtgccggccttcgccgtcaccctggcgggtctgctgttctggaacggcttcatgctccagatcctcggcagcaacggcacgatcaacctggacagctccggcctggtggccaagctgagcggttactacttcagcgacgtggcggcggcctacggtctcgccgtgttcgccgtggcggtcttcttcctcaccacgttcttcgacaaccgccgccgtgaggccgcgggggtgccgtcccgtccgctgagcgagatcatcgtccgtacggtgctcctcgccgtggtggccttcgccgccgccgccgtcttcaaccagtacaagggcctgccgctggccgtcgtcctgttcctggcggtcctggtgatcacggacttcgtgctgcgccgcaccgcgtacggccgcaagatcttcgcgctcggcggcagcatcgaggcgtcccgccgtgccggtatcaacgtcgccgcggtccgtatctcggtctacgcgatctccggcaccttcgccgccatcggcggtctgttcatcgcctccaagatcgcctcggcgaaccagggtgccggtgccggtgacctcctgatgaacgccatcgcggcggccgtcatcggcggtaccagcctgttcggcggccgcggccgcacctggaacgcgctgctcggtgtgctggtcatcgtctcgatccagtacggcctggcccttcagggcatcgcctcgccggtccagtacatgatcaccggtggtgtactcctcgcgaccgtcgtcatcgacgcggtcacccgcaagacccagaagtcggcgggccgcgcgtaa

SEQ ID NO: 40524 - protein, 430 aa, Streptomyces avermitilis MA-4680
MSIEKTSATADQAAVENPEAAAGSDVAVDPRLLVRERGFAGYISEFKRKIRAGDLGSLPVVVGLIIIWAIFASLNSNFLTAGNLSDISVAMVGTGMIAVGIVFVLLLGEIDLSVGSVSGVAGAAFAVLNVTHGMPEWLALILAILTGTVAGAIHGFVFARIGVPAFAVTLAGLLFWNGFMLQILGSNGTINLDSSGLVAKLSGYYFSDVAAAYGLAVFAVAVFFLTTFFDNRRREAAGVPSRPLSEIIVRTVLLAVVAFAAAAVFNQYKGLPLAVVLFLAVLVITDFVLRRTAYGRKIFALGGSIEASRRAGINVAAVRISVYAISGTFAAIGGLFIASKIASANQGAGAGDLLMNAIAAAVIGGTSLFGGRGRTWNALLGVLVIVSIQYGLALQGIASPVQYMITGGVLLATVVIDAVTRKTQKSAGRA

SEQ ID NO: 40525 - DNA, 1947 bp, Streptomyces avermitilis MA-4680
  CDS (1)..(1947): transl_table=11
gtggccactgacacgctcaagagcacaacgggcgcgagtggcgcctcggcggtccgccggctcctgctcgacaacggggcgctcaccgcgctcatcgtcctcgtcgtcgcgatgtcggcgctgtccggcgacttcctgacgacggacaacctgctcaacatcggcgtccaggcggccgtgaccgccatcctcgccttcggtgtgaccttcgtgatcgtctcggcgggcatcgacctgtcggtcggttcggtcgcggcgctctcggccaccgtccttgcctggacggcgacttcgcacggcctgccggtcgtggtcgccgtggccctcgcggtcgccaccggcgtagcgtgcggtctcgtcaacggcttcctgatctcgtacgggaaactaccgccgttcatcgcgacgctcgccatgctgtcggtgggccgcggtctgtcgctggtgatctcgcagggcagcccgatccccttccccgactcggtctcgcacctcggtgacacgctcggcggctggctgccggtgcccgtcctggtgatgatcgtgatgggtctgatcaccgccctgatcctcggccgtacgtacatcgggcgctccatgtacgcgatcggcggcaacgaggaggccgcgcgcctgtcgggcctgcgggtgaagaagcagaagctcgcgatctacgcgctgtcgggtctgttcgcggccgccgcgggcatcgtgctcgcctcccggctctcctccgcgcagccgcaggccgcacaggggtacgagctggacgcgatcgccgcggtcgtcatcggcggcgcctcgctcgcgggcggtacgggcaaggcgtccgggacgctgatcggcgcgctgatcctggcggtgctgcgcaacgggctgaatctgctgtccgtgtccgcgttctggcagcaggtcgtcatcggtgtcgtgatcgcgctggcggtgctcctcgacacgctgcgccgcaaggccggggcgactccggtggccggtgcctcgagtggcggcaagggcaagcaggcgatgacgtatgtgatcgcggccgtggtcgcggcggccgtcgtgggggcgatgtccttcctgcacaacggctcgtcggcttcgccgacgcagaagatgggcctgtccctctcgaccctcaacaaccccttcttcgtacagatcaagacgggtgcgcaggaggaggcgaagaagcagggcgccgacctgacggtcacggacgcgcagaacgacgcctcgcagcaggccaaccaggtgcagaacttcaccagctcgggcgtcggttcgatcatcgtcaacccggtggactcggacgcggcgggcccggcggtgcgctccgccaacaaggccgacattcccgtcgtgggcgtcgaccggggcgtcaacaaggcggacacggccgcgctggtcgcctccgacaacgtcgcgggcggcaggctgggcgccaaggcgctggccgagaagctgggcggcaagggcaggatcgtgatcctccagggtctggccggcacctccgccagccgtgagcgcggggcgggcttcgccgagggcctgaaggcctaccccggcatcaaggtcgtcgcccggcagcccgcggacttcgaccgcaccaaggggctcgacgtcatgacgaacctgctccaggcgcacccggacgtccagggcgtcttcgccgagaacgacgagatggcgctcggcgcgatcaaggcgctgggtgccaaggccggaaagtcggtctcggtcgtgggcttcgacggcacgccggatgggctgacggcggtcaagtcgggcacgctgtacgcgtccgtggcgcagcagccgaaggagctgggccggatcgcggtgcagaacgcgctgcgggcggccgagggcaagaaggtcgacaagacggtgaaggtgccggtgaaggtggtcacggcgaagaacgtggcggccttcggcggctga

SEQ ID NO: 40526 - protein, 648 aa, Streptomyces avermitilis MA-4680
MATDTLKSTTGASGASAVRRLLLDNGALTALIVLVVAMSALSGDFLTTDNLLNIGVQAAVTAILAFGVTFVIVSAGIDLSVGSVAALSATVLAWTATSHGLPVVVAVALAVATGVACGLVNGFLISYGKLPPFIATLAMLSVGRGLSLVISQGSPIPFPDSVSHLGDTLGGWLPVPVLVMIVMGLITALILGRTYIGRSMYAIGGNEEAARLSGLRVKKQKLAIYALSGLFAAAAGIVLASRLSSAQPQAAQGYELDAIAAVVIGGASLAGGTGKASGTLIGALILAVLRNGLNLLSVSAFWQQVVIGVVIALAVLLDTLRRKAGATPVAGASSGGKGKQAMTYVIAAVVAAAVVGAMSFLHNGSSASPTQKMGLSLSTLNNPFFVQIKTGAQEEAKKQGADLTVTDAQNDASQQANQVQNFTSSGVGSIIVNPVDSDAAGPAVRSANKADIPVVGVDRGVNKADTAALVASDNVAGGRLGAKALAEKLGGKGRIVILQGLAGTSASRERGAGFAEGLKAYPGIKVVARQPADFDRTKGLDVMTNLLQAHPDVQGVFAENDEMALGAIKALGAKAGKSVSVVGFDGTPDGLTAVKSGTLYASVAQQPKELGRIAVQNALRAAEGKKVDKTVKVPVKVVTAKNVAAFGG

SEQ ID NO: 40527 - DNA, 1245 bp, Streptomyces avermitilis MA-4680
  CDS (1)..(1245): transl_table=11
atgagtgccaatgtcacggccaagacaccggccgaagcgtcacccgggggaagtccctccggatccggtcccggcctgctccggctgctggtcgacggcatgcgcagcaacatgcgccagtacggcatgctgatcgccctcggggtgatcgtggccctgttcgcggtgtggacgggtggcgacctgctcctgccgcgcaacgtgtccaacctcgtgctgcagaacagctacatcctgatcctcgcgatcggcatgatgatcgtcatcatcgcgggccacatcgacctgtcggtcggctcgatcaccgccttcgtgggcggtgtggccgcggtgctgatggtcaaccacgacgtgccctggccgctcgcggtgctgctgtgcctggccgtgggagcggccgcgggggccgcgcaggggttcatgatcgcctatctgggcatgccgtcgttcatcgtgacgctcgccggcatgctgatcttccgcggtctgaccgaggtcttcctcaagggccagacgctcggcccgttcccggagggccttcagaaggtcgccaacggcttcctgcccgaggtcggcccgaagaccaactaccacaacctcacgctgctgctcggtctcgcactggtcggcttcgtgatctggcgtgagatgaaggaccgcaagcggcaggcggagtactccctcgaggtgctgcccgccaacctgttcgcggtgaagctcgccctgctgaccgcggcgatcatcgccctcaccatggagctcggcagctacaagggcgcgccggtcgtcctgctggtcctggcggtgctcctggtcggcttcggctacgtcatgcgcaacgtggtggtcggtcgccacgtgtacgcgatcggcggcaacctgccggcggccaggctgtcgggcgtcagggacaagaaggtcaccttcctcgtcttcctcaacatggggatgatggccgcgctcgcgggcctggtcttcgcggcgcggttcaacggagcctcgccgaaggccggcgtcaacttcgaactcgaggccatcgccgcgtcgttcatcggcggtgcctcgatgagcggcggcgtgggcaccatcctcggcgccatcatcggcggcctggtcctcggtgtgctcaacaacggcatgaacctcgtcggcgtcggcaccgactggcagggggtcatcaagggcctcgtgctgctcgcggcggtcggcttcgacgtgtggaacaagcgcaaggtcggttcgtaa

SEQ ID NO: 40528 - protein, 414 aa, Streptomyces avermitilis MA-4680
MSANVTAKTPAEASPGGSPSGSGPGLLRLLVDGMRSNMRQYGMLIALGVIVALFAVWTGGDLLLPRNVSNLVLQNSYILILAIGMMIVIIAGHIDLSVGSITAFVGGVAAVLMVNHDVPWPLAVLLCLAVGAAAGAAQGFMIAYLGMPSFIVTLAGMLIFRGLTEVFLKGQTLGPFPEGLQKVANGFLPEVGPKTNYHNLTLLLGLALVGFVIWREMKDRKRQAEYSLEVLPANLFAVKLALLTAAIIALTMELGSYKGAPVVLLVLAVLLVGFGYVMRNVVVGRHVYAIGGNLPAARLSGVRDKKVTFLVFLNMGMMAALAGLVFAARFNGASPKAGVNFELEAIAASFIGGASMSGGVGTILGAIIGGLVLGVLNNGMNLVGVGTDWQGVIKGLVLLAAVGFDVWNKRKVGS

SEQ ID NO: 40529 - DNA, 960 bp, Streptomyces avermitilis MA-4680
  CDS (1)..(960): transl_table=11
gtgctgctccgccgcgcccgcgaactcgccctggtgccagccctgttgctgctcctggtgctcggtgcggtcgtcaacgactcgttcctcaccgagcgcaatctgatctcgatcctcggcgcctcggccgccctcgccatggtcgtgctcgccgagtcgctcgtcctgatcaccggcaagttcgacctctccctggagtcggtcgtcggtatcgcgcccgccgtgggcgcgctgctcgtgctgccggccgcccagtccggctggggcaccgagttccccgccgcgctcgccctcctcgcgatcctcgtcgtgggcgcggtcatcggcgccttcaacggcatcctcgtcgtgaagctcaagctgaacgccttcatcgtcaccctcgcgatgctgatcatcctgcgcggactgctggtcggcgcgaccaagggcaagacgctgttcgggatgcccgacgcgttcttcaccctggccaccaccacgttcctgcgggtccccatgtccgtgtggctggccgcgatcgccttcggtgtgaccggcctggtcctgcgctaccaccgcgtcggccgcgccctgtacgcgatcggcggcaacgcggacgcggcccgcgcggccggtatccgcgtcgagcgcgtcatgctcggcgtcttcgtcgtcgccggtgtcctcgcctccgtcggcgggatcatgcagaccggctatgtcggcgcgatcagcgccaaccagggcaacaacatgatcttcacggtgttcgcggcggcggtcatcggcggcatcagcctcgacggcggcaagggcaccatgttcggcgccctgaccggcgtactcctgctcggcgtcgtacagaacctgctgaccctcgcccaggtgccgtccttctggatccaggccatctacggcggaatcatcctggtcgccctgatgatcgcgcgggtgacgacgggccgcgcccaggactga

SEQ ID NO: 40530 - protein, 319 aa, Streptomyces avermitilis MA-4680
MLLRRARELALVPALLLLLVLGAVVNDSFLTERNLISILGASAALAMVVLAESLVLITGKFDLSLESVVGIAPAVGALLVLPAAQSGWGTEFPAALALLAILVVGAVIGAFNGILVVKLKLNAFIVTLAMLIILRGLLVGATKGKTLFGMPDAFFTLATTTFLRVPMSVWLAAIAFGVTGLVLRYHRVGRALYAIGGNADAARAAGIRVERVMLGVFVVAGVLASVGGIMQTGYVGAISANQGNNMIFTVFAAAVIGGISLDGGKGTMFGALTGVLLLGVVQNLLTLAQVPSFWIQAIYGGIILVALMIARVTTGRAQD

SEQ ID NO: 40531 - DNA, 936 bp, Bacillus cereus ATCC 14579
  CDS (1)..(936): transl_table=11
atggctaagaaggggaatgtattacaacaactcggttctttaatcggtttagtattaattatcgtcgtaattacagctttaaatccagcgttcattgaaattccaaatttatttaatatactgcgtcaagtatcgattaatgcgcttattgcatttggaatgaccttcgtaattttaacagggggtattgacttatcggtaggttctattttagcattatcaagtgcacttgttgctggaatgatggcaagtggcatggatccgttccttgcaatggcagttggactattagcaggtcttgtaatgggaattgtaaacggtatcatcattgcgaaaggaaaagtagctccatttattgcaactttagcaacaatgactatttttcgtgggttgacgcttgtttatatggacggacgtccgatcactggtcttggtgatcatttaatgttccaaatgtttggccgcggttattttcttggtattccggtaccagctgttacaatgatgatcgctttcgcagtactgtacttcattttgaagaaaacgacatttggtcgccgtacatttgcaattggtggaaatgaagaagcagcagcactatcaggtattaatgttacgagaattaaagtaatgatttacggtctttccggaattttggcagcgcttgcaggtattgtcttaacgtcacgattagattctgcacagccgactgcaggtacttcttatgaattagatgcaattgcagcagttgtattaggtggaacaagtctttctgggggaagaggatggattgttggtacattcatcggtgtacttattatcggtgtactaaataacggtttaaatttattaggtgtatcttctttcttccaacaagttgtaaaaggacttgtaatcttattagctgtattaattgatcgtagaaaagaagcgtaa

SEQ ID NO: 40532 - protein, 311 aa, Bacillus cereus ATCC 14579
MAKKGNVLQQLGSLIGLVLIIVVITALNPAFIEIPNLFNILRQVSINALIAFGMTFVILTGGIDLSVGSILALSSALVAGMMASGMDPFLAMAVGLLAGLVMGIVNGIIIAKGKVAPFIATLATMTIFRGLTLVYMDGRPITGLGDHLMFQMFGRGYFLGIPVPAVTMMIAFAVLYFILKKTTFGRRTFAIGGNEEAAALSGINVTRIKVMIYGLSGILAALAGIVLTSRLDSAQPTAGTSYELDAIAAVVLGGTSLSGGRGWIVGTFIGVLIIGVLNNGLNLLGVSSFFQQVVKGLVILLAVLIDRRKEA

SEQ ID NO: 40533 - DNA, 996 bp, Bacillus cereus ATCC 14579
  CDS (1)..(996): transl_table=11
ttgaatctcgttcataaaacgaaaactaagaaactatatttacctactcatcttttttatcaatttagtacaattgctattattataggtgttacaatttttttctctatcgtcaatgattcttttttaacatataacaatattagtgatattttacgctctatctccatcgtaacgttacttgcaatcggcgttacctttacattgattgtagatgggtttgatttatcagtcggctctaccgctagtttagcaacaattgcagctgcttcttgtctcgttttatatcgacaagaactattagttacactccttgttcctattctttgcggattattagttggattattaaatgcactactcgttatccgaattaaactacctgatttactagctacattaagtatcatgtatatcgtcaatggactacacttaacattttcaaaaggatcttcaatttatgaaggaatgtccggtgcaacaggacattttattccatcttttttatttatcggtcaaggttccgtcttaggaattccagtccctgtcattatcatgcttactgtcgttttaattgcacatctatttttagaaaaaacaacgtacggtcgtttcttttatatgactggtgggaatcgagaagctgctagattagccggtattcctactgatcgttaccgtgtatatgcttatatgattagtggtttactagcttctattggcggcattattctatgcagccgcgttggaacaggacaagtttcagctggtgctccattattaatggatgcagtcgcagctgcctatatcggttacgcaatgttcggtgccaagaaaccaaatatagtcggaacattcctcggctcggtattaattggaattatattaaatggactcacaatgatgaacgtcccttattatgcacaagatattattaaaggcagcattttaattacagctttagccttttcatttattaaaaagaagcgtaaataa

SEQ ID NO: 40534 - protein, 331 aa, Bacillus cereus ATCC 14579
MNLVHKTKTKKLYLPTHLFYQFSTIAIIIGVTIFFSIVNDSFLTYNNISDILRSISIVTLLAIGVTFTLIVDGFDLSVGSTASLATIAAASCLVLYRQELLVTLLVPILCGLLVGLLNALLVIRIKLPDLLATLSIMYIVNGLHLTFSKGSSIYEGMSGATGHFIPSFLFIGQGSVLGIPVPVIIMLTVVLIAHLFLEKTTYGRFFYMTGGNREAARLAGIPTDRYRVYAYMISGLLASIGGIILCSRVGTGQVSAGAPLLMDAVAAAYIGYAMFGAKKPNIVGTFLGSVLIGIILNGLTMMNVPYYAQDIIKGSILITALAFSFIKKKRK

SEQ ID NO: 40535 - DNA, 954 bp, Bacillus cereus ATCC 14579
  CDS (1)..(954): transl_table=11
atgaaacatatgttaaaaatgcatgaaacgtctatcatactgttactactaatttatatagctattgtaggaatgataaaccctagttttattcaatttaactcgttatctttactgatgaaatcaagcgttattttagtcgtgctagcaatcggtcaatcgttcgtcttatttacgaaaaatatagatgtatcagttggttcaagcatggggttaagtgcagcagtttgcggaatgatgttaacgaatgggtatagtgcattcttgtcgatatttgtagctattatacttggggccattattggtttcgtaaatggtattggagttgcgaagtttcgggtaccagccattattatgacattaggcatgttaggaattattagaggtacaatgttaattttcacaggcgggaagtggattgaagatattccaaacgattttaagcagctgtcatctatcatcattcttggtttacctataactgtatggttcgttcttattattttactactactatacttctttttaagaaaagtgccattgggaagatacttttatgcggtaggtgataatgaagatggcgcgaggcttattggtatacctgtaaataaagtgaagatatatgcgtttatgatttcaggcataagcgctgcgctcgctggttgcatatttgttatgaatatcggtttcgtgccaaatcaaacaggtacaggattagaattacaagtaatcgcagccgctgtactaggaggaattcatttaaaaggaggaacaggatctttatttggagctgcattaggagcgttatttttagaaacaataagtagctcactcgtctttttaaaaataccagcattttggaataatgctatttcaggttttttattattacttatcatcatattagatagtgttatgaaaaagtggaaggcagaaaggaggatgaatctatga

SEQ ID NO: 40536 - protein, 317 aa, Bacillus cereus ATCC 14579
MKHMLKMHETSIILLLLIYIAIVGMINPSFIQFNSLSLLMKSSVILVVLAIGQSFVLFTKNIDVSVGSSMGLSAAVCGMMLTNGYSAFLSIFVAIILGAIIGFVNGIGVAKFRVPAIIMTLGMLGIIRGTMLIFTGGKWIEDIPNDFKQLSSIIILGLPITVWFVLIILLLLYFFLRKVPLGRYFYAVGDNEDGARLIGIPVNKVKIYAFMISGISAALAGCIFVMNIGFVPNQTGTGLELQVIAAAVLGGIHLKGGTGSLFGAALGALFLETISSSLVFLKIPAFWNNAISGFLLLLIIILDSVMKKWKAERRMNL

SEQ ID NO: 40537 - DNA, 1011 bp, Shigella flexneri 2a str. 2457T
  CDS (1)..(1011): transl_table=11
atgagtgcgttaaataagaaaagttttcttacttacctgaaagagggcggtatttacgtcgttcttttagttttgctggcgattattattttccaggacccaacatttttaagtctgttgaacttaagtaatattctcacccagtcatcggtgcgtattattatcgcgctcggtgtggcagggttaattgtcacccaggggaccgatctttctgctggtcgtcaggtagggctggcggcagtggtggctgcgacattattgcagtccatggataacgccaacaaagtgttcccggaaatggcgacgatgccgattgcgctggttattctgattgtctgtgccattggtgcggtgatcggtttgatcaacggtctgattatcgcttatctcaacgtgacgccgttcattaccacgctcggcacgatgatcatcgtctatggcatcaactcgctctattacgactttgtcggggcgtcgccaatttctggttttgacagtggcttctctacctttgctcagggctttctcgcgctggggagtttccgtctctcttacatcaccttctacgcgttgattgcggtggcgttcgtctgggtgttgtggaacaaaacccgcttcggtaagaacatttttgccattggcggtaacccggaagcggcaaaaatatctggtgtcaacgtcggcctgaacctgctgatgatctacgcgttgtctggcgtgttctatgcctttggcgggatgttagaagccggacgtatcggctctgccaccaacaacctcggctttatgtatgagctggatgctatcgcggcgtgcgtggtaggcggtgtatcgttcagcggcggtgtggggacggtgattggcgtggtgaccggggtaattatttttaccgtcatcaactatggcctgacgtatatcggcgtaaacccatactggcagtacatcatcaaaggggcgattattatcttcgccgtagcgctggattcactgaaatacgcgcgtaagaagtga

SEQ ID NO: 40538 - protein, 336 aa, Shigella flexneri 2a str. 2457T
MSALNKKSFLTYLKEGGIYVVLLVLLAIIIFQDPTFLSLLNLSNILTQSSVRIIIALGVAGLIVTQGTDLSAGRQVGLAAVVAATLLQSMDNANKVFPEMATMPIALVILIVCAIGAVIGLINGLIIAYLNVTPFITTLGTMIIVYGINSLYYDFVGASPISGFDSGFSTFAQGFLALGSFRLSYITFYALIAVAFVWVLWNKTRFGKNIFAIGGNPEAAKISGVNVGLNLLMIYALSGVFYAFGGMLEAGRIGSATNNLGFMYELDAIAACVVGGVSFSGGVGTVIGVVTGVIIFTVINYGLTYIGVNPYWQYIIKGAIIIFAVALDSLKYARKK

SEQ ID NO: 40539 - DNA, 1062 bp, Rhodopirellula baltica SH 1
  CDS (1)..(1062): transl_table=11
gtgttcggcaaaagccagcctcttccacgctcggtcgtcattcagaaggaagtcactgcgttgttgaagcgagggttgaataccgccggaccgatgttggcgttggtcatcgtgatcctgttctttgccattgccgaatgggcaaccggtagcgacggaaacttcacgtccatggcgtcggtgcgattggttggcattcagagcgtcaagatcggcatcgcttcgctgggaatgacgttgatcattattagcggcggaatcgatttgtccgcgggcacggcggcggctctgtgtggatgtgtcgcggcactgacgctcgaaagtgaatggtcgatcgttcccgctctggccatggcggtcggtgctggcgcattgtgcgggttgttcaatggcattttgatcgcgggattgcgactgactccgttcatcatctcgttgggatcgatgacgatcttcatggggttgggcaagagcctgtccgagcaaggtggcacgatcacaccgccggcggaaagtatccctgaatggctttgggcatcggtcacgccgtttcccaacccggaatggattgcctacccgttactgcctaattttggatggggcgtgtggctgaccattgtgctggccatcgcgaccgcgttgctgctgcaccaaactctgtttggacgtcatgtgttcgcgatcggatccagcgaagcgaccgcgagattgtgcggcgtgaaagtccggcaaaccaagatcctggtttatgtcatcgccggtgccctgttcggtttggccggttgtgtcgacatcgctcggctcggcaaaggcgacgcatccgcgggcatgggattggaactggagatcatcgcggcggtcgtgatcggcggcggttcattgctgggcggccgcggcagcgtggtcggaacactgtgcggcgtgttgatcatgagcgtgattgcacacggatgcacttcgctgggattggaaaatcacattgaaaatattctgttgggtgtgatcattgtcgcggcggtctacgtcgatcgactgcgagcactcaagaaagaatccgtatga

SEQ ID NO: 40540 - protein, 353 aa, Rhodopirellula baltica SH 1
MFGKSQPLPRSVVIQKEVTALLKRGLNTAGPMLALVIVILFFAIAEWATGSDGNFTSMASVRLVGIQSVKIGIASLGMTLIIISGGIDLSAGTAAALCGCVAALTLESEWSIVPALAMAVGAGALCGLFNGILIAGLRLTPFIISLGSMTIFMGLGKSLSEQGGTITPPAESIPEWLWASVTPFPNPEWIAYPLLPNFGWGVWLTIVLAIATALLLHQTLFGRHVFAIGSSEATARLCGVKVRQTKILVYVIAGALFGLAGCVDIARLGKGDASAGMGLELEIIAAVVIGGGSLLGGRGSVVGTLCGVLIMSVIAHGCTSLGLENHIENILLGVIIVAAVYVDRLRALKKESV

SEQ ID NO: 40541 - DNA, 972 bp, Rhodopirellula baltica SH 1
  CDS (1)..(972): transl_table=11
atgttagaaaacaaacgcgaacacctcgcgaaatttcaatcgctgatcgcgttggcagtgatgctgatcgcgatgagctttctgtcagacagtttcttcacgcccgagaatgggttgaacattctgagacaaatttcagtcaatctcagcctttcgattgggatgacattgatcatcttgaccggcggaatcgacttgtcggtcggtgccattctcgctttgtccggcgccgtggcggcagggttgctgaagaacggcatcatgctcgaaccgcttggtgtgaagctggagttcaccgttttcggagcgattgtttctggattgttggtcggttccgccgcagggttgttcaatggagtcgcggtgactcgtttcaagcttccgccgtttgtcgccacgctgggaatgttcagcatcgctcgtggtttgacgatgttgtggacgggcgggttcccggtcacgggtctcggttcatcgttcggttccatcggcacgggcgtgttcctgcaaattccggttccggtttggatcaccggtgcattggttggcgtgtttgtgctgttgacccggacaactcgttttggccggcatgtgtacgcggttggcggcaacgaacgcgcttcgttgttgacaggattgccagtcgatcggatcaaaatcgcggtttacacgctcggtggtttgctcgctggagtggcgggactcatcgtgaccgctcgactggattcggctcaacccaacgcagggttgggctacgaactcgattcgattgccgccgtcgtgattggtggcacatccctgtcgggcggacgaggcagcgtcatggggacggtgctgggttgcctgatcattggtgtgttgaacaacagtttgtttctgttaaacgtttcccctttttggcaacaagtggtcaagggattcgtgatcctggccgccgtcgccgtggaccgcatgagtcaaagggaccgataa

SEQ ID NO: 40542 - protein, 323 aa, Rhodopirellula baltica SH 1
MLENKREHLAKFQSLIALAVMLIAMSFLSDSFFTPENGLNILRQISVNLSLSIGMTLIILTGGIDLSVGAILALSGAVAAGLLKNGIMLEPLGVKLEFTVFGAIVSGLLVGSAAGLFNGVAVTRFKLPPFVATLGMFSIARGLTMLWTGGFPVTGLGSSFGSIGTGVFLQIPVPVWITGALVGVFVLLTRTTRFGRHVYAVGGNERASLLTGLPVDRIKIAVYTLGGLLAGVAGLIVTARLDSAQPNAGLGYELDSIAAVVIGGTSLSGGRGSVMGTVLGCLIIGVLNNSLFLLNVSPFWQQVVKGFVILAAVAVDRMSQRDR

SEQ ID NO: 40543 - DNA, 939 bp, Chromobacterium violaceum ATCC 12472
  CDS (1)..(939): transl_table=11
atgaccccgcaacagaaagccaatttgcaacgcctcggccccttcatcgccctggtgctggtggccgtcggcctgtccgtgatgagtccggacttcctcaccgtcaacaacctgctgaacgtgatgcgccaggtgtcgatcaacgcgctgatcgccttcggcatgacgctggtgatcctgctgggcggcattgacctgtcggtcggctccatcctggcgctgtcctcggtgctgaccgccaccctgttgcgcgcaggcgtggatccgatgctggcgacgctgctgggcatcctggccggcgcggcgatgggcctgttcaacggcctggtggtcagcaagggcaaggtggcgccgttcatcgccacgctggcgtcgatgaccatcctgcgcggcctggcgctggtgttttccaacggcagcccgatcaccggcttcgacagcgagctgttctccatgctgggcggcggctatgtcgccggcctggtcccggtgccggtggtgtggatgctgatcctgttcgccggcttctggttcctgctgaagaagacggtgttcggccgccacctgtacgccaccggcggcaacgaggaggcggcgcggctgtccggcgtcaaggtggacagcgtcaagctgtgggtgtacaccacctccggcgcgatggcggcgatggccggcgtggtgctgacctcgcgcctcaattcggcgcagccgactgccggcaccggctacgagctggacgcgatcgccgcggtggtgctgggcggcaccagcctcagcggcggccgcggctggattttcggcactctgatcggcgcgctgctgatcggcgtgctcaacaacggcttgaacctgctgggcgtgtcctcgttctaccagcaggtgatcaagggcgcggtgatcctgctggcggtactgctggatcgcagcaacaagaagtga

SEQ ID NO: 40544 - protein, 312 aa, Chromobacterium violaceum ATCC 12472
MTPQQKANLQRLGPFIALVLVAVGLSVMSPDFLTVNNLLNVMRQVSINALIAFGMTLVILLGGIDLSVGSILALSSVLTATLLRAGVDPMLATLLGILAGAAMGLFNGLVVSKGKVAPFIATLASMTILRGLALVFSNGSPITGFDSELFSMLGGGYVAGLVPVPVVWMLILFAGFWFLLKKTVFGRHLYATGGNEEAARLSGVKVDSVKLWVYTTSGAMAAMAGVVLTSRLNSAQPTAGTGYELDAIAAVVLGGTSLSGGRGWIFGTLIGALLIGVLNNGLNLLGVSSFYQQVIKGAVILLAVLLDRSNKK

SEQ ID NO: 40545 - DNA, 981 bp, Gloeobacter violaceus PCC 7421
  CDS (1)..(981): transl_table=11
atgggcgagagcacgtcaaaaaacccaaaactcctcaccctaccggattggttgcgtgaatggctcgcccgccagactgcctacggcccggccatcgccgtactgatcgagatcgtcgtcttcagcgccatcgccccgggcttttttaccctcgagaacttcatcaacatctcgctgcagacggcgattttcggcatcctggcggtcggaatgacactggtgatcctgacgggcggcatcgatctgtcggtgggatcggtggtggcccttgccggggtgagcggggccatggtcgcccaagcgggcgggctcggcatgcccgtggccatcgtggtaggcggtggggtcgggcttttgagcggtctgttggtggcgtactttcgggtggctccgtttgtggtcaccctggccgggctcaccattgcccgcggcctcgcctttttgctcaccggcggccggtcgatcggcggtttgccgcccgacttcaccttctggggccaaaaacagctcggcttactgccgctgccagtgctcgtcttgatggtagtggtgaccggaggatactttttgctcacccgcacagtcttcggccgccagatctacgccatcggcggcaacgccgaggcgagttggctcgcgggagtgccggtgcaaggggtgctggtggcggtctatctcatcaacggcttgctcgcggggctcgcgggcgggatgctcgccgcccggctcggagccggaattcccaatagcggccaactctacgaattggaggtgatcgcagcggtagtggtggggggcaccagtttgagcggcggccgaggaggagtactcggcagtctgctcggggcgctgtttatcggcaccctcggcaacggtctcaatctgctgggcgtcgatccgtacctgcaaaaaatcgtactgggagtggtgatcctggcggctgtgctcgtcgatagcgccggacggcggggacaaagatga

SEQ ID NO: 40546 - protein, 326 aa, Gloeobacter violaceus PCC 7421
MGESTSKNPKLLTLPDWLREWLARQTAYGPAIAVLIEIVVFSAIAPGFFTLENFINISLQTAIFGILAVGMTLVILTGGIDLSVGSVVALAGVSGAMVAQAGGLGMPVAIVVGGGVGLLSGLLVAYFRVAPFVVTLAGLTIARGLAFLLTGGRSIGGLPPDFTFWGQKQLGLLPLPVLVLMVVVTGGYFLLTRTVFGRQIYAIGGNAEASWLAGVPVQGVLVAVYLINGLLAGLAGGMLAARLGAGIPNSGQLYELEVIAAVVVGGTSLSGGRGGVLGSLLGALFIGTLGNGLNLLGVDPYLQKIVLGVVILAAVLVDSAGRRGQR

SEQ ID NO: 40547 - DNA, 972 bp, Photorhabdus luminescens subsp. laumondii TTO1
  CDS (1)..(972): transl_table=11
atgaattctaatatatcaccgacatttaaacgttggtttactaaagagtggttactgaaacaaaagtcactgattgcgttgctagtgctgatagcagtagtttcttctcttagccaaaactttttcactttaaataacttgtttaatattctgcaacaaacatcagtcaatgccattatggccgttgggatgacattggttatcctgacatcaggtattgacctgtctgttggttcattgcttgcgttaacaggtgcaatagtagcttcattggttggtacggaagttaatgctctggtggctatcgtgagtgctttggctttaggtgctgcaattggtgcttgtacaggaataataattgctaaaggtaaagtacaggcttttattgccactctagtcatgatgttattacttcgtggaataacccgtgtctatactgatggtagtccaataaatacaggattcagtgataatgccgatctgtttggctggtttggtattggtcgcccactgggaattcctactccagtatggctgatgttgatagtttttgttatcacatggtatatcctgcatcacacccgtttaggtcgttatatttatgccttgggggggaatgaatcggctacccgtttatctggtatcaatatcgataaaattaaaattatcgtttactccttatgcggtttcctgacggcattggcaagtattattgaagttgctcgtctttcttctgctcaacctatggcggggggaggttatgaattagatgctattgctgccgtagttctgggaggaactcgcctggctggtggtaaggggttaattattggtactttgattggtgcactaatcctcggttttttaaataatggcttaaacttattaggtatttcttctaactatcagatgattgttaaagcaattgtaatattgttggcagttctggttgataacaaaagtggtaaataa

SEQ ID NO: 40548 - protein, 323 aa, Photorhabdus luminescens subsp. laumondii TTO1
MNSNISPTFKRWFTKEWLLKQKSLIALLVLIAVVSSLSQNFFTLNNLFNILQQTSVNAIMAVGMTLVILTSGIDLSVGSLLALTGAIVASLVGTEVNALVAIVSALALGAAIGACTGIIIAKGKVQAFIATLVMMLLLRGITRVYTDGSPINTGFSDNADLFGWFGIGRPLGIPTPVWLMLIVFVITWYILHHTRLGRYIYALGGNESATRLSGINIDKIKIIVYSLCGFLTALASIIEVARLSSAQPMAGGGYELDAIAAVVLGGTRLAGGKGLIIGTLIGALILGFLNNGLNLLGISSNYQMIVKAIVILLAVLVDNKSGK

SEQ ID NO: 40549 - DNA, 1008 bp, Vibrio vulnificus YJ016
  CDS (1)..(1008): transl_table=11
atggacgctgttaaatctttcgcattaaagcatttaaaagagagcgcaatatacgcggttctccttattctactggctgttattgttattcaagagccatcgtttcttagcttgagaaacttaagtaatatcctgactcaatcttccgtgcgtgtcatcatcgctctcggtgtcgccggcctgattgtcacccaaggcaccgacctgtcagccggccgccaagtgggtttggcggcggtgatttcggccaccttgttgcaatcgatcgataacgtcaacaaagtgttcccaggcattggcgaagtgcccatcgtcgcggtgatcatttgcgtgtgcttgattggcgccatcatcggtttggtcaacggcgttatcgttgcttacctaaaagtaacgccctttatcgccacattgggcaccatgatcatcgtttacggcatcaactcgctttactacgatgccgtgggcgcctctccgattgcgggctttgacgagcgtttcaccacctttacgcaaggctttatcaacctcggtggtttccgtttctcctacatcaccttctacgccatcatcgccattgtctttatgtgggtgctgtggaacaaaaccgtgtttggcaaaaacattttcgccgtgggtggcaacccagaagcggccaaagtgtctggtgtgaacgtccccctcaccttgttgaaagtgtatgccctttctggcgtgctttacgcctttggcggtatgttggaagctggccgtatcggcagtgccaccaacaacttaggcttcctatacgagcttgatgccatcgccgcgtgtgtggtcggcggcgtttcatttgccggtggtgtcggtagcattgctggtgttgtcacgggtgtgttgatcttcaccgttatcaactacggtatgacctacatcggcgtcagcccatactggcaatacattattaaaggctccatcatcgtcttcgcggtcgcactcgattcgatgaaatacgccaacaaaaaataa

SEQ ID NO: 40550 - protein, 335 aa, Vibrio vulnificus YJ016
MDAVKSFALKHLKESAIYAVLLILLAVIVIQEPSFLSLRNLSNILTQSSVRVIIALGVAGLIVTQGTDLSAGRQVGLAAVISATLLQSIDNVNKVFPGIGEVPIVAVIICVCLIGAIIGLVNGVIVAYLKVTPFIATLGTMIIVYGINSLYYDAVGASPIAGFDERFTTFTQGFINLGGFRFSYITFYAIIAIVFMWVLWNKTVFGKNIFAVGGNPEAAKVSGVNVPLTLLKVYALSGVLYAFGGMLEAGRIGSATNNLGFLYELDAIAACVVGGVSFAGGVGSIAGVVTGVLIFTVINYGMTYIGVSPYWQYIIKGSIIVFAVALDSMKYANKK

SEQ ID NO: 40551 - DNA, 987 bp, Vibrio vulnificus YJ016
  CDS (1)..(987): transl_table=11
atgagtagtgaaatcatgagcaaaagaaaatcaaatgagacaaacaaaacttggatcagtaaagagtggctcattgagcagaaatcgctcatcgcgttacttttcctcatcgtggtggtctcttttctcaatccaaactttttcaccgtagacaacattctcaacattcttcgtcaaacttcggtgaacgcgatcatcgctgtggggatgaccttggttattctgaccgcgggcatcgatttgagtgttgggtcggtgttggccttatgtggtgcgtttgctgccagccttgtcgcgatggaagtcccggtattaatcgcagtgccaaccgcgctgttagcgggagcttcgttgggcgctattagcggcgttattattgccaaaggcaaagttcaagcctttatcgccacgctggtgacgatgactctgctgcgtggcgttaccatggtttacaccgatggccgtcctatctctaccggattcactgatacggcagatgcattcgcttggttcggtacaggttatgcgctaggcattccggtaccggtttggttgatggtggtggtgtttgcagccgcttggtatctgcttaatcacacccgctttggtcgctatgtgtatgcactgggtgggaacgagtctgccactcgtctatccggtattaacgtcgacaaagtcaaaatcggtgtttacgcgatttgcggcctacttgctgctttggcaggcatcatcgtcacatcccgtctatcttcggctcaaccaacggcagggatgggctatgagctggatgcgattgccgccgtggtgcttggtggtaccagcttaatgggtggtaaagggcggattatgggcacgttgatcggtgcgttaatcatcggtttcctaaacaacgcgctgaacttactcgatgtttcttcttactaccagatgattgccaaagctgcggtgattttgctggcggtgatggtcgacaacaagaacaagtaa

SEQ ID NO: 40552 - protein, 328 aa, Vibrio vulnificus YJ016
MSSEIMSKRKSNETNKTWISKEWLIEQKSLIALLFLIVVVSFLNPNFFTVDNILNILRQTSVNAIIAVGMTLVILTAGIDLSVGSVLALCGAFAASLVAMEVPVLIAVPTALLAGASLGAISGVIIAKGKVQAFIATLVTMTLLRGVTMVYTDGRPISTGFTDTADAFAWFGTGYALGIPVPVWLMVVVFAAAWYLLNHTRFGRYVYALGGNESATRLSGINVDKVKIGVYAICGLLAALAGIIVTSRLSSAQPTAGMGYELDAIAAVVLGGTSLMGGKGRIMGTLIGALIIGFLNNALNLLDVSSYYQMIAKAAVILLAVMVDNKNK

SEQ ID NO: 40553 - DNA, 954 bp, Bacillus cereus ATCC 10987
  CDS (1)..(954): transl_table=11
atgaaacgcatgttaaaaatgcatgaaacgtctatcatactgttactactaatgtatatagctattataggaataataaaccctagttttattcaatttaactcgttatctttactgataaagtcaagcgttattttagtcgtgctagcaattggccaatcgttcgtcttatttacgaaaaatatagatgtatcagttggttcaagcatggggttaagtgcagcagtttgcggaatgttgttaacggatggatatcatgcatctttgtctatacttgctgctattttacttggcgctattctcggttttataaatggaattggtgttgcgaagtttcgggtaccggccattattatgacattaggtatgttaggggtcattagaggtgcgatgttaatctttacaggtggaaagtggattgaagatataccaaacgattttaagcaactgtcatcgatcatcacacttggtttgccgatcattgtatggattgttcttattattttactactactatacttctttttaaggaaagtgccatacggaaggtacttctatgcggttggtgataatgaagatggcgcgagacttattggtatacctgttaataaagtgaagatatatgcgtttataatttcaggcataagcgctgcgctcgctggttgcatatttgttatgaatatcggattcgttccaaatcaaacaggaactgggatagaactacaggttatcgcagctgctgtactaggaggagttcatttaaaaggaggaacgggttctatagttggagctgcattaggagcgatatttttagaggcgataagcagctcactcgtctttttaaaaataccagcattttggaataatgctatttcaggtttcttattattgctaatcgtcatattagatagcgttatgaaaaagtggaaggcagaaaggaggatgaatctatga

SEQ ID NO: 40554 - protein, 317 aa, Bacillus cereus ATCC 10987
MKRMLKMHETSIILLLLMYIAIIGIINPSFIQFNSLSLLIKSSVILVVLAIGQSFVLFTKNIDVSVGSSMGLSAAVCGMLLTDGYHASLSILAAILLGAILGFINGIGVAKFRVPAIIMTLGMLGVIRGAMLIFTGGKWIEDIPNDFKQLSSIITLGLPIIVWIVLIILLLLYFFLRKVPYGRYFYAVGDNEDGARLIGIPVNKVKIYAFIISGISAALAGCIFVMNIGFVPNQTGTGIELQVIAAAVLGGVHLKGGTGSIVGAALGAIFLEAISSSLVFLKIPAFWNNAISGFLLLLIVILDSVMKKWKAERRMNL

SEQ ID NO: 40555 - DNA, 1323 bp, Mycoplasma mobile 163K
  CDS (1)..(1323): transl_table=4
ttggaaaggaaaaaaatgaaacaaaatatgtttaataaatttaaacaaaatatttctgattctctaaatatttttacaaacaacattaaaaaaataaaaaaccatattttgaaaatatccttttttatttttattaacaaatatttaaaaataggattaaaacattttaacaagtattcaatgttttatatattagggctgatggtcttagtattttcgacagtttcaataggaaatggcttgactttttttagtccgaatcagtttgttaatttattaagaaataattcgtatatttttataattggtttaccaatgttgctagttattgtaagtggaaatatagatttaagtgttgggaggcttttaggattttctagtgcaattgctttaacactttttaataatgtaactggcggaaacatatttctaacaattattcttactttgttattaggagcaggggttggtattatccaaggtgttatgattggatactatagaattccagcattcattattactctgggggggatgctaatttttcaaggtcttgaattagttttaacaaatggtcaacctttaattgtcgattttgatacaagctttgtacaattttctcaagctccttttcctgattttaatttaggaactactcaaaatcctttttgaattatttcatttttaattttattagtaatcggatctttactagtagcttattcatttcaaagaagatttaaagcaaaaaaatataatttagaagttgaaaatctttttgtatttttgattaaacaattatttgttattggtttattctttgttctggctattttaacagcaatgtcaagaattggattacaattatttatgctttatattttaattttaattattttgtttgtaattttaactaaatatacaaaatttggtagatctatttatgctattggtgggaatagaaaagctgctgaattaagtggtattaatgctaaatttacaacatttgctatttttgtgatcatgggaattataacttcttttgctggtattatttttgcaggtaattttcaagcagctcaaccaaatggaactgcaggatttgaactaaatgtaatttcttcaatattcattggtggagctagtgttgctgggggaattggaacagttattggatccattatgggggcattaataatcgctacaattaatcttggtttagttgtaaatcaagttgaagctgcatttattaatattattacaggtattgttttagctgctgctgtaacttatgatattttctccaaacggaaaattggttaa

SEQ ID NO: 40556 - protein, 440 aa, Mycoplasma mobile 163K
MERKKMKQNMFNKFKQNISDSLNIFTNNIKKIKNHILKISFFIFINKYLKIGLKHFNKYSMFYILGLMVLVFSTVSIGNGLTFFSPNQFVNLLRNNSYIFIIGLPMLLVIVSGNIDLSVGRLLGFSSAIALTLFNNVTGGNIFLTIILTLLLGAGVGIIQGVMIGYYRIPAFIITLGGMLIFQGLELVLTNGQPLIVDFDTSFVQFSQAPFPDFNLGTTQNPFWIISFLILLVIGSLLVAYSFQRRFKAKKYNLEVENLFVFLIKQLFVIGLFFVLAILTAMSRIGLQLFMLYILILIILFVILTKYTKFGRSIYAIGGNRKAAELSGINAKFTTFAIFVIMGIITSFAGIIFAGNFQAAQPNGTAGFELNVISSIFIGGASVAGGIGTVIGSIMGALIIATINLGLVVNQVEAAFINIITGIVLAAAVTYDIFSKRKIG

SEQ ID NO: 40557 - DNA, 936 bp, Bacillus anthracis str. Sterne
  CDS (1)..(936): transl_table=11
atggctaagaaggggaatgtattacaacaacttgggtctttaattggactagcgctaattattgtagtaattacggctttaaatccagcgtttattgaaattccaaatttatttaatatactgcgtcaagtatcgattaatgcgcttattgcattcggaatgacctttgtaattttaacagggggtattgacttatcggtaggttctattttagcattatcaagtgcacttgttgctggaatgatggcaagtggcatggacccgttccttgcgatggcagttggattattagctggtcttgtaatgggaattgtaaacggtatcatcatagcgaagggaaaagtagctccgtttattgcgactttagcaacaatgactatttttcgcgggttgacgcttgtttatatggacggacgtccgatcactggtcttggtgatcatttaatgttccaaatgtttggccgcggttattttctcggtattccagtaccagctgttacaatgatgatcgctttcgcagtactgtacttcattttgaagaaaacgacatttggtcgccgtacatttgcaattggtggaaatgaagaagcagcagcattatcaggtattaatgttacgaaaattaaagtaatgatttacggtctttccggaattttggcagcgtttgcaggtattgtcttaacatcacgactagattctgcacagccgactgcaggtacttcttacgaattagatgcaattgcagcagttgtattaggtggaacaagtctttctgggggaagaggatggattgttggtacattcatcggtgtacttattatcggtgtactaaataacggtttaaatttattaggtgtatcttctttcttccaacaagttgtaaaaggacttgtaatcttactagctgtattaattgatcgtcgaaaagaagcgtaa

SEQ ID NO: 40558 - protein, 311 aa, Bacillus anthracis str. Sterne
MAKKGNVLQQLGSLIGLALIIVVITALNPAFIEIPNLFNILRQVSINALIAFGMTFVILTGGIDLSVGSILALSSALVAGMMASGMDPFLAMAVGLLAGLVMGIVNGIIIAKGKVAPFIATLATMTIFRGLTLVYMDGRPITGLGDHLMFQMFGRGYFLGIPVPAVTMMIAFAVLYFILKKTTFGRRTFAIGGNEEAAALSGINVTKIKVMIYGLSGILAAFAGIVLTSRLDSAQPTAGTSYELDAIAAVVLGGTSLSGGRGWIVGTFIGVLIIGVLNNGLNLLGVSSFFQQVVKGLVILLAVLIDRRKEA

SEQ ID NO: 40559 - DNA, 954 bp, Bacillus anthracis str. Sterne
  CDS (1)..(954): transl_table=11
atgaagcgcatgctaaaaatacacgaaatgtctatcataacgttactactaatttatatagctattgtcggaatgataaaccctagttttattcaatttaactcgttatctttaatggtgaaatcaagcgttattttagtcgtgctagcaatcggccaatcgttcgtcttatttacgaaaaatatagatgtatcagttggttcaagcatggggttaagtgcagcagtttgcggaatgttgctaacgaatgaatatagtgcatccttgtcgatatttgctgctattacacttggcgctattatcggtttcgtaaacgggatgggcgttgcgaagtttcgagtaccagccattattatgacattaggcatgttaggaattattagaggtgcgatgttgattttcacaggcgggaagtggattgaagatattccaaacgattttaagcagctgtcatctatcgtcattcttggtttacctataactgtatggttcgttcttattattttactactactatacttctttttaaggaaagtgccatttggaagatacttttatgcggtaggtgataatgaagatggcgcgagacttattggtatacctgttaataaagtgaagatatgtgcgtttataatttcaggcataagtgctgcactcgctggttgcatatttgttatgaatatcgggttcattccaaatcaaactggtacaggattagaattacaagtaatcgcagccgctgtactaggaggcattcatttaaaaggaggaacaggatctttatttggagctgcattaggagcattatttttagaaacaataagcagttcactcgtctttttaaaaataccagcattttggaataatgctatttcaggttttttattattacttatcatcatactggatagtgttatgaaaaagtggaaggcagaaaggaggatgaatctatga

SEQ ID NO: 40560 - protein, 317 aa, Bacillus anthracis str. Sterne
MKRMLKIHEMSIITLLLIYIAIVGMINPSFIQFNSLSLMVKSSVILVVLAIGQSFVLFTKNIDVSVGSSMGLSAAVCGMLLTNEYSASLSIFAAITLGAIIGFVNGMGVAKFRVPAIIMTLGMLGIIRGAMLIFTGGKWIEDIPNDFKQLSSIVILGLPITVWFVLIILLLLYFFLRKVPFGRYFYAVGDNEDGARLIGIPVNKVKICAFIISGISAALAGCIFVMNIGFIPNQTGTGLELQVIAAAVLGGIHLKGGTGSLFGAALGALFLETISSSLVFLKIPAFWNNAISGFLLLLIIILDSVMKKWKAERRMNL

SEQ ID NO: 40561 - DNA, 936 bp, Bacillus thuringiensis serovar konkukian str. 97-27
  CDS (1)..(936): transl_table=11
atggctaagaaggggaatgtattacaacaacttgggtctttaattggactagcgctaattattgtagtaattacggctttaaatccagcgtttattgaaattccaaatttatttaatatactgcgtcaagtatcgattaatgcgcttattgcattcggaatgacctttgtaattttaacagggggtattgacttatcggtaggttctattttagcattatcaagtgcacttgttgctggaatgatggcaagtggcatggacccgttccttgcgatggcagttggattattagctggtcttgtaatgggaattgtaaacggtatcatcatagcgaagggaaaagtagctccgtttattgcgactttagcaacaatgactatttttcgcgggttgacgcttgtttatatggacggacgtccgatcactggtcttggtgatcatttaatgttccaaatgtttggccgcggttattttctcggtattccagtaccagctgttacaatgatgatcgctttcgcagtactgtacttcattttgaagaaaacgacatttggtcgccgtacatttgcaattggtggaaatgaagaagcagcagcattatcaggtattaatgttacgagaattaaagtaatgatttacggtctttccggaattttggcagcgcttgcaggtgttgtcttaacatcacgactagattctgcacagccgactgcaggtacttcttacgaattagatgcaattgcagcagttgtattaggtggaacaagtctttctgggggaagaggatggattgttggtacattcatcggtgtacttattatcggtgtactaaataacggtttaaatttattaggtgtatcttctttcttccaacaagttgtaaaaggacttgtaatcttactagctgtattaattgatcgtcgaaaagaagcgtaa

SEQ ID NO: 40562 - protein, 311 aa, Bacillus thuringiensis serovar konkukian str. 97-27
MAKKGNVLQQLGSLIGLALIIVVITALNPAFIEIPNLFNILRQVSINALIAFGMTFVILTGGIDLSVGSILALSSALVAGMMASGMDPFLAMAVGLLAGLVMGIVNGIIIAKGKVAPFIATLATMTIFRGLTLVYMDGRPITGLGDHLMFQMFGRGYFLGIPVPAVTMMIAFAVLYFILKKTTFGRRTFAIGGNEEAAALSGINVTRIKVMIYGLSGILAALAGVVLTSRLDSAQPTAGTSYELDAIAAVVLGGTSLSGGRGWIVGTFIGVLIIGVLNNGLNLLGVSSFFQQVVKGLVILLAVLIDRRKEA

SEQ ID NO: 40563 - DNA, 990 bp, Bacillus thuringiensis serovar konkukian str. 97-27
  CDS (1)..(990): transl_table=11
ttgaatctcatttataaaactaagaaactatatttgcctactcatcttttttatcaatttagtacaattgctatcattataggtgttacaatttttttctctatcgtcaatgactcttttttaacatacaacaacattagtgatattttacgttctatttccatcgtaacgttactcgcaattggtgttacctttacattaattgtagatggatttgatttatcagttggctctaccgctagtttagcaacgattgccgctgcttcctgtctcattttatatcgacaagaactattagtcacactccttgttcctattctgtgtggactattagttggattattaaatgcactactcgttatccgaattaaactacctgatttactagctacattaagtatcatgtatatcgttaatggactacacttaacattttcaaaaggatcttctatttatgagggtatgtctgaggctaaaggacattttattccatcctttttatttatcggtcaaggttccgtgttaggaattccagtccctgtcattatcatgcttatcgtcgttttaattgcccatctatttttagaaaaaacaacgtacggtcgtttcttttatatgacaggtggaaatcgagaagctgctaggctagccggtatccctactgatcgttaccgtgtgtatgcttatatgattagcggtttactagcttctattggcggtattattctatgtagccgcgttggaacaggacaagtttcagctggtgcccccttattaatggatgcagtcgcagctgcctatatcggttatgcaatgttcggcgccaagaaaccaaatatagtcggaacatttctcggctcagtattaattggaattatattaaatggactcacaatgatgaacgtcccttattatgcacaagatatcattaaaggcagcattttaattacagctttagctttttcatttattaaaaagaaacgtaaataa

SEQ ID NO: 40564 - protein, 329 aa, Bacillus thuringiensis serovar konkukian str. 97-27
MNLIYKTKKLYLPTHLFYQFSTIAIIIGVTIFFSIVNDSFLTYNNISDILRSISIVTLLAIGVTFTLIVDGFDLSVGSTASLATIAAASCLILYRQELLVTLLVPILCGLLVGLLNALLVIRIKLPDLLATLSIMYIVNGLHLTFSKGSSIYEGMSEAKGHFIPSFLFIGQGSVLGIPVPVIIMLIVVLIAHLFLEKTTYGRFFYMTGGNREAARLAGIPTDRYRVYAYMISGLLASIGGIILCSRVGTGQVSAGAPLLMDAVAAAYIGYAMFGAKKPNIVGTFLGSVLIGIILNGLTMMNVPYYAQDIIKGSILITALAFSFIKKKRK

SEQ ID NO: 40565 - DNA, 954 bp, Bacillus thuringiensis serovar konkukian str. 97-27
  CDS (1)..(954): transl_table=11
atgaagcgcatgctaaaaatgcacgaaacgtctatcataacgttactactaatttatatagctattgtcggaatgataaaccctagttttattcaatttaactcgttatctttaatggtgaaatcaagcgttattttagttgtgctagcaatcggccaatcgttcgtcttatttacgaaaaatatagatgtatcagttggttcaagcatggggttaagtgcagcagtttgcggaatgttgctaacgaatgaatatagtgcatccttgtcgatatttgctgctattacacttggcgctattatcggttttgtaaacgggattggcgttgcgaaatttcgggtaccagccattattatgacattaggcatgttaggaattattagaggtgccatgttaattttcacaggcgggaagtggattgaagatattccaaacgattttaagcagctgtcatctatcgtcattcttggtttacctataactgtatggttcgttcttattattttactactactatacttctttttaaggaaagtgccatttggaagatacttttatgcagtaggtgataatgaagatggcgcgagacttattggtatacctgttaataaagtgaagatatgtgcgtttataatttcaggcataagtgctgcgctcgctggttgcatatttgttatgaatatcgggttcattccaaatcaaactggtacaggattagaattacaagtaatcgcagccgctgtactagggggcattcatttaaaaggaggaacaggatctttatttggagctgcattaggagcattatttttagaaacaataagcagttcactcgtctttctaaaaataccagcattttggaataatgctatttcaggttttttattattacttatcatcatactggatagtgttatgaaaaagtggaaggccgaaaggaggatgaatctatga

SEQ ID NO: 40566 - protein, 317 aa, Bacillus thuringiensis serovar konkukian str. 97-27
MKRMLKMHETSIITLLLIYIAIVGMINPSFIQFNSLSLMVKSSVILVVLAIGQSFVLFTKNIDVSVGSSMGLSAAVCGMLLTNEYSASLSIFAAITLGAIIGFVNGIGVAKFRVPAIIMTLGMLGIIRGAMLIFTGGKWIEDIPNDFKQLSSIVILGLPITVWFVLIILLLLYFFLRKVPFGRYFYAVGDNEDGARLIGIPVNKVKICAFIISGISAALAGCIFVMNIGFIPNQTGTGLELQVIAAAVLGGIHLKGGTGSLFGAALGALFLETISSSLVFLKIPAFWNNAISGFLLLLIIILDSVMKKWKAERRMNL

SEQ ID NO: 40567 - DNA, 969 bp, Erwinia carotovora subsp. atroseptica SCRI1043
  CDS (1)..(969): transl_table=11
atgagttctcaatctatcgcggcaaaacgctggtttagcaaagagtggttactggagcagaaatcgctgatcgcgctcctgatcctgattgcagttgtttccgccctgagccctaactttttcaccctgaataacctgttcaatattcttcagcagacgtcggtgaatgccattatggccgtcggcatgacgctggtgatactgacctcgggaattgatttgtcggtgggttcactgctggcgctgacgggggctgtagcggcatccatcgttgggcttgaagtgaatgcgctggtggctgtgtttggcgcactggcggtgggtgcgctgattggcgcgggcaccggtgtcatcgtttctaaaggtaaagtacaggcgtttatcgccacgctggtcatgatgctgctactgcgcggcgtgacgatggtctataccaacggtagcccggtgaatactggcttctccgacgttgcagatgcttttggttggttcggcattggtcgtccgctgggtattccgacgccaatctggattatggctatcgtattcgctgcggcctggtacatgctgcaccatacgcgcctgggtcgctatatctatgcgttgggcggtaacgaatccgcaacccgtttatccggcatcagcgttgataaaatcaagattattgtttattccctgtgtgggctgctgtctgccctggcgggaattattgaagtcgcacgtttgtcctctgcacagcctacggcgggtacagggtatgagctggatgctatcgcggctgtggtattgggcggcaccagtctggctgggggtaaagggcgtatcgttggcacgttgatcggcgcacttatccttggtttcctcaacaacggactgaatttattaggtgtttcttcttactaccaaatgatcgtcaaagcagtcgtcattttgctggcggttctggtagataacaaaagcagtaaataa

SEQ ID NO: 40568 - protein, 322 aa, Erwinia carotovora subsp. atroseptica SCRI1043
MSSQSIAAKRWFSKEWLLEQKSLIALLILIAVVSALSPNFFTLNNLFNILQQTSVNAIMAVGMTLVILTSGIDLSVGSLLALTGAVAASIVGLEVNALVAVFGALAVGALIGAGTGVIVSKGKVQAFIATLVMMLLLRGVTMVYTNGSPVNTGFSDVADAFGWFGIGRPLGIPTPIWIMAIVFAAAWYMLHHTRLGRYIYALGGNESATRLSGISVDKIKIIVYSLCGLLSALAGIIEVARLSSAQPTAGTGYELDAIAAVVLGGTSLAGGKGRIVGTLIGALILGFLNNGLNLLGVSSYYQMIVKAVVILLAVLVDNKSSK

SEQ ID NO: 40569 - DNA, 1182 bp, Erwinia carotovora subsp. atroseptica SCRI1043
  CDS (1)..(1182): transl_table=11
gtgctgaaaacatcgcagtctgaacaacaacatgtcgccggatctgtctcgatgctgcaacgactgaaaagcatcaatcttcaggtctatgtgatgattgccgccatcatcgcgatcatgctcttcttcacctatatgaccgacggggcgtacctcagcgcgcgtaatctttccaacctgctgaggcaaacggcaattactggcattctggccgtcggtatggtgtttgtcattatctccgccgagatcgatctgtcggtcggatcgatgatggggttattgggcggtgcggcggctatttttgatgtctggtttggctggcctttgccgctgaccattgttgtgacgctcgcgctgggattattgcttggcgcgtggaacggctggtgggttgcctaccggaaagtcccttcttttatcgtgacgctggcggggatgctggcttttcgcggcattttgatcggtattaccaatgggacaacggtttccccgaccagtgaggcgatgtcgcagattgggcaaagctatctgccttctggcatcggttttatgttcggtgctatcgggctgatggtgtttattggctggcagtggcgtcggcgtagtagccgtgctcggttagggttaccgataaatccacccgcaggggatgtcggccgccagacagtgacagcactagtcgtattgggcgcgatctatctgctgaatgactatcgtggcgtgccaacgccggttctggtgctgacgctgttgatgctgggcggtatttttctggcgacgcgaaccgcgtttggtcgtcgtatctatgccgtgggcgggaatatcgatgccgctcgcttatcgggagtgaatgtcgaacgcaccaaaatggcggtgttcgcgattaatggcctgatggtcgcggtcgctgggctgattctcagttcacgattgggggcagggtcgccatctgccgggaatattgccgagctggatgcgattgcggcctgcgtgattggcggaaccagtctggcgggcggtattggcagcgtggcgggcgcggttatgggggcatttatcatggcgtcgctggataacggaatgagcatgttggatgtgccgacgttctggcaatacgtcgtgaaaggcggaatcctgctcttggcggtgtggatggacaccgctaccaagcggcgcgtatga

SEQ ID NO: 40570 - protein, 393 aa, Erwinia carotovora subsp. atroseptica SCRI1043
MLKTSQSEQQHVAGSVSMLQRLKSINLQVYVMIAAIIAIMLFFTYMTDGAYLSARNLSNLLRQTAITGILAVGMVFVIISAEIDLSVGSMMGLLGGAAAIFDVWFGWPLPLTIVVTLALGLLLGAWNGWWVAYRKVPSFIVTLAGMLAFRGILIGITNGTTVSPTSEAMSQIGQSYLPSGIGFMFGAIGLMVFIGWQWRRRSSRARLGLPINPPAGDVGRQTVTALVVLGAIYLLNDYRGVPTPVLVLTLLMLGGIFLATRTAFGRRIYAVGGNIDAARLSGVNVERTKMAVFAINGLMVAVAGLILSSRLGAGSPSAGNIAELDAIAACVIGGTSLAGGIGSVAGAVMGAFIMASLDNGMSMLDVPTFWQYVVKGGILLLAVWMDTATKRRV

SEQ ID NO: 40571 - DNA, 1032 bp, Erwinia carotovora subsp. atroseptica SCRI1043
  CDS (1)..(1032): transl_table=11
atgtcccagcagccgctttctaagacgattacgccgcccaacacgcgtggacgttttgaccccattggcttttttgaacgctttggcgtgtttattttcatgattttgctgctgattttctttcagtcgcagaacagcaactttctgtccgaacgcaacatcaccaacatccttaccgaagtgtccatctacggcatcatggccgtagggatgacgttcgtcattttgaccgctgggatcgacctgtccgtcggctcgattctggcggtatgtgcaatcactgccgcgtcggtgattaaaggcgacaacttcaccaccgtcgatcccgatgcctggtacggcttgagctggctggtcgcgttgggcgtctgtctggcaatgggcacctttattggtttcttgcatggtttaggggtgaccaaactgcgtctgccaccgttcatcgtcacgctgggcgggatgaccatctggcgcggattaacgctggtgatgaacgatggtgcgccgattgcgggctttgaccccggctatcgctggtggggacggggagagatcctcggtatttcggtgccgatctggatcttcgcgctggtcgccttactgggctatctggcgctgcataaaacccgctggggacgctttgtgtacgccatcggtggcaacaccgaagcggcgcgattggctggtgtgaatgtgcagcgtgtactcgtcagcgtctacgtggtgattggctgcctggctggactggcgggctttattctcagcgctcgtctcggcagcgcagaagcggtcgcggggatcaccttcgaactgcgcgtcatcgcctcggtggtgatcggtggcacctcgctgatgggcggctatggccggatcagcggcacgattatcggctcgatcatcatgggaattctgattaacggactggtattgatgaacgtatcggcctattaccagcagattatcaccgggttaattatcgtgctggccgtggcgttcgacacctatgccaagagccgtcgcggcgctatctga

SEQ ID NO: 40572 - protein, 343 aa, Erwinia carotovora subsp. atroseptica SCRI1043
MSQQPLSKTITPPNTRGRFDPIGFFERFGVFIFMILLLIFFQSQNSNFLSERNITNILTEVSIYGIMAVGMTFVILTAGIDLSVGSILAVCAITAASVIKGDNFTTVDPDAWYGLSWLVALGVCLAMGTFIGFLHGLGVTKLRLPPFIVTLGGMTIWRGLTLVMNDGAPIAGFDPGYRWWGRGEILGISVPIWIFALVALLGYLALHKTRWGRFVYAIGGNTEAARLAGVNVQRVLVSVYVVIGCLAGLAGFILSARLGSAEAVAGITFELRVIASVVIGGTSLMGGYGRISGTIIGSIIMGILINGLVLMNVSAYYQQIITGLIIVLAVAFDTYAKSRRGAI

SEQ ID NO: 40573 - DNA, 1098 bp, Erwinia carotovora subsp. atroseptica SCRI1043
  CDS (1)..(1098): transl_table=11
atgaaaacgactcaccttccggcagcgtcgggcgcgctatcaccgggtaagtttgtacgctcacgagagagcatcctgctgttgatcctcaggctgcgcacgttcatcgcgctgttcctgattctggggttctttgctttcacggtgcccgggtttttggcgacaggtagcctgatcatcatggtgaagcacattgctatcaacgcgtttctggcattagggatcacgtttgtcatcattaccgccgggattgacctgtcaatcggagccacgctggggctgtgtggcatggtggcgggttacatgattacgcagggcattgtgctgcccatgttcggcatcgcgattttccccagcgtgtgggtcattgtgcctgtcgtattggtgattggtgcgctcattggtgccatcaacggctggattatcacgcggtataacgttgcgccctttatctgcacgctgggcacgatgtatatcgtgcgtggggcatcaatgctgatttccggtggggaaacgttcccaggcttaggtggtaacccgcagttgggtaataccggctttgagctgattggttccggcacgattttaggattgccgctcgctatctggctgatgttggtactggctctggtgattgcctatgtggcacgtcgcctgccgtttggccgccatgtctatgcgattggcgacaacgagcgtgccgctgagctttccggcgtcaaggttcgtcaggtcaaagtctgggtctacacaatttccggcttctgcgcggctatcgcgggcatcgtggtgtcctctcagttggtcgccagccatccggcgacgggcaccgcttttgaaatgaacgcgattgctgctgtggttctcggcggaacgtcattagcgggcggacgcgggactattctgggtacgctgattggcgcgtttgtcatcgggattcttgccgacgggctggtcatgatgggcgtgagtgaattctggcagatggtgattaaaggcatcgtcattattgtggctgtgattatcgaccagatgcaaaaccgtatgcagcacagggccgcaattgtgtcacagaaggccgcggcggaaggcgcttag

SEQ ID NO: 40574 - protein, 365 aa, Erwinia carotovora subsp. atroseptica SCRI1043
MKTTHLPAASGALSPGKFVRSRESILLLILRLRTFIALFLILGFFAFTVPGFLATGSLIIMVKHIAINAFLALGITFVIITAGIDLSIGATLGLCGMVAGYMITQGIVLPMFGIAIFPSVWVIVPVVLVIGALIGAINGWIITRYNVAPFICTLGTMYIVRGASMLISGGETFPGLGGNPQLGNTGFELIGSGTILGLPLAIWLMLVLALVIAYVARRLPFGRHVYAIGDNERAAELSGVKVRQVKVWVYTISGFCAAIAGIVVSSQLVASHPATGTAFEMNAIAAVVLGGTSLAGGRGTILGTLIGAFVIGILADGLVMMGVSEFWQMVIKGIVIIVAVIIDQMQNRMQHRAAIVSQKAAAEGA

SEQ ID NO: 40575 - DNA, 987 bp, Erwinia carotovora subsp. atroseptica SCRI1043
  CDS (1)..(987): transl_table=11
atgtcaacggttacgtctgcaacctcagaaaagaagaaaaacggtatgggattgtcccgcatttgggataactacggcatgctggtggtttttgccgtgctgtttcttggctgtgcgattttcgtcccaaatttcgcctcatttatcaatatgaaagggttgggactggcgatctccatgtccggtatggtggcctgcgggatgctgttctgtctggcttctggtgattttgatctatctgtggcttcgattatcgcctgttccggggtggcgacggcggtggtgattaatatcagtgaaagtctgtggatcggcgtcggtgctgggctgctgctgggcgtggcattcggtttacttaacggcttcgtgattgcccgtttgaagatcaacgcactgatcacgacgctggcgaccatgcagattgcacgcggtctggcgtacattatttctgatggtaaagcggtagggattgaagatgagcgtttcttcgcattgggttatgccaactggctgggcttgcctgcgccaatttggatcaccatcggctgtatgatcctgtttggcctgttgctgaacaagaccacgtttggccgcaatacgctggcgattgggggaaatgaggaagcggcgcgtttggccggggtgccggttgtacgtaccaagatcatcatttttgccttgtccggtctggtatccgccgcggcgggaatcattttggcttcgcgtatgaccagcggccagccgatgacgtccatcgggtatgagctgatcgtcatttctgcctgtgtgctgggtggcgtatcgctgaaaggcgggatcggcaaaatttcctacgtggtggctggcgtactgattttaggtacggtggaaaacgcgatgaacctgctaaatatttctcctttctctcagtatgtggtgcgcggtcttattttgctggcggcggttatcttcgaccgttacaaacagctggcgaagaaaacggtataa

SEQ ID NO: 40576 - protein, 328 aa, Erwinia carotovora subsp. atroseptica SCRI1043
MSTVTSATSEKKKNGMGLSRIWDNYGMLVVFAVLFLGCAIFVPNFASFINMKGLGLAISMSGMVACGMLFCLASGDFDLSVASIIACSGVATAVVINISESLWIGVGAGLLLGVAFGLLNGFVIARLKINALITTLATMQIARGLAYIISDGKAVGIEDERFFALGYANWLGLPAPIWITIGCMILFGLLLNKTTFGRNTLAIGGNEEAARLAGVPVVRTKIIIFALSGLVSAAAGIILASRMTSGQPMTSIGYELIVISACVLGGVSLKGGIGKISYVVAGVLILGTVENAMNLLNISPFSQYVVRGLILLAAVIFDRYKQLAKKTV

SEQ ID NO: 40577 - DNA, 996 bp, Erwinia carotovora subsp. atroseptica SCRI1043
  CDS (1)..(996): transl_table=11
gtgagtcacccactttcatctaacggggcgatccccttccgtcaccacgttttcgagtttctctataagtggggcatgctgatcacggtcgtcgcactgattgcactttttggactcgcgtcggaaaattttctcgacccgtataacatcatcaatattttgcgttctatcgccatcgtcacggtgattgcgattggcgtctccatttcactgtccgttggcgggtttgacctttccgtgggatcaacggcatcgttggccaacgctctggttatctccctctttgtctggcatgggttcggcaccactggcgcgattgttttgacgctcctgctgtgtacgctggtcgggctattcaacgcttttctcatcgttgtgctgaagattcccgatatgctggcgacgctcgccagtctgttcgtcattcagggcgtggcgatgacgtacagctatggcggttccatcacgcagaacatggtgttgcccagtggtgaaatggcagaaggtgtcattcctgagttctttgccacgctaggtcaggtgccggtgattgttgtcattatgctggcggtgacggtactggtgcagttgtatctgtcccttaccaagcacggtcgccggatgtatgccatcggcggcaacccagaagccgctcgactggcgggcattcgcacagcgcgttatcgggtacaggcgtatgtattctcttccttactcgcagcgctgggcggcatcctactcgcatcacgcatcggttcttcacaggtcaatgctgggggcggctatttaatggatgctgttgctgcggcatatatcggtttctcactggcgggatccggtaagccgaatgcgctgggtacactgctcggtgccgtcattcttggcgtcttgcagaatggtcttgtgatgctctccgtgccttattacgccatggatatcatcaaaggtctggttctcgcgctcgcgttggcaatgacgtatatccagaaacgctga

SEQ ID NO: 40578 - protein, 331 aa, Erwinia carotovora subsp. atroseptica SCRI1043
MSHPLSSNGAIPFRHHVFEFLYKWGMLITVVALIALFGLASENFLDPYNIINILRSIAIVTVIAIGVSISLSVGGFDLSVGSTASLANALVISLFVWHGFGTTGAIVLTLLLCTLVGLFNAFLIVVLKIPDMLATLASLFVIQGVAMTYSYGGSITQNMVLPSGEMAEGVIPEFFATLGQVPVIVVIMLAVTVLVQLYLSLTKHGRRMYAIGGNPEAARLAGIRTARYRVQAYVFSSLLAALGGILLASRIGSSQVNAGGGYLMDAVAAAYIGFSLAGSGKPNALGTLLGAVILGVLQNGLVMLSVPYYAMDIIKGLVLALALAMTYIQKR

SEQ ID NO: 40579 - DNA, 963 bp, Erwinia carotovora subsp. atroseptica SCRI1043
  CDS (1)..(963): transl_table=11
atgttgaaacgccacttccccctgttgatgacgattctggtatttattgctggttatctgttttgcctcagccaatttcccggttttgcttcgacgcgagttttctttgatttactgacggataacgcctttctggggatcgtggcggttgggatgacgtttgtcattctgtctggcgggatcgatctctccgttgggtcagttattgcatttactggtgtgctattggccaaattgatcggtacgtatggaattgatcctttctttgcgttcgcaattgcactggtaatgggagccatgtttggcgggttgatgggatggattatcgatacgctgaaattgcctgcatttattatcacgcttgccggtatgttctttgtccgagggatgagctttatcgtttcacaggagtcgattcccatcgatcatccggtctatagccaattggcgggtttagcatggcgcatgcctgatgggggacgatttacctttctggcgttagttatgttggttgtggtgctactggggattgtaatggcgcatcgtacccgcttcggtaaccgtgtttatgctataggcggtaacagctattctgcggagctgatgggagtgcctgttaggcgaacgacgattcatatatacatgctttccagtatgttagcggtgctgtcaggcattgttttttcgctctatacctcagcgggttatgctctggcagcaagcggtgtggagttggacgccatcgctgctgtcgtgatcggcggtacgctactgaccggtggtgtcggaacggtattgggaaccctgtttggcgtactgattcagggcctgattcaaacgtatatcacatttgacggcaccttgagctcatggtggacaaaaatcgtcatcggtttcctgctgtttgctttcattgggttacagaaagcgttaagcacattctggttagccagacgtgcttaa

SEQ ID NO: 40580 - protein, 320 aa, Erwinia carotovora subsp. atroseptica SCRI1043
MLKRHFPLLMTILVFIAGYLFCLSQFPGFASTRVFFDLLTDNAFLGIVAVGMTFVILSGGIDLSVGSVIAFTGVLLAKLIGTYGIDPFFAFAIALVMGAMFGGLMGWIIDTLKLPAFIITLAGMFFVRGMSFIVSQESIPIDHPVYSQLAGLAWRMPDGGRFTFLALVMLVVVLLGIVMAHRTRFGNRVYAIGGNSYSAELMGVPVRRTTIHIYMLSSMLAVLSGIVFSLYTSAGYALAASGVELDAIAAVVIGGTLLTGGVGTVLGTLFGVLIQGLIQTYITFDGTLSSWWTKIVIGFLLFAFIGLQKALSTFWLARRA

SEQ ID NO: 40581 - DNA, 978 bp, Propionibacterium acnes KPA171202
  CDS (1)..(978): transl_table=11
gtgactactacatcaaccgctactacgcaaagaccgtcagttggcaggaaagttggttcctggtcccttaatcacggtgctctcgtaggccttattattctctgtattgctctgtttattgcgactccagtattcctcactgtgccgaatatcattaatatcggaatccaagccgcggtggtggcgattatggccttcggtatgaccttcgtcatcgttacctccggcattgatttgtctgtgggttcggtcgcagctctttcagccatggtctcagcatggatgttctctaacgctggtctgccaagctggctcacccttatcatcggcctgctaatcggactgcttgctggagctgtttccggtctggccatcgcctatggcaagttgcctgcctttatcgccacgctggccatgatgagcgtcgcacgcggactaactcttgttatctctggcggcacccccgtcgccacctctgacgcagtgaaccagctgggtgctgatgttgggccaattccggtgcctgtcatcatgctcgccctagccggtgtggtgtgctggttcatgctgtcgcgtacggtgctggggcgttctctctatgccattggtggtaacgaagaggctgctcgtctctccggtattccggtgcgtcgcatcctcgtcactgtctacgctctggccggtgtttttgctggcctagctggtctggtgttggctggtcggctctcctcagcccagcctcaggcggggttcgggtatgagcttgatgccattgcagctgtcgttattggtggagcctcattgtcaggaggttctggaaaggcaagcggcacttttattggtgctgttttactagccgttattcgtaacggtcttaatattcttaacgtttcctcgttctggcagcaggttgttatcggctgcgttatcgcgctggctgtcggattcgatgtcttcaggtctaagaaagaatcctga

SEQ ID NO: 40582 - protein, 325 aa, Propionibacterium acnes KPA171202
MTTTSTATTQRPSVGRKVGSWSLNHGALVGLIILCIALFIATPVFLTVPNIINIGIQAAVVAIMAFGMTFVIVTSGIDLSVGSVAALSAMVSAWMFSNAGLPSWLTLIIGLLIGLLAGAVSGLAIAYGKLPAFIATLAMMSVARGLTLVISGGTPVATSDAVNQLGADVGPIPVPVIMLALAGVVCWFMLSRTVLGRSLYAIGGNEEAARLSGIPVRRILVTVYALAGVFAGLAGLVLAGRLSSAQPQAGFGYELDAIAAVVIGGASLSGGSGKASGTFIGAVLLAVIRNGLNILNVSSFWQQVVIGCVIALAVGFDVFRSKKES

SEQ ID NO: 40583 - DNA, 1350 bp, Leifsonia xyli subsp. xyli str. CTCB07
  CDS (1)..(1350): transl_table=11
atgagcacacagatccccgcgaagaagaagtcgggcggtatccgcgacctgggcaagatgttcggcggcgggcagtcgactggacggcagttcggcatcctgggcgcgctcgtcgtcatcgtcgtcctgttccagatcctgacggacgggaagacgctcgacccggtcaacctcatcaacctggtcaaccagaacgcgtacgtgctgatcctggcgatcggcatggtcatggtgatcatcgccgggcacatcgacctgtcggtgggctcggtcgcggcggcggtcggcatcgtcgtggccaaggcgatgaccgagtggcacgtaccgtggcctctcgccgtcctgctcggtctcgtcatcggcgtggccatcggcgcgtggcagggctggtgggtggcttacatcggcgtgcccgcgttcatcgtgacgctggccggcatgctgatcttccgcggcctgaaccagctgatcggcagcgcgaacaccatcccggtgccggacggcttcaccttcatcggcggcggtttcctccccgagtggggaccggacaccggctacaacaactccacactgctgctcggcctgatcatcgccatcgtcatcgtgctgcttgagatgcgcacccgccgtacgcagaccaaaatgggctccgacaaggctccgctctgggtgagcacgttcaaggtcatagtgctggacgccctggtcgtctacttcaccttcctcttcgcgggaggtcgcgtcggcacctcgttcccggtctccggcatcatcctgggcgtcctgatcatcgtctactcgttcgtcacgcgcagcacgatcttcggccggcacatctacgcggtcggtggcaactcgcacgctgcggaactgtcgggtgtgaagatcaagcgcgtcaacttcttcgtgatgatgaacatgtcggtgctcgccgcgctcgccggaatgatcgccgtcgcccgctcggtctcctccggcccgcaggacggcctcggctgggagctcgacgcgatcgccgctgtgttcatcggtggtgccgcggtctccggcggcatcggcaccgtcgccggttctatcgtcggtggtctcgtgatcgccgtcctgaacaacggccttcagctgcttggcgtcacgagcgactgggtgcaggtcatcaagggcctcgtgctgctgatcgcggtcggtgtcgacgtctactcgaaccgccgtggcggtccatcgctcatcggccggctcttcggcggcggtcgccgccctgagtctgcgacggacgctgtcggcatcgaccagcccgccgtcctcccgacctccagcgccgccgaagagtcgtcgcgctcgctcacgaactga

SEQ ID NO: 40584 - protein, 449 aa, Leifsonia xyli subsp. xyli str. CTCB07
MSTQIPAKKKSGGIRDLGKMFGGGQSTGRQFGILGALVVIVVLFQILTDGKTLDPVNLINLVNQNAYVLILAIGMVMVIIAGHIDLSVGSVAAAVGIVVAKAMTEWHVPWPLAVLLGLVIGVAIGAWQGWWVAYIGVPAFIVTLAGMLIFRGLNQLIGSANTIPVPDGFTFIGGGFLPEWGPDTGYNNSTLLLGLIIAIVIVLLEMRTRRTQTKMGSDKAPLWVSTFKVIVLDALVVYFTFLFAGGRVGTSFPVSGIILGVLIIVYSFVTRSTIFGRHIYAVGGNSHAAELSGVKIKRVNFFVMMNMSVLAALAGMIAVARSVSSGPQDGLGWELDAIAAVFIGGAAVSGGIGTVAGSIVGGLVIAVLNNGLQLLGVTSDWVQVIKGLVLLIAVGVDVYSNRRGGPSLIGRLFGGGRRPESATDAVGIDQPAVLPTSSAAEESSRSLTN

SEQ ID NO: 40585 - DNA, 1128 bp, Yersinia pseudotuberculosis IP 32953
  CDS (1)..(1128): transl_table=11
atgatgaaagcaacaactggcacggcgttggcgagtcacctgcccggtggagcgtcatggtcacgggaaaatatgctgctgcttctgttaaagatgcgcacctttattgccctgtttctgatcctgggtttcttttcaatcatggtccctgggttcttagccacggggagtttgatcatcatggtgaagcatattgcgattaatgccttcctcgcattaggcatcacctttgtcattatcaccgcaggtatcgatctctccatcggcgcgacgctggggctgtgcggcatgattgccggttggatgatcacccaaggcattgtcttgccgatgtttggcatcgctatcttccccagtgtttgggttgtggttccggtggtgttagttatcggggcactcattggtgcggttaatggctggatcattactcgctacaacgtcgccccgtttatttgcacccttggcaccatgtatgtggtgcgaggggcctcgatgttgatctctggtggcgaaaccttccccggcttacaaggcaatccgcaactggggaataccggttttgacctgctgggatcgggaacgctactggggttgccgatcgccatctggattatgttcattctggcgctggtgattgcttacgttgcccgccgccttccgtttggccgccatgtttatgccatcggggataacgaacgcgctgctgaactttctggtgtcaaagtgcgtcaggtgaaagtctgggtttacaccctatccggcttctgtgccgcgatagcggggattatcgtgtctgcccaattggttgccagccacccggccaatggcagtggcttcgaaatgaatgctatcgccgctgttgttctgggcgggacatcgctggcaggcgggcgggggaccattcttggtacgctgattggcgcttttgttatcggcatcttggctgatgggctggtgatgatgggcatcagtgaattctggcaaatggtgatcaaaggcatcgtgattatcgtggccgtgattatcgatcagatgcaaaaccggatgcagcacaaggcggcgattgtgtcgcaaaaagtgaccgccatcccctctgacatcacctctcaggcggtaaaaagtgagtag

SEQ ID NO: 40586 - protein, 375 aa, Yersinia pseudotuberculosis IP 32953
MMKATTGTALASHLPGGASWSRENMLLLLLKMRTFIALFLILGFFSIMVPGFLATGSLIIMVKHIAINAFLALGITFVIITAGIDLSIGATLGLCGMIAGWMITQGIVLPMFGIAIFPSVWVVVPVVLVIGALIGAVNGWIITRYNVAPFICTLGTMYVVRGASMLISGGETFPGLQGNPQLGNTGFDLLGSGTLLGLPIAIWIMFILALVIAYVARRLPFGRHVYAIGDNERAAELSGVKVRQVKVWVYTLSGFCAAIAGIIVSAQLVASHPANGSGFEMNAIAAVVLGGTSLAGGRGTILGTLIGAFVIGILADGLVMMGISEFWQMVIKGIVIIVAVIIDQMQNRMQHKAAIVSQKVTAIPSDITSQAVKSE

SEQ ID NO: 40587 - DNA, 1029 bp, Yersinia pseudotuberculosis IP 32953
  CDS (1)..(1029): transl_table=11
atgctacagccgctttccaagccccaggcatcggtaaaaagcgcgatgcgttttgacccgatcactttttttgaacgcttcggcgtcctgatttttatgttcctgctgctgattttcttccaattgcagaacagtaattttctctcagaacgcaatattttcaacatcctaactgaggtatccatctacggcatcatggccgtgggcatgaccttcgttatcctgaccgcgggtattgatctttccgtcggctcaattcttgcggtgtccgccatgacagccgcttatgtgattaaaggcgataactttaccaccattgaccccaacgcttggggcggcatgagttggctaattggcctcagtatttgtctggcaatgggcacccttattggttttttgcagggcttgggggtcacgcgtctgcgtctgccgccctttattgtcaccctgggtgggatgaccatctggcgtggcctgacgttggtgattaacgacggtgcccctatcgccgggtttgatgcaggctaccgctggtgggggcgcggggacttactcggtatttcaatacccatttggatttttgccattgtcgcgatagccggttatctggcgctgcacaaaacccgctgggggcgtttcgtctatgcgattggcggtaatcctgaagcggcacgtttggcgggagttaatgtgaaacgcgtgctggtcagcgtctacgtggtgatcggctgccttgccgggttggcgggtttcatcctaagcgcccggctgggcagtgctgaagcggtagccgggatctcgtttgaattgcgggtgattgcctcggtggtgattggcggcacttcactgatgggcggctacgggcgtatcggcggcaccattattggctccatcatcatggggatcttgattaacggtttggtgctgatgaatgtttcggcttactaccagcaaattatcaccggcctgatcatcgtattggcggtggcctttgatacctacgccaagaaccgtcgcggcgcgctgtaa

SEQ ID NO: 40588 - protein, 342 aa, Yersinia pseudotuberculosis IP 32953
MLQPLSKPQASVKSAMRFDPITFFERFGVLIFMFLLLIFFQLQNSNFLSERNIFNILTEVSIYGIMAVGMTFVILTAGIDLSVGSILAVSAMTAAYVIKGDNFTTIDPNAWGGMSWLIGLSICLAMGTLIGFLQGLGVTRLRLPPFIVTLGGMTIWRGLTLVINDGAPIAGFDAGYRWWGRGDLLGISIPIWIFAIVAIAGYLALHKTRWGRFVYAIGGNPEAARLAGVNVKRVLVSVYVVIGCLAGLAGFILSARLGSAEAVAGISFELRVIASVVIGGTSLMGGYGRIGGTIIGSIIMGILINGLVLMNVSAYYQQIITGLIIVLAVAFDTYAKNRRGAL

SEQ ID NO: 40589 - DNA, 999 bp, Yersinia pseudotuberculosis IP 32953
  CDS (1)..(999): transl_table=11
atggataaggcaaccgagacccgccgcgggggagcacctaccgcgagcaaactcaacggccaggccatgctgggctgggttttacaccatattgtctggatctggctgattgcactggttgtcatctttggtgtcttcaatgaatttttcctgacgatatccaatctgcaaaacgtgatggtgcaggccacggttttgggaaccttagggctggcggtggcactgccgctgctggtggctgagattgacttgtcgattccggcaaatgcgggtttctcggcggcggtgggggcgatggcttatgccgaactggggctgccgtggcctattgcagcattaataggtttactggttggcacatttatcggtttcttcaatggggtgtgcatcacccgattgaaaatggtctcgctgatagagacgttggcgatgatgattattatccagggcgcgctgttggcgctgacacagggcaagaccctgacaaacctttctgaaggttatatttggattggccaggcgaccatcggggggtggcccctgatgccggtggtgtttcttctggtgctggcggtgatgggggcggtgctgaagtatacggtgttaggccgttcgatctatgccgtcggtggtaatcctgttgcgtcaaactccgccgggattcgggtcgcgcgggtcaaaattattgcttacacgatttcagggttccttgccgcacttgctggctttttgttggcatcgtggcagatggccatcacctcaaaccaaggctcgagctacttgctctacgccattgccgcgcccattatcggcggcgtcagtgtttttggtgggcacggtaacgtcaagggggtgctgggcggtgtgctgctgctgacggtgatccaagttggcctcgccattgtcaatgtcccttcgttctatgtcggcatgattggcggggtgatcatttttatcgctgtcgccattgatgctttccggatccgttacttcggatag

SEQ ID NO: 40590 - protein, 332 aa, Yersinia pseudotuberculosis IP 32953
MDKATETRRGGAPTASKLNGQAMLGWVLHHIVWIWLIALVVIFGVFNEFFLTISNLQNVMVQATVLGTLGLAVALPLLVAEIDLSIPANAGFSAAVGAMAYAELGLPWPIAALIGLLVGTFIGFFNGVCITRLKMVSLIETLAMMIIIQGALLALTQGKTLTNLSEGYIWIGQATIGGWPLMPVVFLLVLAVMGAVLKYTVLGRSIYAVGGNPVASNSAGIRVARVKIIAYTISGFLAALAGFLLASWQMAITSNQGSSYLLYAIAAPIIGGVSVFGGHGNVKGVLGGVLLLTVIQVGLAIVNVPSFYVGMIGGVIIFIAVAIDAFRIRYFG

SEQ ID NO: 40591 - DNA, 1011 bp, Yersinia pseudotuberculosis IP 32953
  CDS (1)..(1011): transl_table=11
atgaatgtgttaaataagaaagatatgctcacttactttaaagagagcgggatttatgtggtgttgtttgtgctattggcaattattattatcaaggatccgacttttttaagtttgatgaatttaagtaacattctgactcaatcttcggtgcgtattattatcgcgttaggggtcgcgggtttgattgttacccaaggcacggatttgtccgcaggtcgtcaggtagggttagccgcagtggtcgctgcgacaatgctacaatcgatggataacgtgaataaagttttcccggacttgcagactgtacctattccagtggtcattctcgttgtctgcctgattggggcggttattggtttgattaacggtataattattgcgtacctgaatgtgactccatttattaccacattaggcactatgattatcgtttatggcgttaactcgctgtattacgattttgtcggtgcttcaccgattgccggttttgatcctgctttttcgacttttgctcaaggtttcttgcggtttggtgattttaaactgtcctatattaccttttacgccttaatagcaattatgtttgtatgggtactgtggaataagacccgttttggcaagaatatttttgctattggcggcaacccggaggcggcgaaagtctctggtgtgaatgtgccactgaatttgatcatgatttatgcattgtcgggggtgttctatgcctttggcggtatgctggaagcagggcgtatcggcagtgcgacgaacaatctcggatttatgtatgagctagatgcgatagcagcctgcgtggtgggtggggtgtccttcagtggtggcgtcggtaccgtgatcggcgtggtgaccggggttatcatcttcactgtcattaactatgggctcacgtatattggtgtgaacccgtactggcaatacattatcaagggcgggattatcatctttgcggttgcgttggattcactgaagtatgcgaagaagaaatag

SEQ ID NO: 40592 - protein, 336 aa, Yersinia pseudotuberculosis IP 32953
MNVLNKKDMLTYFKESGIYVVLFVLLAIIIIKDPTFLSLMNLSNILTQSSVRIIIALGVAGLIVTQGTDLSAGRQVGLAAVVAATMLQSMDNVNKVFPDLQTVPIPVVILVVCLIGAVIGLINGIIIAYLNVTPFITTLGTMIIVYGVNSLYYDFVGASPIAGFDPAFSTFAQGFLRFGDFKLSYITFYALIAIMFVWVLWNKTRFGKNIFAIGGNPEAAKVSGVNVPLNLIMIYALSGVFYAFGGMLEAGRIGSATNNLGFMYELDAIAACVVGGVSFSGGVGTVIGVVTGVIIFTVINYGLTYIGVNPYWQYIIKGGIIIFAVALDSLKYAKKK

SEQ ID NO: 40593 - DNA, 1050 bp, Yersinia pseudotuberculosis IP 32953
  CDS (1)..(1050): transl_table=11
atgtctagcgttactttgagttcggataaaaagaacccggtatcaactgaatcaaaaggtgggatcccacaacctcagcaaccacagaatgcgccgactaaaagtggcttaggattatcccgtatctgggacagctacggcatgctggtggtcttcgccgtggtctttattggttgcgtgatttttgtgcctaattttggctcctttatcaatatgaaagggttggggctggctatctcaatgtctgggatggtggcgtgcggtatgcttttttgtttggcatccggcgattttgacctctctgtggcctcggtcattgcctgcgcgggtgttaccaccgcggtggtgatcaatatgacagagagcctatggataggggtgggcgcaggtttgttattaggggcggcatgtgggctaattaatggttttgtgattgcccggctaaaaatcaatgcgctgatcaccacattggcgacgatgcaaattgttcgtggcctggcgtatatcatttctgatggtaaagccgtgggtatcgaagatgagcgcttcttcgccttgggttataccaactggtttggtctgccagcacccatctggatcaccgttgcctgtttggtgctgtttggtttcttactgaataaaaccacctttggccgtaacacgttggcgattggggggaatgaagatgctgcgcgtctggccggtgtgccggtcgtgcggaccaaaatcattatttttgtgctgtcaggtttggtgtctgccgccgcagggattattttggcttcacgcatgacgagcggccagccaatgacctcgattggttatgagctcattgttatctctgcttgcgtattaggcggggtatcactaaaaggcggcattggtaaaatttcttacgtcattgcggggatcttgattctgggaacagtagaaaatgccatgaacctattaaatatctccccgttctcacaatatgtggttcgtggtttgatcctgctggcggcggttatcttcgaccgttacaaacagttagctaaacggacgatataa

SEQ ID NO: 40594 - protein, 349 aa, Yersinia pseudotuberculosis IP 32953
MSSVTLSSDKKNPVSTESKGGIPQPQQPQNAPTKSGLGLSRIWDSYGMLVVFAVVFIGCVIFVPNFGSFINMKGLGLAISMSGMVACGMLFCLASGDFDLSVASVIACAGVTTAVVINMTESLWIGVGAGLLLGAACGLINGFVIARLKINALITTLATMQIVRGLAYIISDGKAVGIEDERFFALGYTNWFGLPAPIWITVACLVLFGFLLNKTTFGRNTLAIGGNEDAARLAGVPVVRTKIIIFVLSGLVSAAAGIILASRMTSGQPMTSIGYELIVISACVLGGVSLKGGIGKISYVIAGILILGTVENAMNLLNISPFSQYVVRGLILLAAVIFDRYKQLAKRTI

SEQ ID NO: 40595 - DNA, 1062 bp, Yersinia pseudotuberculosis IP 32953
  CDS (1)..(1062): transl_table=11
atgaacgagagaacccaaatgctgcatacggcacgctctacaccggccaaaagcgctgataagccgcgttatctgaagctttcgcgcttattactggaagggcgcgccttctttgcattattggtcattattgccgtgttttcactcctctcacccaactacttttctggcgcaaatttcctgacgatggcctcacatgtggcgatatttggcctcccggcgattggaatgctactggttattcttaatggtggaatcgatctttctgttggttcgacattgggtctgtctggcgtattcgcgggttttttaatgcaaggcatcagcattgagtcacttggcgtagtgctttatttgccggtctgggcggtggtaattatgaccctggcgctgggcgcattggttgggcttatcaatggcatcttgatcgccatttttcgggtacctgcttttgtggcaacactcggttcactctatgtagcacgtggcgcggcactgctgatgaccaatggcttaacctacaacaaactcgcgggtagccccgagctaggtaataccggttttgactggttgggatttaatcgcctctttaatattccgattggcgtgctggctctgggcgtcgtggcactggcctgtggatttttactgatgcgtaccgcatttggtcgctggttgtatgcctcgggaggcaatgagcgtgccgcggatctctcgggtgttccggttaaattcgtcaaaatcagcgtttatgttctctccggggtttgtgcggcactggccgggttggtgctctcttcgcagttaacctccgcaggcccgacagcgggcaccacgtatgagttgaccgccattgcggcggtggtgattggcggtgcggcgctgaccggagggcgtggcaacgttcgaggcacactacttggggcttttgttattggctttctttccgatggcttggtgattattggcgtatccgcctattggcagaccgtatttactggtgcggtgattgttatggcggtattgctcaatacgttgcagtacggccgacgaagtaaataa

SEQ ID NO: 40596 - protein, 353 aa, Yersinia pseudotuberculosis IP 32953
MNERTQMLHTARSTPAKSADKPRYLKLSRLLLEGRAFFALLVIIAVFSLLSPNYFSGANFLTMASHVAIFGLPAIGMLLVILNGGIDLSVGSTLGLSGVFAGFLMQGISIESLGVVLYLPVWAVVIMTLALGALVGLINGILIAIFRVPAFVATLGSLYVARGAALLMTNGLTYNKLAGSPELGNTGFDWLGFNRLFNIPIGVLALGVVALACGFLLMRTAFGRWLYASGGNERAADLSGVPVKFVKISVYVLSGVCAALAGLVLSSQLTSAGPTAGTTYELTAIAAVVIGGAALTGGRGNVRGTLLGAFVIGFLSDGLVIIGVSAYWQTVFTGAVIVMAVLLNTLQYGRRSK

SEQ ID NO: 40597 - DNA, 993 bp, Yersinia pseudotuberculosis IP 32953
  CDS (1)..(993): transl_table=11
atgatcagaactgaacactcttcttctacgcaagagagcggtagcactctccatcgccataaacgttgggaaaaattattacatcacccggccatgttgccatttattggttttgttgtgctctttgtcttaatgagtgggttaaatgacagttttttgaccgtaaataacctcactaacgtggcgcggcaggtgtcgattaatgccattatcgcggtaggcatgacttgcgcgatcttgaccggggggatcgatctttcggttgggccagtcatggcgttgtcagggtctattgctgccgggctgatgctggccggtattcctattccgttagccatgatggccgctctgttagtcggtgccttatttgggctggcgaatgggagttgtattgcttatctgcggatgccgcctatcatcgtgacgctggcctctatggggatcgcccgtggtttggcgttgttgtacaccggggggtaccccatctccggtttacctgacatgttttcattctttggccgaggtacggtactgggtattcaagtccccattctgatcatggccggtgtttatctgttcgcttggatcatgctcaaccatttatcgtttggtcgctatatttatgctatcggtggcaacgaagaagcggcgcgtttgagtggtatccgtgtgtcgcgctataaaatgctggtatatgtggtcagtggcctgacagccgcgttggccgggctggtactgacttcgcggctaatgagtgggcaacctaatgcgggcgaagggtttgaactggacgctatcgccgccgttgttttgggcggtgcggcaatctccggaggcaagggggcgattattggtacgttggtaggggcgatgatgttgggggtgttgaataatggcctcaacctgatgagcgtatcgccttatatccagaatgtcgtgaaaggcggcattattcttgcggcgatctatctcagttccgttcggcgcaaataa

SEQ ID NO: 40598 - protein, 330 aa, Yersinia pseudotuberculosis IP 32953
MIRTEHSSSTQESGSTLHRHKRWEKLLHHPAMLPFIGFVVLFVLMSGLNDSFLTVNNLTNVARQVSINAIIAVGMTCAILTGGIDLSVGPVMALSGSIAAGLMLAGIPIPLAMMAALLVGALFGLANGSCIAYLRMPPIIVTLASMGIARGLALLYTGGYPISGLPDMFSFFGRGTVLGIQVPILIMAGVYLFAWIMLNHLSFGRYIYAIGGNEEAARLSGIRVSRYKMLVYVVSGLTAALAGLVLTSRLMSGQPNAGEGFELDAIAAVVLGGAAISGGKGAIIGTLVGAMMLGVLNNGLNLMSVSPYIQNVVKGGIILAAIYLSSVRRK

SEQ ID NO: 40599 - DNA, 1029 bp, Yersinia pseudotuberculosis IP 32953
  CDS (1)..(1029): transl_table=11
atgagcgattccccccccttggtaatgtctctgacacggaccagtaaattcaggaaggccattcatcaatacgggatcatacttgcctttgttggcttgtgtgcggtcattgctctggctggtgaatttgcagtaaacagcgggacatggagcgagaattattttttatcacgggataatacactcattattctacgccaggtctcgatcaacggcatcctggccattgggatgacgttcgttattatcaccgcgggtgttgatctctccgttggcgcggttttaggcttggccggtattgtcgccgcgcgttttgcgacgaataacagtgccatcgccttgggggggaccgattggccactgttagtacccatcgtgattgccattggcatcggtttagtctgcggcgctatcaatggctttatcttaggcaaatatcgtctgcaaccctttattgtcacaatggggatgttatctgtcgcccgtggcctgacattactgactactggcggaaacccggtatcacaattaaccgatgaattccgttggttaggtaacggttatattttgggtattcccgtaccggtgttgatctttattattctgttcgccattgcctggtttgtcttgaataagatgacgtttggccgttacgtctacgcggtgggcgggaatgaaaaaagtgcccgcacatccgggatcaacgtattacgtattaaagtggcggtatataccctttgcggtattttggcggcgatcgcgggtttaattttaaccgcacgtactggctcggcacaaactggcgctggcgtatcctatgaattggatgctatcgcggcggtcgttattggcggcaccagtatggctggcggtattggaactctgcgcggaaccttatttggtgtgctgataataggtgtgatgaacaatgggcttgatttactcggcgtacaatcctattaccagcaaattatcaaaggtgttctgattgtctttgctgtcatgcttgacccatcccgtaagcaataa

SEQ ID NO: 40600 - protein, 342 aa, Yersinia pseudotuberculosis IP 32953
MSDSPPLVMSLTRTSKFRKAIHQYGIILAFVGLCAVIALAGEFAVNSGTWSENYFLSRDNTLIILRQVSINGILAIGMTFVIITAGVDLSVGAVLGLAGIVAARFATNNSAIALGGTDWPLLVPIVIAIGIGLVCGAINGFILGKYRLQPFIVTMGMLSVARGLTLLTTGGNPVSQLTDEFRWLGNGYILGIPVPVLIFIILFAIAWFVLNKMTFGRYVYAVGGNEKSARTSGINVLRIKVAVYTLCGILAAIAGLILTARTGSAQTGAGVSYELDAIAAVVIGGTSMAGGIGTLRGTLFGVLIIGVMNNGLDLLGVQSYYQQIIKGVLIVFAVMLDPSRKQ

SEQ ID NO: 40601 - DNA, 993 bp, Yersinia pseudotuberculosis IP 32953
  CDS (1)..(993): transl_table=11
atgactaactcaggcacgccgcagcaggtggcaaaatctgcctcgctgaaaaaagcgttttttagcgatttactgcaaaccgtgggtattttaccgattctggtgttgattgtggcggtattcgggtttctcgccccaaatttctttaccgaatctaacctacttaatatcgcccggcagtcatccataaatatcgtcctcgcggcgggaatgaccttcattattctgaccggaggtatcgacctttccgtggggtcaattctcgggactacggcagttaccgccatggcagtttcgctgatgcccggctgggaaggtctttctattccggcggcgctattaatgggtaccggtcttgggctgtttaacggcatgttggtggcatgggctggactgccgccatttattgttaccctcggcacatacacggcgctgcgtggtgtggcctacttactggctgatggcaccactattatcaactcgaacattaattttgagtggataggcaatgcttatctcggcccggtcccgtggctggtggttatcgccctactggtggttgccgtgtgctggtttattttacgccgcactacccttggcgttcacatatatgcggtgggcggcaatatgcaggcggcgcgcttgaccggcattaaagtgtggatggtgctgctgtttgtctatggcatgagcgggttgctgtccggactcggcggcgtcatgagtgcatcgcgactttacagcgctaacggcaatcttggtatgggctatgaattggacgccatcgcggcggttatcctcggggggaccagttttgttggtggagtaggcaccatcacaggcacgctggttggtgctctgattatcgccaccctcaataacggcatgacgctaatgggggtctcttatttctggcaattggtgatcaaaggggcggtgatcatcatagcggtgctgatagacaaataccgtacccgtcaccataactcataa

SEQ ID NO: 40602 - protein, 330 aa, Yersinia pseudotuberculosis IP 32953
MTNSGTPQQVAKSASLKKAFFSDLLQTVGILPILVLIVAVFGFLAPNFFTESNLLNIARQSSINIVLAAGMTFIILTGGIDLSVGSILGTTAVTAMAVSLMPGWEGLSIPAALLMGTGLGLFNGMLVAWAGLPPFIVTLGTYTALRGVAYLLADGTTIINSNINFEWIGNAYLGPVPWLVVIALLVVAVCWFILRRTTLGVHIYAVGGNMQAARLTGIKVWMVLLFVYGMSGLLSGLGGVMSASRLYSANGNLGMGYELDAIAAVILGGTSFVGGVGTITGTLVGALIIATLNNGMTLMGVSYFWQLVIKGAVIIIAVLIDKYRTRHHNS

SEQ ID NO: 40603 - DNA, 1185 bp, Yersinia pseudotuberculosis IP 32953
  CDS (1)..(1185): transl_table=11
atgtcacaagctaatcaatctgaatttaactcaccagaaaatggggataaaaagccattttttcggcttaaatccttaaatttacaagtttttgtcatgctggccgcgatcgccattattatgttgttcttcaccttcacgacagaaggggcctatctcagcgccagaaatatctctaacttgctgcgccagacggcgatcaccggcatcttggcggtcggtatggtgtttgtcattatctccgccgaaattgacttgtctgttggctcaatgatggggttattgggtggcatagcggccatttttgatgtctggctcggctggccgttgccgctgaccattgtcgttacgctggcgctggggctggtattaggggcatggaacggttggtgggtcgcgtatcgcaaagtgccttcgtttattgttacgctcgcgggcatgttggcttttcgtggcattttaattggtatcaccaatggcacgacggtttcgccgaccagtaatgcgatgtcgcagattggccagagctatctgccaagtggcattggttttggcatcggtgctattggcctgatgttgtttgtggcctggcaatggcgtcggcgtaatcaccgcatccgcttggggttaccggttgccgccccgcaaggggatgtgactcgccaaactattaccgcagttatcgttctgggtgccatatatttattgaatgattatcgtggtgtacctacgccggtactaatccttactgcattaatgctggcgggggtatttatggctactcgcaccgcttttggtcgccggatctacgctattggcggcaatattgatgcggcgcgcctgtctggaattaatgtagagcgcactaaactggcagtattcgcgattaacggactgatggtggcgatggctggtttgatcctcagttcacgtttaggcgcaggttcgccttctgcgggcaatatcgctgaattggatgcgattgcggcgtgtgtcattggcggtaccagcctggccggaggcgttggcagtgtggcgggggccgtaatgggcgcatttattatggcttctctcgataatgggatgagcatgctagatgtgccgacgttctggcagtacattgtcaaaggcgcaattttgctgctggccgtgtggatggattccgccaccaaacggcgggtgtga

SEQ ID NO: 40604 - protein, 394 aa, Yersinia pseudotuberculosis IP 32953
MSQANQSEFNSPENGDKKPFFRLKSLNLQVFVMLAAIAIIMLFFTFTTEGAYLSARNISNLLRQTAITGILAVGMVFVIISAEIDLSVGSMMGLLGGIAAIFDVWLGWPLPLTIVVTLALGLVLGAWNGWWVAYRKVPSFIVTLAGMLAFRGILIGITNGTTVSPTSNAMSQIGQSYLPSGIGFGIGAIGLMLFVAWQWRRRNHRIRLGLPVAAPQGDVTRQTITAVIVLGAIYLLNDYRGVPTPVLILTALMLAGVFMATRTAFGRRIYAIGGNIDAARLSGINVERTKLAVFAINGLMVAMAGLILSSRLGAGSPSAGNIAELDAIAACVIGGTSLAGGVGSVAGAVMGAFIMASLDNGMSMLDVPTFWQYIVKGAILLLAVWMDSATKRRV

SEQ ID NO: 40605 - DNA, 996 bp, Symbiobacterium thermophilum IAM 14863
  CDS (1)..(996): transl_table=11
gtggagggaactgaattggccaaggacatcgcggtgaagaagcgtctttcgttcagcgatgtatgggacaagtacagcactgtcctgattctcatcctcatgatcctcgtgtttggcgctctggagcccgtggccttcctcgggggcagcaatctgatcaagatcgtggagcagagcgcgatcaccatcctcctggcctgcggcgagttcttcgccatcctgctggccggcatcgacctgtcggtcagctcgaccatggccctgaccggcgtggtgaccgccaagctgctggttgcgggcgtgcaccccttcctggccgtggtcctgggcgccatcctgctgggcgggctgatcggcgccctcaacggcgggctgatcaacgccaccggccttccccccttcatcatcaccctcggcacccaggccatcctgcgggggctcacgctgaccgtctcctccgccagagccgtatcgggggttccggtcacgttcaccaaggcgatgggcggcaagctgttcggcgtggtgccgaccccgatcctcatcgcactgatcaccgccctggtgctgacattcttcacgaaaaagacccaggccgggcgcaacctgtacgccatcggcggcaacgctcagtcggcctggtttgccggcatcaatgtgaagcggcacaccctgctggccttcaccatcgccggcatctgcgccggcctcgcggggatggtcaacatcgcccgtctcggggcggccgagcccaacgccggcacgggctatgagaccttcgccatcgcggctgccatcatcggcgggaccagcttcttcggcggcgtcggcgtcgtgccgaaggtggtggtcggcggtctgatcatcggcgtcatcaacaacggcctgaacatggtgggcgtctcctcctactaccagcagatcgccatgggcgccctgatcatcgtcgccgtcaccctggaccgcttcttcggcgcgagccgcaagcgtggataa

SEQ ID NO: 40606 - protein, 331 aa, Symbiobacterium thermophilum IAM 14863
MEGTELAKDIAVKKRLSFSDVWDKYSTVLILILMILVFGALEPVAFLGGSNLIKIVEQSAITILLACGEFFAILLAGIDLSVSSTMALTGVVTAKLLVAGVHPFLAVVLGAILLGGLIGALNGGLINATGLPPFIITLGTQAILRGLTLTVSSARAVSGVPVTFTKAMGGKLFGVVPTPILIALITALVLTFFTKKTQAGRNLYAIGGNAQSAWFAGINVKRHTLLAFTIAGICAGLAGMVNIARLGAAEPNAGTGYETFAIAAAIIGGTSFFGGVGVVPKVVVGGLIIGVINNGLNMVGVSSYYQQIAMGALIIVAVTLDRFFGASRKRG

SEQ ID NO: 40607 - DNA, 1212 bp, Bacillus licheniformis ATCC 14580
  CDS (1)..(1212): transl_table=11
atgcagacaccggtgcaaacggataaagaccgcgctcagcccggctactttcagctgtttcgcgatatgtataagcagaatatccggaaatacagcatggtcattgcgctcgtgtttattatgctgctgtttcaaatattgacagacggaattttgctgagaccgctgaacattacgaacctgattttgcaaaacagctacattctcattttagcgattgggatgatgctcgtcatcatcacgggacacattgatctatcagtcggttcagtcgccgcttttgtcggcgccgtctccgcgatgatgatcattgaaaacgatatgccgctgtttgcggcggtcgtcctgtcgttgcttctgggagcggcaatcggcgcctggcagggtttttggatcgcttatgtcaagattccggccttcatcgtgacgctggcgggaatgcttttgttcagagggctcacgatgatcgtgctggaggggaaatcgatcgctccgtttcctgtgtccttccaaaaaatggcgtccggttttattccggactggctgaacggaggcacgttccatttgacgacgattgtcgccggagcgggtgtgtcgattctttatctcgtatatcagcttcagcagagaaacatgcagaagaaattccaatttgacttgcagggaaaaggtctgtttacagttaaggtgttttttatcatcgccattatcaacctttttacctacattctcgcgacttatgaaggtatacctctcattttgatcacattgttcgtcttaatcgccgggtatacattcgttatgaaaaaaaccgtcatcgggcggagaatctacgcgatcggcggcaatgaaaaagcagccgagctttcaggaatcaaaacaaaacggctcacctttatggtcttcgtcaatatgggcgtcttagcagccctttcaggcttgatttttgccgcccgtctaaacgcggccactccgaaagcaggaaacctgtttgaacttgacgccattgcggcctgcttcatcggcggggcttcggcttacggcggtatcggcacgatcggcggggccatcatcggcggtcttgtcatgggagtcatgaacaacggtatgtcgctgctcggcctgggcatcgactggcagcaggcgataaaaggcctcgtccttctgattgccgttgcatttgatatttacaataagaataaaacttcttaa

SEQ ID NO: 40608 - protein, 403 aa, Bacillus licheniformis ATCC 14580
MQTPVQTDKDRAQPGYFQLFRDMYKQNIRKYSMVIALVFIMLLFQILTDGILLRPLNITNLILQNSYILILAIGMMLVIITGHIDLSVGSVAAFVGAVSAMMIIENDMPLFAAVVLSLLLGAAIGAWQGFWIAYVKIPAFIVTLAGMLLFRGLTMIVLEGKSIAPFPVSFQKMASGFIPDWLNGGTFHLTTIVAGAGVSILYLVYQLQQRNMQKKFQFDLQGKGLFTVKVFFIIAIINLFTYILATYEGIPLILITLFVLIAGYTFVMKKTVIGRRIYAIGGNEKAAELSGIKTKRLTFMVFVNMGVLAALSGLIFAARLNAATPKAGNLFELDAIAACFIGGASAYGGIGTIGGAIIGGLVMGVMNNGMSLLGLGIDWQQAIKGLVLLIAVAFDIYNKNKTS

SEQ ID NO: 40609 - DNA, 963 bp, Bacillus licheniformis ATCC 14580
  CDS (1)..(963): transl_table=11
atgaaaactcaaccggctgtgaaaaaaagccttaatgttgattctgtaatgcaaaagctcggtccgtttctcggcctgatcattctcgtcgtcatcgtatcattgttaaatccgagctttttagaaccgttaaatattttaaacttgttaagacaagtcgccattaatgcgctgatcgcgtttggcatgacctttgtcattttaaccggcggcatcgatctttccgtcggagcgattttggcgctgtcaagcgcattgatcgccggaatgatcgccggcggcatcgatcctgttttcgccgtcatcatcggctgcctgatcggagccctgctcggcttggtcaacgggctgttaatcacgaaaggtaaaatggccccgttcatcgcaacacttgccacaatgacgattttccgcggattgacgatggtttatacagacggcaatccgattacagggctcggcaaccactacggcttccagcttttcggacgcggttactttttaggcatccccgtccctgcgattacaatggcagccgcctttatcatcctctgggtgatccttcacaaaacgcctttcggccgccgcacatatgcaatcggcggaaatgaaaaagcggccttgatctcgggcattaaagttccgcgcgtcaaaatgatgatttattctcttgcaggcctattatccgcgttggctggagccatcttgacgtcacggctaaactcagcccagccgacggcaggcacttcctatgaactcgacgccatagccgcagtcgtattaggcggcacaagccttgccggaggaagaggacgaattgccggcacactcatcggcgtcctgatcatcggaacgttgaataacggcttgaacctgcttggcgtctcttcctttttccaaatggtcgtcaaaggtgtcgtcattttgatcgcagtcctgctggaccgcaagaaatccgcttaa

SEQ ID NO: 40610 - protein, 320 aa, Bacillus licheniformis ATCC 14580
MKTQPAVKKSLNVDSVMQKLGPFLGLIILVVIVSLLNPSFLEPLNILNLLRQVAINALIAFGMTFVILTGGIDLSVGAILALSSALIAGMIAGGIDPVFAVIIGCLIGALLGLVNGLLITKGKMAPFIATLATMTIFRGLTMVYTDGNPITGLGNHYGFQLFGRGYFLGIPVPAITMAAAFIILWVILHKTPFGRRTYAIGGNEKAALISGIKVPRVKMMIYSLAGLLSALAGAILTSRLNSAQPTAGTSYELDAIAAVVLGGTSLAGGRGRIAGTLIGVLIIGTLNNGLNLLGVSSFFQMVVKGVVILIAVLLDRKKSA

SEQ ID NO: 40611 - DNA, 936 bp, Bacillus cereus E33L
  CDS (1)..(936): transl_table=11
atggctaagaaggggaatgtattacaacaacttgggtctttaattggactagcgctaattattgtagtaattacggctttaaatccagcgtttattgaaattccaaatttatttaatatactgcgtcaagtatcgattaatgcccttattgcattcggaatgacctttgtaattttaacagggggtattgacttatcggtaggttctattttagcattatcaagtgcacttgttgctggaatgatggcaagtggcatggacccgttccttgcgatggcagttggattattagctggtcttgtaatgggaattgtaaacggtatcatcatagcgaagggaaaagtagctccatttattgcgactttagcaacaatgactatttttcgcgggttgacgcttgtttatatggacggacgtccgatcactggtcttggtgatcatttaatgttccaaatgtttggccgcggttattttctcggtattccagtaccagctgttacaatgatgatcgctttcgcagtactttacttcattttgaagaaaacgacatttggtcgccgtacatttgcaattggtggaaatgaagaagcagcagcattatcaggtattaatgttacgagaattaaagtaatgatttacggtctttccggaattttggcagcgcttgcaggtattgtcttaacatcacgactagattctgcacagccgactgcaggtacttcttacgaattagatgcaattgcagcagttgtattaggtggaacaagtctttctgggggaagaggatggattgttggtacattcatcggtgtacttattatcggtgtactaaataacggtttaaatttattaggtgtatcttctttcttccaacaagttgtaaaaggacttgtaatcttactagctgtattaattgatcgtcgaaaagaagcgtaa

SEQ ID NO: 40612 - protein, 311 aa, Bacillus cereus E33L
MAKKGNVLQQLGSLIGLALIIVVITALNPAFIEIPNLFNILRQVSINALIAFGMTFVILTGGIDLSVGSILALSSALVAGMMASGMDPFLAMAVGLLAGLVMGIVNGIIIAKGKVAPFIATLATMTIFRGLTLVYMDGRPITGLGDHLMFQMFGRGYFLGIPVPAVTMMIAFAVLYFILKKTTFGRRTFAIGGNEEAAALSGINVTRIKVMIYGLSGILAALAGIVLTSRLDSAQPTAGTSYELDAIAAVVLGGTSLSGGRGWIVGTFIGVLIIGVLNNGLNLLGVSSFFQQVVKGLVILLAVLIDRRKEA

SEQ ID NO: 40613 - DNA, 954 bp, Bacillus cereus E33L
  CDS (1)..(954): transl_table=11
atgaaacgcatgctaaaaatgcacgaaacgtctatcataacgttactactaatttatatagctattgtaggaatgataaatcctagttttattcaatttaactcgttatctttaatggtgaaatcaagcgttattttagtcgtgttagcaattggccaatcgttcgtcttatttacgaaaaatatagatgtatcagttggttcaagcatggggttaagtgcagcagtttgcggaatgttgctaacgaatgaatatagtgcatccttgtcgatatttgctgctattacacttggcgctattatcggtttcgtaaacgggatgggcgttgcgaagtttcgagtaccagccattattatgacattaggcatgttaggaattattagaggtgccatgttaattttcacaggcgggaagtggattgaagatattccaaacgattttaagcagctgtcatctatcgtcattcttggtttacctataactgtatggttcgttcttattattttactactactatacttctttttaaggaaagtgccatttggaagatacttttatgcggtaggtgataatgaagatggcgcgagacttattggtatacctgttaataaagtgaagatatgtgcgtttatgatttcaggcataagtgctgcgctcgctggttgcatatttgttatgaatatcgggttcattccaaatcaaactggtacaggattagaattacaagtaatcgcagccgctgtactagggggcattcatttaaaaggaggaacaggatctttatttggagctgcattaggagcattctttttagaaacaataagcagttcactcgtctttctaaaaataccagcattttggaataatgctatttcaggttttttattattacttatcatcatactggatagtgttatgaaaaagtggaaggcagaaaggaggatgaatctatga

SEQ ID NO: 40614 - protein, 317 aa, Bacillus cereus E33L
MKRMLKMHETSIITLLLIYIAIVGMINPSFIQFNSLSLMVKSSVILVVLAIGQSFVLFTKNIDVSVGSSMGLSAAVCGMLLTNEYSASLSIFAAITLGAIIGFVNGMGVAKFRVPAIIMTLGMLGIIRGAMLIFTGGKWIEDIPNDFKQLSSIVILGLPITVWFVLIILLLLYFFLRKVPFGRYFYAVGDNEDGARLIGIPVNKVKICAFMISGISAALAGCIFVMNIGFIPNQTGTGLELQVIAAAVLGGIHLKGGTGSLFGAALGAFFLETISSSLVFLKIPAFWNNAISGFLLLLIIILDSVMKKWKAERRMNL

SEQ ID NO: 40615 - DNA, 975 bp, Mannheimia succiniciproducens MBEL55E
  CDS (1)..(975): transl_table=11
ttgattatgacttcaacaactcaagaaaaaagtgcgggttcattcagcaaaatctggaacgcttatggcatgctgttaatttttgcagtcatttttgtctgctcttgtgtatttatcccgaattttgccactgtggtgaatatgaaagggctgggtttggccatttctatgagcgggattgttgcctgcggtatgttgttctgcttagccgccggcgaaattgatctttccgtcgcttccgttattgcttgcgcgggggttgttacggcggtggtcattaatatgacgcaaagcgtgacaatcggtattcttgccggtctcggcctgggtattgccgtagggttaattaacggtttcgtaattgcgaaattaaaaatcaactcattaatcaccaccctcgccaccatgcagattgcccgcggtttcggttatattatttctgacggtaaagcggtgggtattaccaaagaagaattcttcgaattaggttatcaggatattttcggcgtgccgttaccgattatttttaccgttatctgtatggtcgtcttcggtttcttactcagtaaaaccacttacggacgcaataccctggctatcggcggtaatcaggaagcttcccgtttagccggtatcaatgtggacagaacaaaattaattatttttgtggtatcgggttttgtttccgcacttgccggcgtgattctggccgcccgtatgaccagcggtcaaccgatgacttccgtgggttttgaactggtggccatttcggcctgtgtattgggcggcgtttcattgaacggcggggtggcaaaaatttcatttattatcgccggggtgttaattctcggtaccatcgaaaatgccatgaacctactgaatatttcaccttttgcccaatatgtagtgcgcggtttaatcttgctgattgcggtaatttttgataaatataaacagaaatttatcaaatcttaa

SEQ ID NO: 40616 - protein, 324 aa, Mannheimia succiniciproducens MBEL55E
MIMTSTTQEKSAGSFSKIWNAYGMLLIFAVIFVCSCVFIPNFATVVNMKGLGLAISMSGIVACGMLFCLAAGEIDLSVASVIACAGVVTAVVINMTQSVTIGILAGLGLGIAVGLINGFVIAKLKINSLITTLATMQIARGFGYIISDGKAVGITKEEFFELGYQDIFGVPLPIIFTVICMVVFGFLLSKTTYGRNTLAIGGNQEASRLAGINVDRTKLIIFVVSGFVSALAGVILAARMTSGQPMTSVGFELVAISACVLGGVSLNGGVAKISFIIAGVLILGTIENAMNLLNISPFAQYVVRGLILLIAVIFDKYKQKFIKS

SEQ ID NO: 40617 - DNA, 933 bp, Mannheimia succiniciproducens MBEL55E
  CDS (1)..(933): transl_table=11
atgtcagcaattaaattaaatgtgcgggacgcaggtactcttgtcgggttagtgattatttttgtggttttctcatttttatcccccgtatttttcaccgtaccgaatctattaaatattctgcaacaatcatcactgaacgcagcaattgcacttggtatgactttagtgattatttccgcaggaattgatttatccgtcggtcccaccgcggcattgtccgcagtgcttggcgccagtttaatggtctccggcgttcccgttccgattgcggttttaggcgccctttgtatcgggtctttaggcgggcttttcaatggcgttttaatagcctatgccggtttgcagcctttcattgttacattaggcagtctttctctttatcgagcattatctttgatttatactggcggcaatcccatatttggtatcccggcggaatttagagcgtttatgaacggttctttattcggtattccaagctccattttaattgttgcaagtattgcattgattctatgggtagtattaaataaaaccccgttgggcgaatatatttttgctgtcggcggtaatgaggaagcggctcgggtttgtagcgttcctgtggcaaaaaccaaagttgcggtttatatgatttccggttttttggcttcggttgcaggtttagtactcgttggccgtcttggtgcggcagatcctaccctgggtaatttatgggagcttgatgctattgccgccgccgcaatcggcggagcatcactgatggggggaaaaggaagcattataggtaccatactgggtgcggttattctcggcgcattacgtaatggtctaacgctgttaaatattcaggcattctatcaattactcgcaacaggtttaattattattgtggccatgttaattgatagagcaacaagaggtaaataa

SEQ ID NO: 40618 - protein, 310 aa, Mannheimia succiniciproducens MBEL55E
MSAIKLNVRDAGTLVGLVIIFVVFSFLSPVFFTVPNLLNILQQSSLNAAIALGMTLVIISAGIDLSVGPTAALSAVLGASLMVSGVPVPIAVLGALCIGSLGGLFNGVLIAYAGLQPFIVTLGSLSLYRALSLIYTGGNPIFGIPAEFRAFMNGSLFGIPSSILIVASIALILWVVLNKTPLGEYIFAVGGNEEAARVCSVPVAKTKVAVYMISGFLASVAGLVLVGRLGAADPTLGNLWELDAIAAAAIGGASLMGGKGSIIGTILGAVILGALRNGLTLLNIQAFYQLLATGLIIIVAMLIDRATRGK

SEQ ID NO: 40619 - DNA, 1008 bp, Mannheimia succiniciproducens MBEL55E
  CDS (1)..(1008): transl_table=11
atggctggacaaaaaaataaaacatgggatttcttcaaacaaaatgccatttacttcgtcttattaattttattaggtgtaattattgctcaagacccatcattcttaaacctgatgaacttcagtaatattcttactcaatcttcggtgcgactaatcattgcattaggtatcgccggtttattggtggtacagggtaccgacttatcagccggtcgccaggtaggtttagccgctgtggtggccgccaccatgttacaggcaattgataacttaaaccgcgtatttccgaacctgcctgaaatgccgattttcgtagtgatactgattgtgtgctcaatcggtgccgtaatcggtttgatcaacggctttgtggtcgctatcttaaatgtaacgccgtttatcgccaccatgggtaccatgatcatcgtgtacggtttcaactcactttactatgatgcggtaggcggttcgccgattgccggattcagcgaaaacttttcttctttcgcgcaaggattcttccgtttcggttcctttaaactttcatacattacgatttacgccattatcgcgacaatcttaatgtggattttatggaacaaaactcgtttcggtaaaaatatctttgccatcggcggtaacccggaagcggcgcgtgtttcaggggtaaacgtaacacgcaacctattggttatctatatgttagccggcgtattctatgctttcggcggtatgttggaagccggccgtatcgggtctgcaaccaataacttaggtttcatgtacgaattggatgccatcgcagcctgtgtggtaggcggtgtatcattcgcgggcggcgtggggactatcatcggtgtagtaaccggggtgttaattttcaccgttatcaactacggtttaacctacatcggcgtaaacccgtactggcaatatattattaaaggtagcattatcatcttagccgttgctatcgactcattaaaatatgctaagaaaaaataa

SEQ ID NO: 40620 - protein, 335 aa, Mannheimia succiniciproducens MBEL55E
MAGQKNKTWDFFKQNAIYFVLLILLGVIIAQDPSFLNLMNFSNILTQSSVRLIIALGIAGLLVVQGTDLSAGRQVGLAAVVAATMLQAIDNLNRVFPNLPEMPIFVVILIVCSIGAVIGLINGFVVAILNVTPFIATMGTMIIVYGFNSLYYDAVGGSPIAGFSENFSSFAQGFFRFGSFKLSYITIYAIIATILMWILWNKTRFGKNIFAIGGNPEAARVSGVNVTRNLLVIYMLAGVFYAFGGMLEAGRIGSATNNLGFMYELDAIAACVVGGVSFAGGVGTIIGVVTGVLIFTVINYGLTYIGVNPYWQYIIKGSIIILAVAIDSLKYAKKK

SEQ ID NO: 40621 - DNA, 1029 bp, Mannheimia succiniciproducens MBEL55E
  CDS (1)..(1029): transl_table=11
atgttttcatttaaaaaattaatatccaaactgggaatcggattagtcttgttatttatgattataggcatgtctctgacctctcaggcgtttttatccaccaataatatcttcaatattttattgcaggtttccgtcatttgcgtgatttccgtggggatgacctacgttattctcaccggcggaatcgatttgtccgtaggttccatcgtggcgttaagtgcggtttgtctggggctgtttacccattggggagtggcatggcttggcgaaaatccgtcacaaggcgcattgctggctgtggtgttactgtccattgttggagccgttctggtcggtgccttatgcggctatgtgaacggcgtggtgattgtatacggcaaagttacctcgtttatcaccaccctcggtatgatggggatcgcacgcggcctggcgttaaccttatccgacggtaaaaccatttataatttccccgaacaactgcgttttttcggtaacggacgtcttgcggtgacggaaaatttcagtattccgattccggtgattatcgcccttatcgtcgtcttaatcagtttctatgtgttaactcaaaccgtgttcggtcgccagatttacgccctcggcggtaatcgcgaagcggtacggttgtccggtattaacgtgaataagttggaaatcaaaacctatgtgattaacggcgccttggcggccgtcggcgcggttattctggtggggcgtttaaacgccgcacaacctattgccggtacgggttatgagctggatgccattgccgcaacggtaatcggcggtaccagtctgatgggcggtgtgggttcggtggtcagcacctctatcggggcgcttattatgggggttctgcaaaacggtttgaccctattgaacgtaacctcttatctgcaacgcttgattatcggtatggtaattattcttgcggtattcctcgaccaattacgacgcggcgaagtatctaccggcggtttgagacgtattttcttcagagaataa

SEQ ID NO: 40622 - protein, 342 aa, Mannheimia succiniciproducens MBEL55E
MFSFKKLISKLGIGLVLLFMIIGMSLTSQAFLSTNNIFNILLQVSVICVISVGMTYVILTGGIDLSVGSIVALSAVCLGLFTHWGVAWLGENPSQGALLAVVLLSIVGAVLVGALCGYVNGVVIVYGKVTSFITTLGMMGIARGLALTLSDGKTIYNFPEQLRFFGNGRLAVTENFSIPIPVIIALIVVLISFYVLTQTVFGRQIYALGGNREAVRLSGINVNKLEIKTYVINGALAAVGAVILVGRLNAAQPIAGTGYELDAIAATVIGGTSLMGGVGSVVSTSIGALIMGVLQNGLTLLNVTSYLQRLIIGMVIILAVFLDQLRRGEVSTGGLRRIFFRE

SEQ ID NO: 40623 - DNA, 1005 bp, Burkholderia mallei ATCC 23344
  CDS (1)..(1005): transl_table=11
atgcatgaccggacggccgcgccgtctgcctcttgcgcgcccgccgccgcgagccccgctcgggccacgggccccgcgctcgccgcgctgcggcgctcgacgacgttctacccgctcgtcgggctcgtcgccgtgtgcgtcgcgatggtgttcgcgagcgacagcttcctgagcgcggcgaacctcgagaacgtgctgcggcaggtgtcgatcaacgcgatcatcggcgtcgggatgacctgcgtgatcctgacgggcggcatcgacctgtcggtcggctcggtgatggcgctgtccggcacgctcgcggcgggccttctcgtcgcgggcgcgaacggcgcggcggcgcttgccgcgggcatcggcgtcggggtcgcgctcggcgcggcgaacggcctgttcgtcgcgttcgccggcatgccgcccatcatcgtcacgctcgcgacgatgggcatcgcgcgcggcctcgcgctcatctacacgggcggctacccgatcgacgggctgcccgactgggtccgcttcttcggcagcggcaaggtgctcggcgtgcaaatgcccgtgctgacgatgctcgcggtctacgcgctcgcgtggctgatgctcgagcgcatgccgttcggccgctacgtctacgcgatcggcggcaacgagcacgcgacgcggctctcgggcgtgcgcgtgtcgcgcgtgaagctggccgtctatacgttcgcggggctcacgtccgcgctcgccgcgctcgtgctgacgggccgcctgatgagcgggcagccgaacgcggggggcggcttcgagctcgacgcgatcgccgccgtcgtgatgggcggcacgtcgatcgcgggcggccgcggctcgatcgtcggcacgcttgtcggcgcgctgctgctcggcgtgctgaacaacggcctgaacatgatcggcgtgaatccctacgtgcagaacgtgatcaagggcgccatcatcctgctcgcgatctacatcggccgcgagcgccgcacgtga

SEQ ID NO: 40624 - protein, 334 aa, Burkholderia mallei ATCC 23344
MHDRTAAPSASCAPAAASPARATGPALAALRRSTTFYPLVGLVAVCVAMVFASDSFLSAANLENVLRQVSINAIIGVGMTCVILTGGIDLSVGSVMALSGTLAAGLLVAGANGAAALAAGIGVGVALGAANGLFVAFAGMPPIIVTLATMGIARGLALIYTGGYPIDGLPDWVRFFGSGKVLGVQMPVLTMLAVYALAWLMLERMPFGRYVYAIGGNEHATRLSGVRVSRVKLAVYTFAGLTSALAALVLTGRLMSGQPNAGGGFELDAIAAVVMGGTSIAGGRGSIVGTLVGALLLGVLNNGLNMIGVNPYVQNVIKGAIILLAIYIGRERRT

SEQ ID NO: 40625 - DNA, 1005 bp, Burkholderia mallei ATCC 23344
  CDS (1)..(1005): transl_table=11
atgcaagcaagagagaatcttccaccggccgcggcgcacgcggcggccgtgccgaccgaggatcggcagcgctggcggcagcacgccgccgactacagtctcgtcgcgatcttcgcggcgatgttcgtcgcgatgtcgctgacggtcgatcatttcttctcgatcgacaacatgctcgggctcgcgctgtcgatctcgcagatcgggatggtcgcgtgcacgatgatgttctgcctcgcgtcgcgcgatttcgatctgtcgatcggctcgacggtcgcgttcgcgggcgtgctgtgcgcgatggtgctcaacgcgaccgacaacacgttcgtcgcgatcgcggcggcagtcgcggcgggcgccgtcatcggcttcgtcaacggcgcggtgatcgcctatctgcggatcaacgcgctgatcacgacgctcgcgacgatggagatcgtgcgcgggctcggcttcatcgtgtcgaaggggcaggcggtcggcgtgtcgtcggagacgttcatcgcgttgggcgggctcacgttcttcggcgtgtcgctgccgatctgggtgacgctcgcgtgcttcgtcgtgttcggcgtgctgctcaaccagaccgtgtacggccgcaacacgctcgcgatcggcggcaacccggaggcgtcgcggctcgccggcatcaacgtcgagcgcacgcgcgtctacatcttcctgatccagggcgcggtgaccgcgctcgcgggcgtgattctcgcgtcgcggatcacgtcgggccagccgaacgcggcgcagggcttcgagctgaacgtgatttccgcgtgcgtgctgggcggcgtgtcgctcgcgggcggacgcgcgtcgatctcgggcgtcgtgatcggcgtgctgatcatgggcaccgtcgagaacgtgatgaacctgctgaacatcgatgcgttctatcaatatctggtgcgcggcgcgatcctgctcgccgccgtgctgctcgaccagttgaagaaccgcggcgcgcgcgattga

SEQ ID NO: 40626 - protein, 334 aa, Burkholderia mallei ATCC 23344
MQARENLPPAAAHAAAVPTEDRQRWRQHAADYSLVAIFAAMFVAMSLTVDHFFSIDNMLGLALSISQIGMVACTMMFCLASRDFDLSIGSTVAFAGVLCAMVLNATDNTFVAIAAAVAAGAVIGFVNGAVIAYLRINALITTLATMEIVRGLGFIVSKGQAVGVSSETFIALGGLTFFGVSLPIWVTLACFVVFGVLLNQTVYGRNTLAIGGNPEASRLAGINVERTRVYIFLIQGAVTALAGVILASRITSGQPNAAQGFELNVISACVLGGVSLAGGRASISGVVIGVLIMGTVENVMNLLNIDAFYQYLVRGAILLAAVLLDQLKNRGARD

SEQ ID NO: 40627 - DNA, 1035 bp, Burkholderia pseudomallei K96243
  CDS (1)..(1035): transl_table=11
atgaaccaacagatcaagcaaagcgagaccgccgccgcgccgccgggcgcggcgcagccccgcgcgccgcggcgcgcggccgaccaccgcgcgcggatgcaggcgctgatgcgcacggccggcatgctgcccgtgctcgtgcttctgtgcgtgggcttcggcttcatgaccgacggcttcttcacgctgcagaacctgtcgatcgtcacgcagcaggcgtcgatcaacatcgtgctcgccgccggcatgacgttcgtgatcctgacgggcggcatcgacctgtcggtcggctcggtgctcgcggccgccgcggtcgcgtcgctgctcgcgtcgaacctccccggctggggctggctcggcattccggccgcgctcgccgtcgggctcgcgttcggcgtcgtcaacggcgggctgatctcgtttctgcgcctgccgcccttcatcgtcacgctcggcgcgctgaccgccgtgcgcggcatcgcgcgcctgatgggcaacgacacgacgatcttcaacccgcaactgccgttcgcgttcatcggcaacggctcgatcctcggcgtgccgtggctcgtcgtgatcgcgctcgccgtcgtcgcggtctcgtggttcatcctgcgccgcacggtgctcggcatgcggatctatgcggtcggcggcaaccccgaggccgcgcgcctgtcgggcatcaacgtgcgcggcatcgaactgttcgtctacgcgagctccggcctgctcgccggcctcggcgcgctgatgtccgccgcgcggctgtatgcggccaacggcctgcagctcggccagtcgtacgaactcgacgcgatcgccgcggtgatcctcggcggcacgagcttcgtcggcggcgtcggctcgatcgtcggcacgctggtcggcgcgctgatcatcgcggtgctgtcgaacgggctcgtgctgctcggcgtgtccgacatctggcagtacatcatcaaggggctcgtgatcatcggcgcggtcgcgctcgaccgctaccgtcagcacggatcggcccgcacctga

SEQ ID NO: 40628 - protein, 344 aa, Burkholderia pseudomallei K96243
MNQQIKQSETAAAPPGAAQPRAPRRAADHRARMQALMRTAGMLPVLVLLCVGFGFMTDGFFTLQNLSIVTQQASINIVLAAGMTFVILTGGIDLSVGSVLAAAAVASLLASNLPGWGWLGIPAALAVGLAFGVVNGGLISFLRLPPFIVTLGALTAVRGIARLMGNDTTIFNPQLPFAFIGNGSILGVPWLVVIALAVVAVSWFILRRTVLGMRIYAVGGNPEAARLSGINVRGIELFVYASSGLLAGLGALMSAARLYAANGLQLGQSYELDAIAAVILGGTSFVGGVGSIVGTLVGALIIAVLSNGLVLLGVSDIWQYIIKGLVIIGAVALDRYRQHGSART

SEQ ID NO: 40629 - DNA, 978 bp, Burkholderia pseudomallei K96243
  CDS (1)..(978): transl_table=11
atgaacactcagaccctgtcccgtctcgacgcggcgcccaggcgcgtgaacgtcgcggagctcgcgagccgcttcggcatcccgatcgtcttcgtcgcgctgtgcgtcgtgctcgcgttcgcgagcccgtacttcctcacctggcgcaactggagcgacatcctgcgccagacgtcgatcaacggcattctcgcgatcggcatgacgtacgtgatcctgaccaagggcatcgacctgtcggtgggctcggtgctcgcgctcgcgggcatcgtgagcggcctcgccggcgcggcggggcacgggctcgcggtgtcgctcgcggccggcgtcgcgtgcggcgcggcgctcggcgcgatcaacggcgtggcgatcgcgcgcttgaacgtgccgccgttcgtcgcgacgctcggcatgctgagcgtcgcgcgcggcgtcacgtacatcgccaacgacggcagcccggtcgcgaacctgcccgacgattacctgtcgctcggcatcggcaggctcggcccgctcggcatgccggtgctgatcttcgcgggcgtcgcgctcgcgtgctggtgggtgctgcgctacacgacatacggccgctatctgtatgcggtcggcggcaacgagaagagtgcgcgcacgtcgggcatcggcgtgcgcaaggtcgtgttctcggtgtacgtcgtctcgggcgcgctcgccggcctcgcggggatgatcctcgccgcgcgcacgacgtccgcgctgccgcaggcgggcgtgtcgtacgagctcgacgcgatcgcggccgtcgtgatcggcggcacgagcctgtcgggcgggcagggcggcgtcgtcggcacgctgttcggcgcgttgttgatcggcgtgatcaacaacgggctgaacctgctcggcgtgtcgtcgtattaccagcagatcgcgaagggactcatcatcgtgctggccgtgctcatcgacgtggcccgcaaacagcagcgctga

SEQ ID NO: 40630 - protein, 325 aa, Burkholderia pseudomallei K96243
MNTQTLSRLDAAPRRVNVAELASRFGIPIVFVALCVVLAFASPYFLTWRNWSDILRQTSINGILAIGMTYVILTKGIDLSVGSVLALAGIVSGLAGAAGHGLAVSLAAGVACGAALGAINGVAIARLNVPPFVATLGMLSVARGVTYIANDGSPVANLPDDYLSLGIGRLGPLGMPVLIFAGVALACWWVLRYTTYGRYLYAVGGNEKSARTSGIGVRKVVFSVYVVSGALAGLAGMILAARTTSALPQAGVSYELDAIAAVVIGGTSLSGGQGGVVGTLFGALLIGVINNGLNLLGVSSYYQQIAKGLIIVLAVLIDVARKQQR

SEQ ID NO: 40631 - DNA, 1176 bp, Photobacterium profundum SS9
  CDS (1)..(1176): transl_table=11
atggaacaggtaaaaagtgtggcgactcaaaggccaaaaagtaacctgcgtgaacagctacaaggtgtaaagttgcaattcatcgtaatggcggcagttatcgtcattattatgctgttcttcagcgtgatgacggaatggagttacctgtccccacggaacatttccaatctattcagacaaacagccattaccggtattctttccatcggaatggtgtttgtcatcattagcggtgaaattgatttatctgttggatcgatgatgggtttactagggggcgtggctgctattttagatgtgtggtttggcttacctttgcctttgaccattgtactcacattgatcgctggttttttgcttggtttatggaatggttggtgggtggcttatcgtaaagtgccgtcatttattgtgacgttagctggcatgttggcgtttcgtggcattcttattggcattactgatggcacaactgtggctcctacgtctcaggcaatggggttcattggtcaaagttacctccctagttggtttggcatgctccttggtgtgggtagcttgtccttatatatttattggcagcaacgtcgtagaagtatgaggcagcagtataatttacccgttccgatggcaagtacgtcgttggtgaagcaagcggctgtgggcgtggcggtattaagcattattcttgtgcttaatgattaccgtggcgttccgacgccagtattactgctcgtgaccttcttgatagtcggctcttttattgcgagtaaaactcggcttggtcgacgtgtttacgccattgggggcaatattgaagcaagccgattatcgggtattaatgtagagaaaaccaagttgtctgttttcgctatgagtggttttttggtggcggtagctgcattaattttaagcagtcgcttaggggcgggttcgccatcggctggtaatattgccgaactggatgccattgctgcctgtgttattggtggcacgagtatggcggggggggttggtaccgttattggtgcggtgatcggtgcatttatcatggcatcgttggataatggcatgagtatgatggatgtgcctaccttctggcaatatattgttaaaggtggaattttactgttagcagtgtggatggatagtgcgacaaaagcccgacgctaa

SEQ ID NO: 40632 - protein, 391 aa, Photobacterium profundum SS9
MEQVKSVATQRPKSNLREQLQGVKLQFIVMAAVIVIIMLFFSVMTEWSYLSPRNISNLFRQTAITGILSIGMVFVIISGEIDLSVGSMMGLLGGVAAILDVWFGLPLPLTIVLTLIAGFLLGLWNGWWVAYRKVPSFIVTLAGMLAFRGILIGITDGTTVAPTSQAMGFIGQSYLPSWFGMLLGVGSLSLYIYWQQRRRSMRQQYNLPVPMASTSLVKQAAVGVAVLSIILVLNDYRGVPTPVLLLVTFLIVGSFIASKTRLGRRVYAIGGNIEASRLSGINVEKTKLSVFAMSGFLVAVAALILSSRLGAGSPSAGNIAELDAIAACVIGGTSMAGGVGTVIGAVIGAFIMASLDNGMSMMDVPTFWQYIVKGGILLLAVWMDSATKARR

SEQ ID NO: 40633 - DNA, 1017 bp, Photobacterium profundum SS9
  CDS (1)..(1017): transl_table=11
atgctagctaaacttcttcaagccacttcagatcaaccgaagggcgcaaatacaaaacgctttatatccaaatacgctatctattttgtctttatcgcaatgtgtattgtgatgagtattttgtctcctgttttcttaacagtggccaacctacttaacgtaatgacacaaatggcaagtattggtctgctggcgcttggcgttaccattatcattattacacgaggtatcgatctttcatctggttctgttctcgctgttgcggccgttgtatctgcaagtaccgcccaatcacttgattggggcatgagaatgtaccctaacctgccagaactacctattattgtgccaattttagtggcacttgccgtcggtgcattatgtggtttgataaacggtgcacttattgcctatacgggtattcctccttttattgccacactaggtatgatgattatcgctcgtggtgctgcactactgtattcagatggtcgcccagtcagtagcctaatcgagtcataccagtggattggtcaaggaacgatagcggggatccccgtgcctgtggtgatatttttggtgatggcgttcattacgtacattttacttaattacactcgatttggtaaatacgcctacgccattggtggtaatgaaacagccgcatatgtatctggcattaacgtgactaaatacaagattcttgtctatgtatatgcaggtttacttgcaggtattgccgcactgattctgactgcacgtattaactcaggtcagccaggtcttggggtgatgtatgagcttgatgccatcgcatctgcaaccgttggtggtgtgagccatgccggtggtatcggcacaattcagggcaccattgtcggcgtcatgatcatgggtgtgctacaaaatgggcttgatttattgaatgtctcggcctattggcagcaagtcgtaaaaggcttagtcattgttgttgctgttattttcgatatgaaacgacagaaaaagagtaagtaa

SEQ ID NO: 40634 - protein, 338 aa, Photobacterium profundum SS9
MLAKLLQATSDQPKGANTKRFISKYAIYFVFIAMCIVMSILSPVFLTVANLLNVMTQMASIGLLALGVTIIIITRGIDLSSGSVLAVAAVVSASTAQSLDWGMRMYPNLPELPIIVPILVALAVGALCGLINGALIAYTGIPPFIATLGMMIIARGAALLYSDGRPVSSLIESYQWIGQGTIAGIPVPVVIFLVMAFITYILLNYTRFGKYAYAIGGNETAAYVSGINVTKYKILVYVYAGLLAGIAALILTARINSGQPGLGVMYELDAIASATVGGVSHAGGIGTIQGTIVGVMIMGVLQNGLDLLNVSAYWQQVVKGLVIVVAVIFDMKRQKKSK

SEQ ID NO: 40635 - DNA, 999 bp, Photobacterium profundum SS9
  CDS (1)..(999): transl_table=11
atgcgtgatcgtgtgcgttttcattgggatgctttaataaagcgtcatgaattttatctagcagctcttattggtttaatggttgttgggttaggaataagctctgaagattttttaacactgggcaatatttttgatatgtctgtgagttctgccattttgggtatcatggcttgtgggctttttgttgtactgatcgcgggtggtattgatatttcatttccagccactgctgcgatagcgcagtacgttatggcaacgtatgtgttgtctattggtggaaacttctttattgcttttctgattgccgctgttgtgggtatgttgcttggacttatcaatgccatattggtgtataagctgaaagtgccagccattatcattacgatttcgacgctcaatgtattctttggtttactgatttattttagtaatggtgcttggttatacggtttcccagattggtttatggatggggttgagttgtttacctttgtgggtagcgacggatacgactatggcttatctcttccaattataatgcttgtcgctgtcgttttatttacgtcatttttaatgtctaaaacacgtttaggtcgtcagatttatgcgatgggcggtaatgctgatgctgcgagtcgaattggtattaatttatttggtattcacctgtttgtttacggctacatgggggcattagcgggaattgcctcagtggtacaaacccaaattacacagtcagttgcacctaactcattaatgggctttgagctgacggttttagccgcggtggtattaggcggaacgagtatgacaggggggaaaggcacgttaataggggttgttcttggtgtggcgctgttagccattttgaagaatggattaacgctgctgggagttccttcctattggcatgcggttgtcactggtctcatcattgtattcagcatcagtatgactgctctgaatgaaaagaaacaagcattgcagggggcgtaa

SEQ ID NO: 40636 - protein, 332 aa, Photobacterium profundum SS9
MRDRVRFHWDALIKRHEFYLAALIGLMVVGLGISSEDFLTLGNIFDMSVSSAILGIMACGLFVVLIAGGIDISFPATAAIAQYVMATYVLSIGGNFFIAFLIAAVVGMLLGLINAILVYKLKVPAIIITISTLNVFFGLLIYFSNGAWLYGFPDWFMDGVELFTFVGSDGYDYGLSLPIIMLVAVVLFTSFLMSKTRLGRQIYAMGGNADAASRIGINLFGIHLFVYGYMGALAGIASVVQTQITQSVAPNSLMGFELTVLAAVVLGGTSMTGGKGTLIGVVLGVALLAILKNGLTLLGVPSYWHAVVTGLIIVFSISMTALNEKKQALQGA

SEQ ID NO: 40637 - DNA, 990 bp, Photobacterium profundum SS9
  CDS (1)..(990): transl_table=11
atgagcagcaacgcgatgaccaaaacagacgattcaaaaaacaaaacaggtaagctgttcactaaagaatggttaattgaacaaaaatcactgatcgcattgatcttactgattgttgtcgtgtctttccttaaccccaacttctttactgtcgacaacattttaaacattcttcgccaaacctcgataaacgcaattattgcagtcggtatgacactggttattttaactgcgggtatcgacctaagtgtgggatctgttttggcgctgtgtggtgcatttgccgccaccatgattggtcttgaaattccagccattattgccgtaccaacagcccttctagcgggtgctgctttaggtgcaatcagcggtattattattgccaaaggtaaagtgcaagcatttattgccaccttggtaaccatgacattgctgcgtggtgtcaccatggtttacaccgatggtcgccctatttctactggctttacagaggtagcagatggctttgcatggttcggtacaggttacgcaatgggtattcctgttcctatctggctaatggttattgtattcgcttctatctggtatttattgaatcacactcgcttcggtcgttacatctacgcactgggcggtaatgaatcagcaactcgcttatcaggcattaacgtagatcgcgtcaagattggcgtctacgctatctgtggcctgttagccgcccttgctggcatcattgtaacctctcgtctttcatctgctcagccaaccgctggtatgggatacgaactggatgcgattgctgctgtcgtattgggtggtaccagccttgctggtggtaaaggtcgcattatgggcacactggttggtgcgcttattatcggcttcttaaacaatgcactaaacctgttagacgtgtcttcatactaccaaatgattgcaaaagcagtggtaatcttgcttgcggtactggtagataataaaaataagtaa

SEQ ID NO: 40638 - protein, 329 aa, Photobacterium profundum SS9
MSSNAMTKTDDSKNKTGKLFTKEWLIEQKSLIALILLIVVVSFLNPNFFTVDNILNILRQTSINAIIAVGMTLVILTAGIDLSVGSVLALCGAFAATMIGLEIPAIIAVPTALLAGAALGAISGIIIAKGKVQAFIATLVTMTLLRGVTMVYTDGRPISTGFTEVADGFAWFGTGYAMGIPVPIWLMVIVFASIWYLLNHTRFGRYIYALGGNESATRLSGINVDRVKIGVYAICGLLAALAGIIVTSRLSSAQPTAGMGYELDAIAAVVLGGTSLAGGKGRIMGTLVGALIIGFLNNALNLLDVSSYYQMIAKAVVILLAVLVDNKNK

SEQ ID NO: 40639 - DNA, 1011 bp, Photobacterium profundum SS9
  CDS (1)..(1011): transl_table=11
atggaaactttaaaaaaactcagcatgatgcgctacctcaaagaagggggcatttatgcagtactatttattttattaacaattattattattcaagaaccaagctttttaagcttaagaaacctgagtaatattcttacccaatcatctgtacgtattattattgcattgggtgttgcagggcttattgttacccaaggtactgatttatccgcaggtcgtcaggtaggtttggctgcggtattatcggctaccttgcttcaagcggcagataacgttaataaggtttttcccaatgttggtgaaatcccaattgttggcgtcattatcgttgtgtgtgccgtgggtgcgctaatcggtttgattaacggcattatcgttgcgtatttacatgtgaccccgtttatagccacactgggttcaatgatcatggtatacggtgttaactcactatactttgattccgtaggggcatcaccggttgctggttttgatgagcgtttttctgaatttgctcaaggctttattcgctttggtgattttagattatcgtaccttacgttttacgccattattgccatcatatttgtctggattatatggaataaaactgtttttggtaagaacatttttgcgattgggggtaatccagaagcggcaaaagtatcgggtgttaacgtgccgatcacactgcttaaaatctatgccttatcgggtgtgttctacgcatttggcggcatgttagaagcggggcgaattggtagtgcgactaacaaccttggtttcatgtacgaacttgatgccattgctgcctgtgtagtgggtggtgtgtcatttgcgggtggtgtaggtagtgttgcaggtgttgtaacaggggtattaatctttaccgtgattaactacggcatgacgtatattggtgttagcccttactggcagtacattattaaaggcggcattattattttcgcagtagcgcttgattcaatgaagtatgcaaacaaaaaataa

SEQ ID NO: 40640 - protein, 336 aa, Photobacterium profundum SS9
METLKKLSMMRYLKEGGIYAVLFILLTIIIIQEPSFLSLRNLSNILTQSSVRIIIALGVAGLIVTQGTDLSAGRQVGLAAVLSATLLQAADNVNKVFPNVGEIPIVGVIIVVCAVGALIGLINGIIVAYLHVTPFIATLGSMIMVYGVNSLYFDSVGASPVAGFDERFSEFAQGFIRFGDFRLSYLTFYAIIAIIFVWIIWNKTVFGKNIFAIGGNPEAAKVSGVNVPITLLKIYALSGVFYAFGGMLEAGRIGSATNNLGFMYELDAIAACVVGGVSFAGGVGSVAGVVTGVLIFTVINYGMTYIGVSPYWQYIIKGGIIIFAVALDSMKYANKK

SEQ ID NO: 40641 - DNA, 1014 bp, Geobacillus kaustophilus HTA426
  CDS (1)..(1014): transl_table=11
atgagccagccagccgtttccacaacgccgtcgaaaaaaacggcgccgtccattcttgaatggttgtataaacacggcaccttgctggccattcttgccgttatcgcctacttcggcatcacgcaagaccgattttttacgtatgaaaacttcagtgacattttgcggtccatttcgatcgtgacgctcgtggcaatcggcattacgttttcgctcatcgtcgatggcttcgatttgtccgtcggctcgacggtgagcctagcgacgatcgcgagcgcagcggcgctcgtcctgtaccgccaagaaattttcatcaccctgctcgtgccgctgttgctcggcattgctgtcgggctcttgaactcgttgttgatcgtcaaattcaaattgcccgatttgctcgcgacgttggcgacgatgtacgccattaacggcgtgcagctcacctatacgaaagggttttcgatctacaacgacatgccgctgcccgatggcggcacggcgccgggcaaattcattccttcctttttatttatcggccagggagagctgttcggcgtgccgttttcggtcttgcttatgctgtttgtcgtcattgccgctcatctgtttttaacgtacacgaaacccggccgcctcttttatttgaccggggaaaaccgcgaggcggcaaggctctcaggcatcccggtcaaccgctatcggacatatgcatacgtcatcagcgggttttttgcggccttaggcggcatcgtccttgcctcgcgcatcggcaccgggcaagtgtcggccggcgcctcgcttttaatggacagcgtcgccgccgcctacatcggcttttccgtctttggcgccggcaagccgaacgtcatcggcacattgttcggctcgattttaatgggcgtgttgctgaacggcttgacgatggcaaacgttccgtattacgcccaagacattataaaaggcgccattttagtcggcgccctcgccttgtcgcattggcaaaaaaaataa

SEQ ID NO: 40642 - protein, 337 aa, Geobacillus kaustophilus HTA426
MSQPAVSTTPSKKTAPSILEWLYKHGTLLAILAVIAYFGITQDRFFTYENFSDILRSISIVTLVAIGITFSLIVDGFDLSVGSTVSLATIASAAALVLYRQEIFITLLVPLLLGIAVGLLNSLLIVKFKLPDLLATLATMYAINGVQLTYTKGFSIYNDMPLPDGGTAPGKFIPSFLFIGQGELFGVPFSVLLMLFVVIAAHLFLTYTKPGRLFYLTGENREAARLSGIPVNRYRTYAYVISGFFAALGGIVLASRIGTGQVSAGASLLMDSVAAAYIGFSVFGAGKPNVIGTLFGSILMGVLLNGLTMANVPYYAQDIIKGAILVGALALSHWQKK

SEQ ID NO: 40643 - DNA, 1200 bp, Geobacillus kaustophilus HTA426
  CDS (1)..(1200): transl_table=11
ttgtgcaacgggaggaaaatgaggatgaaaagcccgatttctatagcgaccttagagagtcaaacaaaagggaagatacgatggaaatttgattttcgttcttatacgctaattatagccttagtctttatcgctgttattttcagtgttttaactgacggagagtttgtatcgtcacgaaatttatcgaacttatttatgcagatgtctgtcatttcgattttggcgatcggcatgacactagtcattatagcaggccatattgacttatcagttggatctgttgtcggattgaccgggggaatcgctgcgattttgcaagtatggtatggctggggaacagtctctgttattgttgtggctattgttgctggcgtattaattggactttggcaaggatggtgggttgcttatcgaggtgttcctgctttcattgtaactttaggtgggatgttagtttttcgaggaattttgattggaattagcaatggcgagactgtagcgccgttagacaatagtttcgaagcgataggaaacagttatctcccttacgtaatcggctacattttagctgctgtcagcatcattttattgtttctttctttaggacgaaatagaaagaaacgaaaacagttaggcttaacgctcaattccaaaataaatgattatggcaaaacagcagtctactcgctatgcattttcgtattggtgtatatgttaaatcgttattacggtgttcctattccgatgctgatcgttgttttattggcgcttgtctttgtgtttattgccgttaaaaccccgtttggacgatatatttatgcgattggtggaaatattgaggcggccgctctatctgggatcaacatcaagcgtgttgtattggctgtcttcatcttaatgggagcgctttcggcggtggcgggtatcattttgacaagccgactcaatgcagcgacagtcagcgctggggagatgtatgaattggatgctattgctgcttgtgttattggtggcacgagtttaatggggggaaggggaaatattgttggggcgattatcggcgcccttattatggctagtatcgataacggtatgagcatgatgaacattgagaccttttggcaatacattgtgaaaggattaattttaattgttgccgtttggacggatatctcaagcaaaagtaaggcgagttga

SEQ ID NO: 40644 - protein, 399 aa, Geobacillus kaustophilus HTA426
MCNGRKMRMKSPISIATLESQTKGKIRWKFDFRSYTLIIALVFIAVIFSVLTDGEFVSSRNLSNLFMQMSVISILAIGMTLVIIAGHIDLSVGSVVGLTGGIAAILQVWYGWGTVSVIVVAIVAGVLIGLWQGWWVAYRGVPAFIVTLGGMLVFRGILIGISNGETVAPLDNSFEAIGNSYLPYVIGYILAAVSIILLFLSLGRNRKKRKQLGLTLNSKINDYGKTAVYSLCIFVLVYMLNRYYGVPIPMLIVVLLALVFVFIAVKTPFGRYIYAIGGNIEAAALSGINIKRVVLAVFILMGALSAVAGIILTSRLNAATVSAGEMYELDAIAACVIGGTSLMGGRGNIVGAIIGALIMASIDNGMSMMNIETFWQYIVKGLILIVAVWTDISSKSKAS

SEQ ID NO: 40645 - DNA, 1005 bp, Geobacillus kaustophilus HTA426
  CDS (1)..(1005): transl_table=11
atggaaagccaagtttctgttacgaacaagcgggagaaggcaggggtttcttccacggccacgtcgaaggacaaattgtatcgatttttcgaccgctatggaatgttgatgattctcattgggctcgtcattttgatgtccattctttcgccgacgttttttacaaccggcaacttattaaatatcgttcggcaaatgtcggtcgtcggcattgtcgcgattggcgtcacgattgtcattattacgaccggcattgatttgtcatcgggatccgtcattgcacttgtgtcggttgtggccgccagttttgcccacccggatacgtatcccgtgattgttccgattttgattggtcttgggttagggcttttgactggggtcataaacggaacgattatttcgaaggcgaacattgccccgtttatcgtcacattgggcatgatgacggccgcgagaggggcagcgctgttattcagcgacgggagaccgattgggaatttgtcgccatcgttcttatggattggccaaggagatgttttggggattccggttccgattctcatctttgcgcttgtaggggtcatttcttacattctcttaaataaaacgaagtttggcaaatatgtctatgcaatcggcggaaatgagcaggccgccgtcattgccggggtcaatgtcgataaatataagattttcgtttacggatacgctggtctgttgtccggattggcgggggtcatcttgacttcgcgcatttcctcggggcagccgacggcagggatgatgtatgaactcgatgccatcgctgcggcggtcattggcggtacaagccttgctggcgggattgggacgatcggcggcacgattgtcggtgcgctcattatcggggtgatgaacaacggacttgacttgttaaacgtttcgccgtattggcaacaaattctgaaaggcgtcattattacggtggcggtgttcatcgattcccgcaaaaaccggaaatcataa

SEQ ID NO: 40646 - protein, 334 aa, Geobacillus kaustophilus HTA426
MESQVSVTNKREKAGVSSTATSKDKLYRFFDRYGMLMILIGLVILMSILSPTFFTTGNLLNIVRQMSVVGIVAIGVTIVIITTGIDLSSGSVIALVSVVAASFAHPDTYPVIVPILIGLGLGLLTGVINGTIISKANIAPFIVTLGMMTAARGAALLFSDGRPIGNLSPSFLWIGQGDVLGIPVPILIFALVGVISYILLNKTKFGKYVYAIGGNEQAAVIAGVNVDKYKIFVYGYAGLLSGLAGVILTSRISSGQPTAGMMYELDAIAAAVIGGTSLAGGIGTIGGTIVGALIIGVMNNGLDLLNVSPYWQQILKGVIITVAVFIDSRKNRKS

SEQ ID NO: 40647 - DNA, 1224 bp, Geobacillus kaustophilus HTA426
  CDS (1)..(1224): transl_table=11
atgggagcactaatgcaaaaaacagcacaacattctccaaagcggtctacagaaagtcagcagttatcgttgaagcagatgatcaaaaacaatatgagaagttacagtatggtcatcgctctcattttgattatgttattgttccaagtgttaactggaggcattttgttgcggccattaaatattacaaacttgattttgcaaaacagttatattttggtgctggctgttggcatgatgcttgttattatcactgggcatattgatttgtccgtcggatcggtggcagcttttgtcggggcattggctggcattctgatggttcagcaccatgtatcagtatggttgacggtgctcatttgtttattgctcggtgccttgattggcgcatggcaaggattttgggtagcgtacgtaaaaattccatcattcattgttacattagcagggatgttgctgttccgaggattaacgatggtcattttggaaggacagtcgatcgccccgttcccaaaaacattccaaaatatgagttccgggtttctccctgacgtatttcatggaggagagatccatctgttcaccattgtgatcggcttcgccgcttctctcttatttgttgtactggaatggagaaaacgaaacagccagaaaaaatatgggtttgcggtcacccctgcgtcgatgtttaccttgaagctggctgtgattgccgctgtaatcatgattttcacttatattttagcgacgtacgaaggaattccaacgattctagtgattttggctgcgttgatcatcgcttattcctttgtggcgaatcggacggtcgtcggccgccatatttatgcgattggtggtaatgagaaggctgcgcaactgtccgggattaaaacgaaacgtgtcacgttttgggtgtttgtcaacatgggcgtgttggccgctttgtccggattgatttttgccgctcgcctcaacgctgcgacgccgaaagcggggaacttgtttgagctcgatgccattgcggcgtgctttattggaggcgcatccgcttatggaggaatcggcacgattagcggagcgatcatcggcggtctagtcatgggcgtaatgaataacgggatgtccttgctggggctcggtattgactggcaacaggccatcaaagggcttgtattgcttattgctgtggcttttgatatttacaacaaaaataaagctgcttaa

SEQ ID NO: 40648 - protein, 407 aa, Geobacillus kaustophilus HTA426
MGALMQKTAQHSPKRSTESQQLSLKQMIKNNMRSYSMVIALILIMLLFQVLTGGILLRPLNITNLILQNSYILVLAVGMMLVIITGHIDLSVGSVAAFVGALAGILMVQHHVSVWLTVLICLLLGALIGAWQGFWVAYVKIPSFIVTLAGMLLFRGLTMVILEGQSIAPFPKTFQNMSSGFLPDVFHGGEIHLFTIVIGFAASLLFVVLEWRKRNSQKKYGFAVTPASMFTLKLAVIAAVIMIFTYILATYEGIPTILVILAALIIAYSFVANRTVVGRHIYAIGGNEKAAQLSGIKTKRVTFWVFVNMGVLAALSGLIFAARLNAATPKAGNLFELDAIAACFIGGASAYGGIGTISGAIIGGLVMGVMNNGMSLLGLGIDWQQAIKGLVLLIAVAFDIYNKNKAA

SEQ ID NO: 40649 - DNA, 945 bp, Geobacillus kaustophilus HTA426
  CDS (1)..(945): transl_table=11
atgatgggagcaaagcgaaaatgggatgtgaaaaaactagggcctttgatcgggctgtttctgctatgcatcgtgctttccatattgagcgatgactttttgacgatggacaactggctcaatctcctgcggcaagtatcgattaacgcgctcatcgcctttggcatgacgtttgtcattttaacgggaggcattgatttatcggtcggttcggtgttggcgttatcaagcacgatcacagcaggaatgatggcgcaaggggtcaatggatttgttgcgatattcgtcggcttattagcaggcgcggccatgggcgtcttgaacggagtcttggtcaccaaaggaaaagtggctccttttattgccacgctggcgaccatgacggcgtttcgcggcttgactctcgtttacacggacggtcgcccgattacagggtttgcgtctgatgacatcctgtttcagatgatggggcgcggttatttcttcggcattcccgtacctattatattgatgctcacggtctatatcgctttgtatgtagtattgaaaaagactacatttggccgccatacgtacgcgattggcgggaacgaagaagcgagccgtctatcgggacttcgcgttgatcgactcaaaatatatgtgtatgccctaacaggggcgttatctgctttggcggggctcattttaacttcccgtttgaattccgcgcagccgacagcgggaacggcgtacgagttggatgccattgcggccgttgttttaggcggcaccagtttgtcaggaggaagaggctggattttcggcacgttagtcggcgccttgattatcggtgtattgaacaatggattgaacttgctcaatgtgtcgtcgttttaccagcaagtcatcaaaggagcggtcattcttcttgcggtgctgttagaccgccgcaaagaagtatga

SEQ ID NO: 40650 - protein, 314 aa, Geobacillus kaustophilus HTA426
MMGAKRKWDVKKLGPLIGLFLLCIVLSILSDDFLTMDNWLNLLRQVSINALIAFGMTFVILTGGIDLSVGSVLALSSTITAGMMAQGVNGFVAIFVGLLAGAAMGVLNGVLVTKGKVAPFIATLATMTAFRGLTLVYTDGRPITGFASDDILFQMMGRGYFFGIPVPIILMLTVYIALYVVLKKTTFGRHTYAIGGNEEASRLSGLRVDRLKIYVYALTGALSALAGLILTSRLNSAQPTAGTAYELDAIAAVVLGGTSLSGGRGWIFGTLVGALIIGVLNNGLNLLNVSSFYQQVIKGAVILLAVLLDRRKEV

SEQ ID NO: 40651 - DNA, 1011 bp, Salmonella enterica subsp. enterica serovar Paratyphi A str. ATCC
  CDS (1)..(1011): transl_table=11
atgagtgcgttaaacaagaaaagctttttgacctggctgaaagagggcggaatttacgtcgttcttttagtgttgctggcgattattattttccaggacccgacttttttaagtttgctgaatttaagtaatattctgacgcaatcttcggtacgtattattatcgcgctgggcgtggcgggactcatcgtcacccaggggacagacctgtcggcggggcgtcaggtagggctggcggcggtcgtggcggcaacattactgcaatcaatggaaaacgccaataaagtgtttccggaaatggcgaccatgccgattgcgctggtcatcctgattgtctgcgcgattggcgcggtgattggcctggtgaacggcatcatcattgcttacctgaacgtgacgccgtttattaccacgcttggcacgatgattatcgtttatgggatcaactccctttactatgattttgtcggcgcttcgcccatttccggctttgacagcggcttttccacctttgcacagggctttgtggcgatgggcagtttccggctctcatacatcaccttttacgctctgattgcggtagcgtttgtctgggtgctgtggaataagacccgttttggtaaaaacatttttgctattggcggcaacccggaggcggcgaaagtttctggcgtaaacgtggcgctgaacctgctgatgatttatgcgctctccggcgtgttttatgccttcggcagcttactggaagcagggcgtattggttctgccaccaacaacctcggctttatgtatgaactggatgcgattgccgcgtgcgttgtcgggggcgtatcgtttagcggcggagtggggacggtcttcggcgtggtgaccggcgtcattatctttaccgtcatcaactatggcctgacctatatcggggtaaacccgtactggcagtacattatcaaaggcggcattatcattttcgccgtggcgctggactcgctgaaatacgcgcgtaagaagtag

SEQ ID NO: 40652 - protein, 336 aa, Salmonella enterica subsp. enterica serovar Paratyphi A str. ATCC
MSALNKKSFLTWLKEGGIYVVLLVLLAIIIFQDPTFLSLLNLSNILTQSSVRIIIALGVAGLIVTQGTDLSAGRQVGLAAVVAATLLQSMENANKVFPEMATMPIALVILIVCAIGAVIGLVNGIIIAYLNVTPFITTLGTMIIVYGINSLYYDFVGASPISGFDSGFSTFAQGFVAMGSFRLSYITFYALIAVAFVWVLWNKTRFGKNIFAIGGNPEAAKVSGVNVALNLLMIYALSGVFYAFGSLLEAGRIGSATNNLGFMYELDAIAACVVGGVSFSGGVGTVFGVVTGVIIFTVINYGLTYIGVNPYWQYIIKGGIIIFAVALDSLKYARKK

SEQ ID NO: 40653 - DNA, 1044 bp, Salmonella enterica subsp. enterica serovar Paratyphi A str. ATCC
  CDS (1)..(1044): transl_table=11
atgttgaaattcatccaaaataaccgggaagcgacggcactgctggcaatagtctgtttattcgtgtttcctggcgcgctggatagccagtatttgagcgtgcaaacgctgacaatggttttcagtagcgcgcaaattttgatgctgttggcgattggcgcgacgatggtaatgctcacccgcaatattgatgtatcggtgggctcgacgacaggaatgtgcgcggtattgctgggagtgatgttaaacgccggctatagcctgccggtcgcctgcctggccacactaatattaggaattgtcgccggattttttaatggcgtactggttgcctggttgaagatacccgccattgtcgccacgctgggaacgctgggcttgtatcgtgggatcatgctgctatggacagggggaaaatggattgaaggattacccgcaggcttaaagcaactctctgctccggtgtttctgggaatttccgcaatcggctggtttaccctggtgttagcgctgcttatggcctggctcctggcgaaaaccgcctttggccgcaatttttacgccaccggcgataacctgcagggcgcccggcaattgggtgtccgtaccgagatggtacgcatcatggcattttcacttaatggcggtatggcggcattggctggaatcgtgtttgcctcgcagattggcttcattcccaatcaaaccggcacggggctggaaatgaaagccatcgcggcctgcgtattggggggaattagcctgttaggcgggtcaggcacggtcatcggcgctattctcggcgcttattttcttacgcaaatcgatagtgtgttagtgctgctgcgtatccccgcctggtggaacgattttattgctggcctggtattgttgggcgtactggtattcgatgggcggctgcgttgcgcattacaacgcaatctgcgccgccagaaatatgcccgttttatatcaccacccactccactacagacggaagcaaaaacgcacgcacaacagaataaaaacaaagaggtggcatga

SEQ ID NO: 40654 - protein, 347 aa, Salmonella enterica subsp. enterica serovar Paratyphi A str. ATCC
MLKFIQNNREATALLAIVCLFVFPGALDSQYLSVQTLTMVFSSAQILMLLAIGATMVMLTRNIDVSVGSTTGMCAVLLGVMLNAGYSLPVACLATLILGIVAGFFNGVLVAWLKIPAIVATLGTLGLYRGIMLLWTGGKWIEGLPAGLKQLSAPVFLGISAIGWFTLVLALLMAWLLAKTAFGRNFYATGDNLQGARQLGVRTEMVRIMAFSLNGGMAALAGIVFASQIGFIPNQTGTGLEMKAIAACVLGGISLLGGSGTVIGAILGAYFLTQIDSVLVLLRIPAWWNDFIAGLVLLGVLVFDGRLRCALQRNLRRQKYARFISPPTPLQTEAKTHAQQNKNKEVA

SEQ ID NO: 40655 - DNA, 1299 bp, Silicibacter pomeroyi DSS-3
  CDS (1)..(1299): transl_table=11
atgactcattccgaggcggagctgtccccggcacatcccaagaaatcctttgtacagacgctggaactggatctgcgccttctgggcatgatcggggcctttgcgatcctgtgcgtcgggttcgacatcgtgaccggcggccgtttcctgacaccgcgcaacatcttcaacctgaccatccagaccgtttcggttgcgatcatggccaccggcatggtgttcgtcatcgtcacccgtcatatcgatctgagcgtcggcgccctgctggccacctgctcggcagtgatggcgatgacccagaccgagatcctgcccaacatgctgggcctggggctgggccatccgctgatcccctgggtgaccatccttgtcggcctgctggtggggtcgctgatcggtgcctttcacggctggctggtgggctatctcgccatccccgcctttatcgtcacgctgggcggactgctggtctggcgcaatgtcggctggtacctgaccagcggcaagaccatcggcccgctggacccgaccttcatgcaattcggcggcatcaatggaacgctgggcgccacctggtcctggatcgtcggtctgctggcgctggccgccgcgctctatggtctgtgggcgagccgcaagaacaagctccgccatgggttcccggtcaagccgctctgggccgagggggttctggcggcgctgatctcgggcgcgatcctgggctttgtcgccatcctgaacgcctatgaggtgccactggcccggctcaagcgcgatttcgcggcgcagggcctgaccttgcccgaaggctataccgaggcttatggcatcccgatctcggtgcttctgctgatctttatcgcggtgggcatgaccatgctggcacgccgaacccggctgggccgctatatctttgccaccgggggcaacccggatgcggcggaactgagcggcatcaacacccggctgctgacggtcaagatctttgcgctgatgggcgcgctctgcgccatctcggcggtggtggcctcggcccggctgaccaaccattccaacgacatcggcacgctggacgaactgcgcgtgatcgcggccgccgtgatcggcggcaccgcgctggcggggggcttcggcaccatccacggcgccatcctgggcgcgctgatcatgcagtcgctgcaatcgggcatggccatggtcggtgtcgacgcgcccttgcagaatatcgtcgtgggcgcggttctggtgctggcggttctgatcgacattctctatcgcagaaagacgggggcacggtga

SEQ ID NO: 40656 - protein, 432 aa, Silicibacter pomeroyi DSS-3
MTHSEAELSPAHPKKSFVQTLELDLRLLGMIGAFAILCVGFDIVTGGRFLTPRNIFNLTIQTVSVAIMATGMVFVIVTRHIDLSVGALLATCSAVMAMTQTEILPNMLGLGLGHPLIPWVTILVGLLVGSLIGAFHGWLVGYLAIPAFIVTLGGLLVWRNVGWYLTSGKTIGPLDPTFMQFGGINGTLGATWSWIVGLLALAAALYGLWASRKNKLRHGFPVKPLWAEGVLAALISGAILGFVAILNAYEVPLARLKRDFAAQGLTLPEGYTEAYGIPISVLLLIFIAVGMTMLARRTRLGRYIFATGGNPDAAELSGINTRLLTVKIFALMGALCAISAVVASARLTNHSNDIGTLDELRVIAAAVIGGTALAGGFGTIHGAILGALIMQSLQSGMAMVGVDAPLQNIVVGAVLVLAVLIDILYRRKTGAR

SEQ ID NO: 40657 - DNA, 1161 bp, Bacillus clausii KSM-K16
  CDS (1)..(1161): transl_table=11
atgaaagcatttcttaatattgtccaaaacaacatgcgccaatatagcatgacttgtgcgttgctgtttattatgcttttattccagctgttaacagatggcattttgctgcagccgttaaatattacaaatatcattttacaaaacagctatattttaattttggcgattggaatggtcatgattatcattacaggccatattgatttatccgttggctctgtcgctgcttttatcggtgcgctgtcagcgattttaatgattgagttaaatgtccacccagtgttagctgttctcatctgcctcatcgccggcgctctcgttggcgcttggcaagggttttgggtcgcatatgtacaaattcctgccttcattgtgacattagcaggcatgctcatttttagaggaattacgttaatcatgcttgaagggcagtccattgcttcctatccgccaacttttcaacaactaagctcagggtttttgcctgatttgtttaatggcgagtcgattcatcttttttcgatgttccttggagtcgtgctaacagctgttttgatcgcgatccaaattaaggggagaaagaaacaacttcatcatgatttgccagttgttactccggcctggtttaccgttaaattagtagcaatcgcagcagttattctagtgtttacctttgtattagccagttaccgcggcattccaaacattcttatcttgcttgtcgccttaattgccttttacgccttcgtcacgaaaaaaacggtgtttggccgtcacatttatgcggttggcgggaatgaaaaagccgccgcattgtctgggattaaaacaaaacgggtgacgtttgctgtgtttgtcaacatggggatacttgcagcgctgtcaggcctcatttttgccgctaggctaaatgctgccaccccacgggcagggaatttattcgaactcgatgcgatagcggctgcctttattggcggtgcttctgcttatggcggcgtcgggacgatcattggcgctgtcgtcggcggcctcgtcatgggtgtgatgaacaacggcatgtcgattctcggacttggcatcgattggcaacaggctattaaagggcttgtgctattggctgctgtcgcattcgacgtcgtcaataagcgccgtggataa

SEQ ID NO: 40658 - protein, 386 aa, Bacillus clausii KSM-K16
MKAFLNIVQNNMRQYSMTCALLFIMLLFQLLTDGILLQPLNITNIILQNSYILILAIGMVMIIITGHIDLSVGSVAAFIGALSAILMIELNVHPVLAVLICLIAGALVGAWQGFWVAYVQIPAFIVTLAGMLIFRGITLIMLEGQSIASYPPTFQQLSSGFLPDLFNGESIHLFSMFLGVVLTAVLIAIQIKGRKKQLHHDLPVVTPAWFTVKLVAIAAVILVFTFVLASYRGIPNILILLVALIAFYAFVTKKTVFGRHIYAVGGNEKAAALSGIKTKRVTFAVFVNMGILAALSGLIFAARLNAATPRAGNLFELDAIAAAFIGGASAYGGVGTIIGAVVGGLVMGVMNNGMSILGLGIDWQQAIKGLVLLAAVAFDVVNKRRG

SEQ ID NO: 40659 - DNA, 945 bp, Bacillus clausii KSM-K16
  CDS (1)..(945): transl_table=11
atgttcaccaataaacgagtcaaggcattaacagcgacgcttggtccatttatcggccttttccttatcatattaattattagcattctaaacccaggattcttatcagcgccgaatctcctcaatgtccttcggcaagtatccattaatgcgctcattgcatttggaatgacgtttgtcattttgacaggtgggattgatttatcagttggtgcaattcttgctttttctggagcggtcactgcaaccttactttcgtcagggatggacccgatcttagcgatcttaattggattgcttgttggagcagcacttggtgcaataaatggcataatcattgcaaaaggaaaagtagcaccatttattgcgacactggcgacgatgacgatttaccgaggcgcgaccttaatgtttacagatggcaggcctgtatcaaacttaggtgattctacattgttccaaatgcttggaggcggctacttttttggaattccaatgccggcgattacgatgatgattagctttgttatcttgtacttgattttaaagaaaaccacatttggccgtcgcgtatatgcagttggtggcaatgaggaagcatcgattctatcaggcatcaaagtcgaccgaattaagatttacgtatactctctgactggatttttggcagccgttgctggtgtgattttaacgtcgaggctaaattcagctcaaccaacggctggcacgatgtacgaacttgacgcgattgctgcggttgtgctcgggggaacgagtttaacaggtggaaaagggtggattgtcggaacgcttattggtgccttaatcataggagtgttgaataatgggttgaatttgcttggtgtcagctcttttttccagcaaatggttaaaggaagtgtcattttacttgcagtcttgcttgatcgcagaaaaacagcttaa

SEQ ID NO: 40660 - protein, 314 aa, Bacillus clausii KSM-K16
MFTNKRVKALTATLGPFIGLFLIILIISILNPGFLSAPNLLNVLRQVSINALIAFGMTFVILTGGIDLSVGAILAFSGAVTATLLSSGMDPILAILIGLLVGAALGAINGIIIAKGKVAPFIATLATMTIYRGATLMFTDGRPVSNLGDSTLFQMLGGGYFFGIPMPAITMMISFVILYLILKKTTFGRRVYAVGGNEEASILSGIKVDRIKIYVYSLTGFLAAVAGVILTSRLNSAQPTAGTMYELDAIAAVVLGGTSLTGGKGWIVGTLIGALIIGVLNNGLNLLGVSSFFQQMVKGSVILLAVLLDRRKTA

SEQ ID NO: 40661 - DNA, 1023 bp, Gluconobacter oxydans 621H
  CDS (1)..(1023): transl_table=11
atgtcgcttgaaaccactgttccggcaacgccctcacagcagccgccgaaggcccccccactcaaggcgctcgtctcccgtctggcaggaaatccgctggggggcgtcattgcggcgctggtcatcatattcggggcgtcctgtgcgctttcaccgcattttctgacgaccttcaacatggtcatcattgcccgggcgctggcctttatcgggctggtcaccatcggccagtccatcctgatgatcctcggcgagcttgatctgtccgtcggtgcgattggcgggcttgcgggtgtggtgggtggcatcctgatggtgcagctcggactcaatccctggctgtcgctggggctgtgcctgctgatgggtggagcatgcggcctgctgaacggggcgctgatcacgcagctccgtctccactcgctggtgctgacgatcggcatggccggcgtatatggcggtgccaacctcgttgcgaccaagggtgttgcgatcacgggtgtgccgcgggacatcacgttccttggccgtgggctcgtgatgggcgtgccggtgccgttcctggtgctgctggtctgtctggcgatcgtggcattcgtcatgctgcgcacaccggtcgggcgttatatctacgccatcggcagcaatcctgatgcggcgcggatgctgggcatccgggtcaatgcgatccgcatgggggcgttcgcgctggccgggttcctttcggcgctggcaggcatcctgatggtggcgcgtctgggcacggcccagccttccatcggtgacacctgggtgctcggaccgattgccgctgctgtcattggtggcgtggcgacgacgggtggcattggcagcccgatcggggcggttctgggcgccgtcatcatcggcatcatcgaagacatcatcgttctgtttggcatctcgccgtactggcagtcggtcgtcagtggagggatcgtcgtgctggcgatttccttcgatgcgctggcccgccgctacctcaaccgtgatgccgtctga

SEQ ID NO: 40662 - protein, 340 aa, Gluconobacter oxydans 621H
MSLETTVPATPSQQPPKAPPLKALVSRLAGNPLGGVIAALVIIFGASCALSPHFLTTFNMVIIARALAFIGLVTIGQSILMILGELDLSVGAIGGLAGVVGGILMVQLGLNPWLSLGLCLLMGGACGLLNGALITQLRLHSLVLTIGMAGVYGGANLVATKGVAITGVPRDITFLGRGLVMGVPVPFLVLLVCLAIVAFVMLRTPVGRYIYAIGSNPDAARMLGIRVNAIRMGAFALAGFLSALAGILMVARLGTAQPSIGDTWVLGPIAAAVIGGVATTGGIGSPIGAVLGAVIIGIIEDIIVLFGISPYWQSVVSGGIVVLAISFDALARRYLNRDAV

SEQ ID NO: 40663 - DNA, 858 bp, Lactobacillus acidophilus NCFM
  CDS (1)..(858): transl_table=11
ttgccccccaataatttattaaacttattacgtcaagcttcggttaatgctttaattgcgtttggtatgacgtttgtaattttaacggctggtatcgatttatctgtaggctcaattctagcttttactggtgcaattatagccatgatgattttaaatggtactcctgcatggttagctggttttataggtttaatgcttggtgctgttctaggtgccataaacggtttgtttattacttggggtagagtaacgccatttattgctacattagctacgatgactatttggagaggcgctacttatgtatttacaggtggtaacccagttactgggggaaaaatgaatacaagtttcttctttcaatttattgggcaaggttacttatttggaattccgtttccagtcattattacgttaatcgcttttataatttgttatattttacttcataaaactgcatttggtcgtaaaatatttgctcttggtggtaatgagaaagctgcttttgttgcgggtgtaaaaactaaaaaacttttaattataatttatactatttcaggattattagcagctcttgccggttttattttaacttcaagattaggatcagcacaaccagatgcgggtatgtcatatgaaatggatgccattgcctcaacagttattggtggtgctagtctaatgggtggtaaaggtagaatgtcaggcacattagttggtgctttacttattgcttctttaagtaatggtatgaatttattaggtattaatagtttttaccagcaaattgttaaaggtgttgtaattttaattgctgttatgatagattctcaaactcaaagaaatcgtgaatga

SEQ ID NO: 40664 - protein, 285 aa, Lactobacillus acidophilus NCFM
MPPNNLLNLLRQASVNALIAFGMTFVILTAGIDLSVGSILAFTGAIIAMMILNGTPAWLAGFIGLMLGAVLGAINGLFITWGRVTPFIATLATMTIWRGATYVFTGGNPVTGGKMNTSFFFQFIGQGYLFGIPFPVIITLIAFIICYILLHKTAFGRKIFALGGNEKAAFVAGVKTKKLLIIIYTISGLLAALAGFILTSRLGSAQPDAGMSYEMDAIASTVIGGASLMGGKGRMSGTLVGALLIASLSNGMNLLGINSFYQQIVKGVVILIAVMIDSQTQRNRE

SEQ ID NO: 40665 - DNA, 987 bp, Vibrio fischeri ES114
  CDS (1)..(987): transl_table=11
atgagcaccaaatcaatgacttcaactgaaacacaacaaaagaaaggcggcattttttctaaagagtggctgattgaacaaaaatcattaatcgcgctattgcttttgattgtcgtggtatcctttttgaacgacaacttttttactgtcgacaacatcctaaacatcctacgtcaaacctcagttaacgcgattattgcggtaggtatgacgttagttatcttaacggcaggtatcgacttaagcgttggctctgtattagccctttgtggtgcttttgcggcaaccatgattggccttgaaattccggtgatgattgcggttccaacagcactacttgctggtgcagctctaggtgcaatcagcggtattattatcgcaaaaggtaaagttcaagcattcattgcgacgctagtaaccatgacgttattacgtggtgtgacaatggtttacacagaaggtcgccctatctctactggttttactgatgttgctgacagctttgcatggttcggtacaggttacgcgcttggtatcccagttcctatctggctaatggttatcgtgtttgcatctgtatggtacttactaaaccacacacgttttggtcgctacgtttatgctctaggtggcaatgaatcagcaactcgcctatctggtatcaatgtggatcgcgttaagatcggtgtttacgctatctgtggtctacttgctgcactggctggtttaatcgtaacgtctcgtctttcttcagctcaaccaacagcaggtatgggctacgagctagacgctatcgcagcggttgtacttggtggtacaagccttgcgggtggtaaaggtcgcatcatgggtacattaattggtgcgcttatcatcggcttcttaaacaacgctctgaacttattagatgtttcttcttactaccaaatgattgccaaagcagtggttatcctactggcagtattagtggacaacaaaaacaagtaa

SEQ ID NO: 40666 - protein, 328 aa, Vibrio fischeri ES114
MSTKSMTSTETQQKKGGIFSKEWLIEQKSLIALLLLIVVVSFLNDNFFTVDNILNILRQTSVNAIIAVGMTLVILTAGIDLSVGSVLALCGAFAATMIGLEIPVMIAVPTALLAGAALGAISGIIIAKGKVQAFIATLVTMTLLRGVTMVYTEGRPISTGFTDVADSFAWFGTGYALGIPVPIWLMVIVFASVWYLLNHTRFGRYVYALGGNESATRLSGINVDRVKIGVYAICGLLAALAGLIVTSRLSSAQPTAGMGYELDAIAAVVLGGTSLAGGKGRIMGTLIGALIIGFLNNALNLLDVSSYYQMIAKAVVILLAVLVDNKNK

SEQ ID NO: 40667 - DNA, 1011 bp, Salmonella enterica subsp. enterica serovar Choleraesuis str
  CDS (1)..(1011): transl_table=11
atgagtgcgttaaacaagaaaagctttttgacctggctgaaagagggcggaatttacgtcgttcttttagtgctgctggcgattattattttccaggacccgacttttttaagtttgctgaatttaagtaatattctgacgcaatcttcggtacgtattattatcgcgctgggcgtggcgggactcatcgtcacccaggggacagacctgtcggcggggcgtcaggtagggctggcggcggttgtggcggcaacattactgcaatcaatggaaaacgccaacaaagtgtttccggaaatggcgaccatgccgattgcgctggtcatcctgattgtctgcgcgattggcgcggtgattggcctggtgaacggcatcatcattgcttacctgaacgtgacgccgtttattaccacgcttggcacgatgattatcgtttatgggatcaactccctttactatgactttgtcggcgcttcgcccatttccggctttgacagcggcttttccacctttgcgcagggctttgtggcgatgggcagtttccggctctcctacatcaccttttacgctctgattgcggtagcgtttgtctgggtgctgtggaataagacccgctttggtaaaaacatttttgctattggcggcaacccggaagcggcgaaagtttctggcgtaaacgtggcgctgaacctgctgatgatttatgcgctctccggcgtgttttatgccttcggcggcttactggaagcagggcgtattggttctgccaccaataacatcggctttatgtatgaactggatgcgattgccgcgtgcgtggtcgggggcgtatcgtttagcggcggagtgggtacggtcttcggcgtggtgaccggcgtcattatctttaccgtcatcaactacggcctgacctatatcggggtaaacccgtactggcagtacattatcaaaggcggcattatcattttcgccgtggcgctggactcgctgaaatacgcgcgtaagaagtag

SEQ ID NO: 40668 - protein, 336 aa, Salmonella enterica subsp. enterica serovar Choleraesuis str
MSALNKKSFLTWLKEGGIYVVLLVLLAIIIFQDPTFLSLLNLSNILTQSSVRIIIALGVAGLIVTQGTDLSAGRQVGLAAVVAATLLQSMENANKVFPEMATMPIALVILIVCAIGAVIGLVNGIIIAYLNVTPFITTLGTMIIVYGINSLYYDFVGASPISGFDSGFSTFAQGFVAMGSFRLSYITFYALIAVAFVWVLWNKTRFGKNIFAIGGNPEAAKVSGVNVALNLLMIYALSGVFYAFGGLLEAGRIGSATNNIGFMYELDAIAACVVGGVSFSGGVGTVFGVVTGVIIFTVINYGLTYIGVNPYWQYIIKGGIIIFAVALDSLKYARKK

SEQ ID NO: 40669 - DNA, 993 bp, Salmonella enterica subsp. enterica serovar Choleraesuis str
  CDS (1)..(993): transl_table=11
atgacaacccaggctgtttctggtcgccgttatttcactaaagcgtggcttcttgagcagaagtcgctcattgccctgctggtgttgatcgcgattgtttcgacgttgagccccaacttttttaccgttaataatctgttcaatattcttcaacagacctccgtcaacgccattatggcggtggggatgacgttggtgattctgacatcggggatcgatctgtccgtcggttccctgctggcgctcaccggcgcggttgccgcttcaatcgtcggcgttgaagtgaatgcgctggtcgcggttgccgccgcgctggcgctgggcgctgcgattggcgccgtcactggcgttatcgtcgcgaaaggccgcgtacaggcgtttatcgctacgctggtgatgatgctgctactgcgcggtgtaacgatggtttacaccgacggtagcccggtcaacaccggctttaccgataacgccgatctgtttggctggttcggtatcggccgtccgctgggcgttcctacgccggtctggatcatggctatcgtctttatcgccgcctggtatatgctgcatcacacccgtctgggacgctatatctacgcgctgggcggtaacgaagcggcgacgcgcctgtctggcattagcgtgagcaaagtgaaaattatcgtctattcactttgcggcctgacagcgtcgctggcgggcatcattgaagtggcgcgcctctcttccgcgcagccgacggcgggtaccggctatgagctggatgctattgccgccgtggtgctgggcggcaccagccttgcaggcggtaaaggacgcattgttgggacattgatcggcgcattgattctcggcttccttaataatggtttgaatttgttaggtgtttcctcctattaccagatgatcgtcaaagcggtggtgattttactggcggtactggtagacaacaaaagcagtaacaacgactacaggacatctgaaatatga

SEQ ID NO: 40670 - protein, 330 aa, Salmonella enterica subsp. enterica serovar Choleraesuis str
MTTQAVSGRRYFTKAWLLEQKSLIALLVLIAIVSTLSPNFFTVNNLFNILQQTSVNAIMAVGMTLVILTSGIDLSVGSLLALTGAVAASIVGVEVNALVAVAAALALGAAIGAVTGVIVAKGRVQAFIATLVMMLLLRGVTMVYTDGSPVNTGFTDNADLFGWFGIGRPLGVPTPVWIMAIVFIAAWYMLHHTRLGRYIYALGGNEAATRLSGISVSKVKIIVYSLCGLTASLAGIIEVARLSSAQPTAGTGYELDAIAAVVLGGTSLAGGKGRIVGTLIGALILGFLNNGLNLLGVSSYYQMIVKAVVILLAVLVDNKSSNNDYRTSEI

SEQ ID NO: 40671 - DNA, 1044 bp, Salmonella enterica subsp. enterica serovar Choleraesuis str
  CDS (1)..(1044): transl_table=11
atgttgaaattcatccaaaataaccgggaagcgacggcactgctggcaatagtctgtttattcgtgtttcctggcgcgctggatagccagtatttgagcgtgcaaacgctgacaatggttttcagtagcgcgcaaattttgatgctgttggcgattggcgcgacgatggtaatgctcacccgcaatattgatgtatcggtgggctcgacgacaggaatgtgcgcggtattgctgggagtgatgttaaacgccggctatagcctgccggtcgcctgcctggccacactaatattaggaattgtcgccggattttttaatggcgtactggttgcctggttgaagatacccgccattgtcgccacgctgggaacgctgggcttgtatcgtgggatcatgctgctatggacaggggggaaatggattgaaggattacccgcaggcttaaagcaactctctgctccggtgtttctgggaatttccgcaatcggctggtttaccctggtgttagcgctgcttatggcctggctcctggcgaaaaccgcctttggccgcaatttttacgccaccggcgataacctgcagggcgcccggcaattgggtgtccgtaccgagatggtacgcatcatggcattttcacttaatggcggtatggcggcattggctggaatcgtgtttacctcgcagattggcttcattcccaatcaaaccggcacggggctggaaatgaaagccatcgcggcctgcgtattggggggaattagcctgttaggcgggtcaggcacggtcatcggcgctattctcggcgcttattttcttacgcaaatcgatagtgtgttagtgctgctgcgtatccccgcctggtggaacgattttattgccggcctggtattgttgggcgtactggtattcgatgggcggctgcgttgcgcattacaacgcaatctgcgccgccagaaatatgcccgttttatatcaccacccactccacttcaggcggaagcaaaaacgcacgcacaacagaataaaaacaaagaggtggcatga

SEQ ID NO: 40672 - protein, 347 aa, Salmonella enterica subsp. enterica serovar Choleraesuis str
MLKFIQNNREATALLAIVCLFVFPGALDSQYLSVQTLTMVFSSAQILMLLAIGATMVMLTRNIDVSVGSTTGMCAVLLGVMLNAGYSLPVACLATLILGIVAGFFNGVLVAWLKIPAIVATLGTLGLYRGIMLLWTGGKWIEGLPAGLKQLSAPVFLGISAIGWFTLVLALLMAWLLAKTAFGRNFYATGDNLQGARQLGVRTEMVRIMAFSLNGGMAALAGIVFTSQIGFIPNQTGTGLEMKAIAACVLGGISLLGGSGTVIGAILGAYFLTQIDSVLVLLRIPAWWNDFIAGLVLLGVLVFDGRLRCALQRNLRRQKYARFISPPTPLQAEAKTHAQQNKNKEVA

SEQ ID NO: 40673 - DNA, 1005 bp, Brucella abortus biovar 1 str. 9-941
  CDS (1)..(1005): transl_table=11
gtgtccaccacagaaaacaattcatcgacgagctggtttggctccgaacgccgcaggctggtgatccaggaatacggcatattcatcgccttcctgcttttggccacgattctctcgttctccaacgaatatttcctcaccgcgggcaatatttccaacgtcctgttgcagacctcgatcaacggcattctcgccatcggcatgacgttcgttattctgacgcgcggtatcgacctttccgttggctccgtggttgccttggctggcattgtgagcgccagctttgcaaccacatctgcaatggcgggtattgcgggcgcaccatattcaccgtttatagccatttgcgtcggcctgctggtggggataggttgcggcgcactggtcggtacgattgtctcgcgctttgcggttccagccttcgtggcaacattgggcatgctttccgcagcgcgcggcctgacgctcatctatggcggcggcaagcctgtgcctgcgcttgttccggatttccggtggattggaaccggcaatatactgggtgttccggtaccggtcattctgcttgcaatcgtgttcctggtatcgtggtggatcctcaaccgatcgaggtttggccgctatatctatgcggttggcggcaatcctcatgctgcgaacacctccggcatcaatatctccagggtgcgtttttcggtttatgtcatttcaggcgggttggcgggccttgccgggatgattctgtctgcccgcaccgggtctgccttgccgcaagcgggtatcagttatgaactggacgccatcgcagcggtcgtcattggcggcaccagcctgtctggtggcatcggtcgcatcaccggaacccttatcggcgcgctcatcattggcgtcatgaacaacggtctcgatctgatgggcatccagtcctactaccagcaggttctcaagggtgcgctgatcgtgggagcggtcatgctcgaccagaaacgcagtcagggaggctag

SEQ ID NO: 40674 - protein, 334 aa, Brucella abortus biovar 1 str. 9-941
MSTTENNSSTSWFGSERRRLVIQEYGIFIAFLLLATILSFSNEYFLTAGNISNVLLQTSINGILAIGMTFVILTRGIDLSVGSVVALAGIVSASFATTSAMAGIAGAPYSPFIAICVGLLVGIGCGALVGTIVSRFAVPAFVATLGMLSAARGLTLIYGGGKPVPALVPDFRWIGTGNILGVPVPVILLAIVFLVSWWILNRSRFGRYIYAVGGNPHAANTSGINISRVRFSVYVISGGLAGLAGMILSARTGSALPQAGISYELDAIAAVVIGGTSLSGGIGRITGTLIGALIIGVMNNGLDLMGIQSYYQQVLKGALIVGAVMLDQKRSQGG

SEQ ID NO: 40675 - DNA, 1191 bp, Brucella abortus biovar 1 str. 9-941
  CDS (1)..(1191): transl_table=11
atgagcgagaatgtaatccagagcggccagcagagcagcgtggggcgctatctcaagaacaatctgcgtgaatccgggatgctgctttcgctcgttgcaatcatgatcttcttccagatcgtgaccggcggcgttctcatgaagccgctgaacctcaccaatctcgttttgcagaacagctatatcgtcatcatggcgcttggaatgctgctcatcatcgtcacgggccatatcgatctttcggtcggttcggtctgcggctttatcggggcgctcgctgccgtcatgatggtaaagctcggcattccctttcccattgcggccattctctgcctcattgtcggcgggttgatcggcgcgatccagggtttttgggtcgcctatttcaatatcccctccttcattgtgacattggccggtatgctcgtgttcaaggggatgatgcttgccgttctgggcggacagtcggtcggaccttttccggtcgtgttccagaagctctcgtcgggcttcattccagaggtgatcggcacgtttgacggcgtttatctcacctcgctcatcatcggcgttctgcttgcggttttcctcatctggcagagcatgcggtcgcgcgcgcgccatattgcccatgaggtggagaccgagcccttcggccttttcgtggtcaagtgcatcctctatttcgccgcaattgcctatctttcgctgctcatttcctcacatcgcggtatgccgaacgtactcatcatcatggcggtgctgattgccgcctatgcgtttctcaccaatcgcaccgtgatcggccgccagatctatgcggtgggcggcaatcgtcacgccgccaagctttccggcgtgaaaaccgagcggctgacgtttctcaccttcgtcaatatgggtgtgctggcagcacttgcgggtctcgtcttcgccgcccgtctcaatacggcgacgccgaaagctggcatcggctttgaactggacgtcatcgcggcctgcttcatcggtggcgcttcggcctatggcggtgtggggcgggttacgggtgccgtgatcggcgcgctcatcatgggcgtgatgaacaacggcatgtcgatcctcggcatcggtatcgactatcagcaggtcatcaagggtatcgtgctgctgggggcggtttgtatcgacgtctataaccagaaacgctga

SEQ ID NO: 40676 - protein, 396 aa, Brucella abortus biovar 1 str. 9-941
MSENVIQSGQQSSVGRYLKNNLRESGMLLSLVAIMIFFQIVTGGVLMKPLNLTNLVLQNSYIVIMALGMLLIIVTGHIDLSVGSVCGFIGALAAVMMVKLGIPFPIAAILCLIVGGLIGAIQGFWVAYFNIPSFIVTLAGMLVFKGMMLAVLGGQSVGPFPVVFQKLSSGFIPEVIGTFDGVYLTSLIIGVLLAVFLIWQSMRSRARHIAHEVETEPFGLFVVKCILYFAAIAYLSLLISSHRGMPNVLIIMAVLIAAYAFLTNRTVIGRQIYAVGGNRHAAKLSGVKTERLTFLTFVNMGVLAALAGLVFAARLNTATPKAGIGFELDVIAACFIGGASAYGGVGRVTGAVIGALIMGVMNNGMSILGIGIDYQQVIKGIVLLGAVCIDVYNQKR

SEQ ID NO: 40677 - DNA, 1041 bp, Brucella abortus biovar 1 str. 9-941
  CDS (1)..(1041): transl_table=11
atgtcagtcacgagcaccaacaaggaaacagcggctccgaccggcgcgaagcggaagaccagcctcgtgcatctgctgctcgagggtcgcgcattctttgcgctgatcgcgatcatcgccgtcttctcgttcctttcgccctattactttacggtcgataatttcctcatcatgtcgtcgcatgtggccattttcggccttctggcgattggtatgctgctcgtcatcctcaatggcggcatcgacctttcggtcggctccacgctggggctggccggtgtggtcgcgggcttcctgatgcagggcgtgaccttgcaggaattcggcatcatcctttatttcccggtctgggccgtggtgctcatcacctgcgcgctcggcgccttcgtcggcgcggtcaatggtgtgttgatcgcttatctgcgcgttccggccttcgtggcgacgcttggcgttctttattgcgcgcgtggcgtagcgcttttgatgaccaacggtctcacctacaacaatctcggcggtcgccccgaacttggcaatacgggctttgactggctcggcttcaacaagcttttcggcgtgccgatcggtgtgctggtgctggcaattctcgccatcatctgcgccattgttttgaaccgcactgcattcggccgctggctctatgcctcgggcggcaatgaacgggcggcggaactttccggtgttccggtcaagcgggtcaaggtgtcggtctatgtcatttccggcatctgcgctgccattgcggggctggttctttcctcgcagctcacctctgctgggccgacggctggcaccacctacgaactgacggcaatcgctgccgtggtgatcggtggcgctgcgctcactggggggcgcggtacgatacagggcacacttctcggtgctttcgtgatcggtttcctttccgacggcctcgtgattatcggcgtgtcctcttactggcagaccgtctttaccggcgcggtgatcgtgctcgcggttctgctcaacagcattcaatattcccggcgatga

SEQ ID NO: 40678 - protein, 346 aa, Brucella abortus biovar 1 str. 9-941
MSVTSTNKETAAPTGAKRKTSLVHLLLEGRAFFALIAIIAVFSFLSPYYFTVDNFLIMSSHVAIFGLLAIGMLLVILNGGIDLSVGSTLGLAGVVAGFLMQGVTLQEFGIILYFPVWAVVLITCALGAFVGAVNGVLIAYLRVPAFVATLGVLYCARGVALLMTNGLTYNNLGGRPELGNTGFDWLGFNKLFGVPIGVLVLAILAIICAIVLNRTAFGRWLYASGGNERAAELSGVPVKRVKVSVYVISGICAAIAGLVLSSQLTSAGPTAGTTYELTAIAAVVIGGAALTGGRGTIQGTLLGAFVIGFLSDGLVIIGVSSYWQTVFTGAVIVLAVLLNSIQYSRR

SEQ ID NO: 40679 - DNA, 1239 bp, Brucella abortus biovar 1 str. 9-941
  CDS (1)..(1239): transl_table=11
atgaacgatatcaatacgctgcttgatcgtcaggatgtacgggtgcgccacgataaaggcgtttctggcgccatccgcacctttatcgaccgggtcaagtcgggcgatctcggttcattgccggtcattgttggccttctcatcatctggacagttttccagacgttgaacccggttttcctttccagcaacaacctcgtgaacctgctattcgattgctcgaccatcggcgtcatttcgctcggcatcgtctgcgtattgatgctgggtgagatcgacctttcggtcggttccattagtgggctttcttcggctatcatcggtgtattatgggtcaataatggctggccggtgggcgtcgccatcattgcagcactttgcgcaggcgcactggctggcttcctctacgcgctcctctataaccgcttcagcatgccaagcttcgtttccacactggctgggctgctcgcagcccttgggcttcagctttacctcctcggcaatacaggctccatcaatctgccttacggttcgtggctggtcagcttcggccagcttctggtaatgccgcgtccgctttcttatgcgctggcgctggtcgcgggacttgcgatctttttcacgggttttcgcgccgcgcagcgccgccgcacggcagggctttccgctccctcggctgcgggcattgcgctcaaagctttggtcatcacgctcattatcggctgtggggtattttatctcaaccagtcgcgcggcgtgccatggatgtttgccctgttcgtggcgctggtgatcgcgatgaactatgcgcttacgcgcaccagatggggccgctgcgtgcaggcggttggcggcaatcgcgaggctgcgcgtcgtgccggcatcaatgtgaatttcatctatgtctcggccttcatggcctgctccacactcgcggctgccggtggtatcatggcggcggcgcgtctggcctcatccagccagcaggcaggcaccggtgacgtcaacctcaatgctatcgcggcagcggttatcggcggtaccagcctattcggcgggcgcggcagcgcgtggtcggccctgctcggtattatcgtcatccagtcgattgcgagcggtttgacgcttctcgatctgtcgtcttcgcttcgctacatgattacgggtgcagtgcttgccatcgccgtgattgtcgattcccttgcccgccgttcgcgccagtcgcacggccgcgcctag

SEQ ID NO: 40680 - protein, 412 aa, Brucella abortus biovar 1 str. 9-941
MNDINTLLDRQDVRVRHDKGVSGAIRTFIDRVKSGDLGSLPVIVGLLIIWTVFQTLNPVFLSSNNLVNLLFDCSTIGVISLGIVCVLMLGEIDLSVGSISGLSSAIIGVLWVNNGWPVGVAIIAALCAGALAGFLYALLYNRFSMPSFVSTLAGLLAALGLQLYLLGNTGSINLPYGSWLVSFGQLLVMPRPLSYALALVAGLAIFFTGFRAAQRRRTAGLSAPSAAGIALKALVITLIIGCGVFYLNQSRGVPWMFALFVALVIAMNYALTRTRWGRCVQAVGGNREAARRAGINVNFIYVSAFMACSTLAAAGGIMAAARLASSSQQAGTGDVNLNAIAAAVIGGTSLFGGRGSAWSALLGIIVIQSIASGLTLLDLSSSLRYMITGAVLAIAVIVDSLARRSRQSHGRA

SEQ ID NO: 40681 - DNA, 1170 bp, Brucella abortus biovar 1 str. 9-941
  CDS (1)..(1170): transl_table=11
atgacgttgacaggcaaaagcctcagaaaatttctctcagaatacaaaatcgtggcactgctgattgttgtcgccctgatctgggcattcttcgccatcatgacctacgatcccgagatgggccggtcgcagtttctcaccgcgcgcaatttctccaatcttttgcgccagatggcaatcaccggcatgctggcttcagccatggtgtttgtcatcgtggcgggtgaaatcgatctgtcggtgggggctttgctcggcctgttaggcggtgtcgcggcggtgctcgatgtggtttacggctggccgttatgggccactatcgctacggttctggtgctgggtggagtgcttggcggtttcaacggctggctcaccgcctatctcggcattccgtccttcatcgttacgctgggcgggcaattggtgtttcgcggtattgtgctgggtatcatgggcggtgtcaccattgcgccgatttcgcccgagttcaaatatatcgggcaaggctatttgcccggctggcttggcaatgtctgtgccatagcgctgtttacagtgcttgtcctgattacgctcagaacccgttccagcaagcgcaaacacaatttgcaaacgctttcaccggcgatggaaaccgctcgccttctgggcacgggtatcctgatccttggttttatcctggtcctcaacagctatcagggcgtaccggttccggttctcgtgctgctggttattcttggcgtcttcaccgttatttcccgccagactgttttcggccggcatatttatgcggtcggttccaatcctgaagccacgcgcttttccggtgtcaacgtgaatttcgtcaaaatggccgtgtttgcgctgatgggacttatggcggcagtggcgggcctcaccacgactgcgcgccttgcggccggtacgccatcggcaggtttgggcggcgaacttgatgccatcgcatcatgctttatcggcggcacatccatgcgcggcggcgtgggatccgtgattgctgcgctggtcggtgcgcttatcatgtcaagcctcgataatggtatgtcgatgctgggcgtcgatacattctggcagcaaatcatcaagggcagtattcttgtgctggccgtttatctcgatatcgtatcatcaggcacacgtcgcgcctga

SEQ ID NO: 40682 - protein, 389 aa, Brucella abortus biovar 1 str. 9-941
MTLTGKSLRKFLSEYKIVALLIVVALIWAFFAIMTYDPEMGRSQFLTARNFSNLLRQMAITGMLASAMVFVIVAGEIDLSVGALLGLLGGVAAVLDVVYGWPLWATIATVLVLGGVLGGFNGWLTAYLGIPSFIVTLGGQLVFRGIVLGIMGGVTIAPISPEFKYIGQGYLPGWLGNVCAIALFTVLVLITLRTRSSKRKHNLQTLSPAMETARLLGTGILILGFILVLNSYQGVPVPVLVLLVILGVFTVISRQTVFGRHIYAVGSNPEATRFSGVNVNFVKMAVFALMGLMAAVAGLTTTARLAAGTPSAGLGGELDAIASCFIGGTSMRGGVGSVIAALVGALIMSSLDNGMSMLGVDTFWQQIIKGSILVLAVYLDIVSSGTRRA

SEQ ID NO: 40683 - DNA, 975 bp, Corynebacterium glutamicum ATCC 13032
  CDS (1)..(975): transl_table=11
ttgagcaccgccgtagtttcacagaagaagtccacaacggcatccaaaattggacattggatgctcaataacggtgcgttggtggggctgattgcactgtgtgttggactttttattgcaacaccccactttctcaccattcctaacctgatcaacatcggtatccaatcggcgacggtggcgatcctggcgttcggcatgaccttcgtcatcgttaccgcaggcattgatttgtctgtgggatcagtggctgcgttgggtgcgatgacctcggcgtatttcttcgcggaagttggtttgccgggctggatcacgctgctgattggcctgttcatcggattgttggcgggtgcgatctctggcatttctattgcttatggcaagttgcctgcgtttattgccaccttggccatgatgtcgatcgccaggggaatcaccttggtcatttcccaaggctcaccaattcccagtgcaccagctgtgaacgctttggggcgcacctactttggcatcccgatgccgattctgatgatggcactggctggcattgtgtgttggtttattttgagccgcaccgtgctgggacggtccatgtacgccattggcggaaacatggaagcagcccgactatctggtctgccagtgaagaaaatcctggtcatggtctatgcactggctggtgtgtatgcagcacttgcgggtctggtcatgacgggacgcttgtcgtccgcgcagccgcaggcaggcgtgggatacgaactcgatgcgattgccgccgtggtcattggtggtgcgtcacttgctggcggaaccggaaaagcaacgggcactttgattggtgccatcttgttggccgtgatccgcaatggcttgaacattttgaacgtgtcctcgttctggcagcagattgtcatcggttgtgtcatcgcgcttgcggtgggcttcgatgtcatccgaaacaaaacctctaagtaa

SEQ ID NO: 40684 - protein, 324 aa, Corynebacterium glutamicum ATCC 13032
MSTAVVSQKKSTTASKIGHWMLNNGALVGLIALCVGLFIATPHFLTIPNLINIGIQSATVAILAFGMTFVIVTAGIDLSVGSVAALGAMTSAYFFAEVGLPGWITLLIGLFIGLLAGAISGISIAYGKLPAFIATLAMMSIARGITLVISQGSPIPSAPAVNALGRTYFGIPMPILMMALAGIVCWFILSRTVLGRSMYAIGGNMEAARLSGLPVKKILVMVYALAGVYAALAGLVMTGRLSSAQPQAGVGYELDAIAAVVIGGASLAGGTGKATGTLIGAILLAVIRNGLNILNVSSFWQQIVIGCVIALAVGFDVIRNKTSK

SEQ ID NO: 40685 - DNA, 1020 bp, Pseudomonas syringae pv. syringae B728a
  CDS (1)..(1020): transl_table=11
atgaaaacgctcgatctcacgcgccaacgcattctgccgcagtcgctgttcaagcgcctgctgcatgattttcccggcgtggtcagcatcggcctgtttttcgccctgtgctttgtgctgttcgcactggtgaccgataactttttaagcggtgccaatctgctcaacgttatccggcaaaacgcgccgttattgattgtcgcggtggcgatgacgctggtggtcaccaccggcggcatcgacctgtcggtcggctcgaccctggcgctggtcggtgcgctggcggccatggcgctcaatgcctggcacctgccctggccgctggttctgctcggcgggcttgcggtcggcgcgatgatcggggcgctgaacggctacttcatcgcctacgcgggcatcccggcctttatcgtcaccctggccaccctgaccattattcgtggcctggcgatgctgctgacgcaaggctattcgatccccgtcccacgcgaagaagcggcgtttctggccctcgggcgcggctggtttctcggcgtgccgctgaccgcctggctggccttgctggtcacgctgggcggggtgctggtgctcggcaaaatgcgttttggccgctacctcacgggcatcggtgccaacgctgaaagcgtgcgccgcgccggggtgaatcatcgcggtgtgctgctgcgggtctacatgctcagcggcatggcggccgccctggccggcatgatcgtcaccgccaggctgggcagtggttcctcgaatcagggcgaaggtttcgaactggaagtgattgctgccgtggtcctcggcagcaccagcctgttcggtggcttcggcacgattgtcggcacactgttaggggtgcttaccatggctgcaatcaagaacgggctgattctggcccacgtctcaccgttttacacgcaaatcgccacgggcctgatcgtactgctggcgatctggctgaacacacgcattctacgtaccggccgtccactcgggagggctggagcatga

SEQ ID NO: 40686 - protein, 339 aa, Pseudomonas syringae pv. syringae B728a
MKTLDLTRQRILPQSLFKRLLHDFPGVVSIGLFFALCFVLFALVTDNFLSGANLLNVIRQNAPLLIVAVAMTLVVTTGGIDLSVGSTLALVGALAAMALNAWHLPWPLVLLGGLAVGAMIGALNGYFIAYAGIPAFIVTLATLTIIRGLAMLLTQGYSIPVPREEAAFLALGRGWFLGVPLTAWLALLVTLGGVLVLGKMRFGRYLTGIGANAESVRRAGVNHRGVLLRVYMLSGMAAALAGMIVTARLGSGSSNQGEGFELEVIAAVVLGSTSLFGGFGTIVGTLLGVLTMAAIKNGLILAHVSPFYTQIATGLIVLLAIWLNTRILRTGRPLGRAGA

SEQ ID NO: 40687 - DNA, 990 bp, Pseudomonas syringae pv. syringae B728a
  CDS (1)..(990): transl_table=11
atgaacaataaaaaagaggtgcgtatgtctaccgaatccagcctgcaggctccccgtcagggcatgaacctgcgtcgtttcgccgatgactgggtgatgctcctggccgccgtggggattttcctgctgtgtgccgtgttcatcgataacttcatgtcgccgctgaacatgcgcggtctgggcctggcgatttccactgtaggtatcgctgcctgcaccatgctcttttgcctggcgtccgggcacttcgacctctcggtcggttcggtgctggcttgttccggggtgatcgccagtatcgtcatccgcgacaccgacagcgtatttctgggtgtctcggcagccctggcgctcgggttggtcgtgggtctgatcaacggcattgtgatcgccaagctgcgcatcaatgccctgatcacgactctggcaaccatgcagatcgtgcgcggcctggcgtacattttctccaacggcaaggccgtcggcgtttccaacgaggacttcttcatctttggcaatggccaggtgtatggcgtgccggtgccgatcctgatcaccattgcctgcttcatattcttcggctggctgctcaactacaccacctatgggcgcaacaccatggccatcggcggcaaccaggaagccgcgctgctggcgggtgtccacgtggaccgcaccaagatcatcattttcgccgtccacggcctggtcggtgcattggctggcgtagtcctggcttcgcgcatgacttcggggcaaccgatgatcgggcagggcttcgagctgacgatcatctctgcctgcgtattgggcggggtttcgctgagtggcggcatcggcatgatccggcatgtgatcgccggggtgctgattcttgcaatcatcgagaatgcgatgaacctgaagaacatcgatacgttctaccagtatgtgattcgcggcacgatcctgttgctggcggtgatcatcgaccgcatgaagcgccgctga

SEQ ID NO: 40688 - protein, 329 aa, Pseudomonas syringae pv. syringae B728a
MNNKKEVRMSTESSLQAPRQGMNLRRFADDWVMLLAAVGIFLLCAVFIDNFMSPLNMRGLGLAISTVGIAACTMLFCLASGHFDLSVGSVLACSGVIASIVIRDTDSVFLGVSAALALGLVVGLINGIVIAKLRINALITTLATMQIVRGLAYIFSNGKAVGVSNEDFFIFGNGQVYGVPVPILITIACFIFFGWLLNYTTYGRNTMAIGGNQEAALLAGVHVDRTKIIIFAVHGLVGALAGVVLASRMTSGQPMIGQGFELTIISACVLGGVSLSGGIGMIRHVIAGVLILAIIENAMNLKNIDTFYQYVIRGTILLLAVIIDRMKRR

SEQ ID NO: 40689 - DNA, 978 bp, Pseudomonas syringae pv. syringae B728a
  CDS (1)..(978): transl_table=11
atgaatgcaaaaaccattatcgccccagcttccacgtctccacgcagccgcctgcgcctgtctctcgaccgtttcggcctgccgttggtgtttattctgttgtgcctggtactggcttttgccagcgaatatttcatgacctggcgcaactggatggacatcctgcgccagacctcgatcaacggcattctcgcggtcggcatgacctacgtgatcctgaccaagggcatcgacctttccgtcggctcgattctggcgttcgccggattgtgcagcgcactggtcgcgacccagggctatggcctgctggcggcggtcagcgcaggcatgtttgccggtgccatgctcggcgtagtcaatggcttcatggtcgccaatctttcgattccaccgtttgtggccaccttgggcatgctcagcatcgcccgcggcatgaccttcatcctcaacgacggcagcccggtgaccgacctgcccgaagaatacctggcgttgggcatcggccggatcggcccgattggtgtgccgatcattatcttcgcggtggtcgcgctgattttctggatggtactgcgctacaccacctacggccgttacgtgtacgccgtcggcggcaacgaaaagagcgcgcgcacctccggtatcggtgtgcgcaaggtgatgttttcggtgtacgtggtttccgggctgctcgccggactggcaggcgtagtgctgtccgccagaaccacctccgccctgccccaggccggcatgtcctacgaactggacgccatcgcagcagtggtcatcggcggcaccagcctgtcgggcggtactggcagcatcgttggcacactgtttggcgcactgctgatcggcgtgatcaacaacggcctgaacctgctcggcgtgtcctcctattaccagcaggtcgccaagggcctgatcatcgtgttcgcagtgttgattgatgtgtggcgcaagaaaaaacgctag

SEQ ID NO: 40690 - protein, 325 aa, Pseudomonas syringae pv. syringae B728a
MNAKTIIAPASTSPRSRLRLSLDRFGLPLVFILLCLVLAFASEYFMTWRNWMDILRQTSINGILAVGMTYVILTKGIDLSVGSILAFAGLCSALVATQGYGLLAAVSAGMFAGAMLGVVNGFMVANLSIPPFVATLGMLSIARGMTFILNDGSPVTDLPEEYLALGIGRIGPIGVPIIIFAVVALIFWMVLRYTTYGRYVYAVGGNEKSARTSGIGVRKVMFSVYVVSGLLAGLAGVVLSARTTSALPQAGMSYELDAIAAVVIGGTSLSGGTGSIVGTLFGALLIGVINNGLNLLGVSSYYQQVAKGLIIVFAVLIDVWRKKKR

SEQ ID NO: 40691 - DNA, 1137 bp, Pseudomonas syringae pv. syringae B728a
  CDS (1)..(1137): transl_table=11
atgaaccaggtcaaacaattctttacccgctacaaaatgctcgcgctggtgattgccatcgccgttatctggctgttcttcagctggcagaccgagggcggcttcctcaccccgcgcaacttgtccaacctgctgcgccagatgtccattaccgggattctggcctgcggcatggtgctggtgatcatcagcggcgagattgacctgtcggtaggctcattgcttggcctgctcggtggcctggcggcgattctggatgtcgtttaccacgtcccgctactggcaaacctgagtgtggtggccctgtgcggcctgatgatcggcctggccaacggctatatgaccgcctacctgcggatcccctcgttcatcgtcgggctgggtggcatgctggcgtttcgcggcgttctgctggggatcactggcggcacgaccatcgccccggtgtcgccgtcgctggtctatatcggccagggctatctgccacatgcggtcggcaccgggctcgggattctgctgctggcgctgacgctgttcctgacctggaaacaacggcgcaacagagcgctgcacggcctggcagcgcattcgctgattcgtgatgtgttgcgtgtggtgttgatcggcgccgtgctgggcggctttgtctatgtgctcaacagctacgacggaatccctgttccagtgttgctgttgctggtcctgctcggcgtattcagctacgtcaccagccagacggtattcggacgccgcgtctacgccgtcggcagcaacatggaggccacgcgcctgtccggcatcaacgtacaggccgtgaagctatggatcttcggcatcatgggcgtgatgtgcgcgttcgccgggctggtcaatacagcacgcctggccgccggctcaccctcggcaggcaacatgggcgaactcgacgccatcgccgcatgcttcatcggcggcacatcgatgcgcggtggttcaggcactgtctacggcgccctgctcggcgcactggtgattaccagtctcgacaacggcatgtcgatgctcgacgtcgacagttactggcagatgatcgtcaagggcggcattctggtgctggcggtatgggtggacgtgagtacccgcgccgggcggcgctga

SEQ ID NO: 40692 - protein, 378 aa, Pseudomonas syringae pv. syringae B728a
MNQVKQFFTRYKMLALVIAIAVIWLFFSWQTEGGFLTPRNLSNLLRQMSITGILACGMVLVIISGEIDLSVGSLLGLLGGLAAILDVVYHVPLLANLSVVALCGLMIGLANGYMTAYLRIPSFIVGLGGMLAFRGVLLGITGGTTIAPVSPSLVYIGQGYLPHAVGTGLGILLLALTLFLTWKQRRNRALHGLAAHSLIRDVLRVVLIGAVLGGFVYVLNSYDGIPVPVLLLLVLLGVFSYVTSQTVFGRRVYAVGSNMEATRLSGINVQAVKLWIFGIMGVMCAFAGLVNTARLAAGSPSAGNMGELDAIAACFIGGTSMRGGSGTVYGALLGALVITSLDNGMSMLDVDSYWQMIVKGGILVLAVWVDVSTRAGRR

SEQ ID NO: 40693 - DNA, 1026 bp, Pseudomonas syringae pv. syringae B728a
  CDS (1)..(1026): transl_table=11
atgagcgacgcgattctgcaaaataaaccggccatgacgccgaccagaagcaaacggcggctgcccaccgagctgagcatctttctggtgctgatcggcatcggcctgatctttgaactgttcggctggatcgtccgcgatcaaagcttcctgctcaattcgcagcgtctggtattgatgatcctgcaggtgtcgatcatcggcttgctggccatcggtgtgacccaggtgatcatcaccaccggcatcgacctctcctccggctcggtgctcgcgctttcagcgatgattgccgcgagcctggctcagacttccgacttctcccgggcggtgttcccgtcgctgaccgacctgccggtatggattccggtcgtcgtcggtctcggggtcgggctgctggccggtgccatcaacggcagcatcattgctataaccggcattcctcccttcattgccacgctgggcatgatggtctctgcgcgcggcctggcacgtttctataccgaaggccagccggtgagcatgctctccgactcgtacacggccattggccagggcgcgatgccggtgatcatcttcctggtggtggcggtcatctttcacatcgccctgcgttacaccaagtacggcaagtacacctacgccattggcggcaacatgcaggcggcacgtacgtctgggatcaacgtcaagcgccatctggtcatcgtctacagcatcgccgggctgctggccgggctggcgggtgtggttgcctcggcgcgagcggcaaccgggcaggccgggatgggcatgtcctacgagctggacgccatcgccgctgcggtcatcggtggcaccagcctttccggtggggtggggcggatcactggtacagtgatcggtgcgctgatcctcggcgtgatggccagcggcttcacctttgtcggcgtggacgcctatgtgcaggacattatcaaaggcctgatcattgtcgtggccgtggtaatcgatcaatatcgcaacaagcgcaagaccaagcgctga

SEQ ID NO: 40694 - protein, 341 aa, Pseudomonas syringae pv. syringae B728a
MSDAILQNKPAMTPTRSKRRLPTELSIFLVLIGIGLIFELFGWIVRDQSFLLNSQRLVLMILQVSIIGLLAIGVTQVIITTGIDLSSGSVLALSAMIAASLAQTSDFSRAVFPSLTDLPVWIPVVVGLGVGLLAGAINGSIIAITGIPPFIATLGMMVSARGLARFYTEGQPVSMLSDSYTAIGQGAMPVIIFLVVAVIFHIALRYTKYGKYTYAIGGNMQAARTSGINVKRHLVIVYSIAGLLAGLAGVVASARAATGQAGMGMSYELDAIAAAVIGGTSLSGGVGRITGTVIGALILGVMASGFTFVGVDAYVQDIIKGLIIVVAVVIDQYRNKRKTKR

SEQ ID NO: 40695 - DNA, 972 bp, Haemophilus influenzae 86-028NP
  CDS (1)..(972): transl_table=11
atgatgaaaaatgaaacatctaattttcaaataggaagatttttgattgaacagcgttcttttattgcgttgattattcttatcgcgattgtatcaatgattaatcctgatttttttagcgtagataatattttgaatattttacgccaaacttcggttaatgcgattattgcagtgggtatgactttcgttattttaattgcaggtatagatctttctgttggatctgtattggcattgacaggtgcaatcgccgcttcaatggtgagtatcgaattgcctatttttttagtcattcctgtggttttattgattggaacacttcttggtggcataagtggtgtaattgtggcaaaagggaaagttcaggcttttattgctaccttggttaccatgaccttactgcgtggtataacaatggtttatacagatggtcgtcctattacgacaggtttttcggataatgctgatctatttgctagcattggtacaggctatgttttaggtatcccagtaccaatttggattatgagtatcgtgtttgcggttgcttggtatattttaaaacacacaccaatcggtcgctatatttatgctttaggtggaaatgaggcagcgacccaactttctggtattaacgtcaataaaatcaaagtatttgtttttgcggtgagtggatttctttctgcgctggcgggtttaattgtaacttcacgtttatcttccgctcaacccactgctggcgtatcttatgaattagatgcaattgccgccgtggtagtcggtggaaccagtttgatgggggggaaaggtcgtgtaatgggaactctcatcggtgcattaatcatcggatttttaaacaatgcattaaatttattagatatttcatcttactatcaaatgatagcaaaagcgttggttattttggttgctgttttagccgataactatcttggtacaaaaaaactgtaa

SEQ ID NO: 40696 - protein, 323 aa, Haemophilus influenzae 86-028NP
MMKNETSNFQIGRFLIEQRSFIALIILIAIVSMINPDFFSVDNILNILRQTSVNAIIAVGMTFVILIAGIDLSVGSVLALTGAIAASMVSIELPIFLVIPVVLLIGTLLGGISGVIVAKGKVQAFIATLVTMTLLRGITMVYTDGRPITTGFSDNADLFASIGTGYVLGIPVPIWIMSIVFAVAWYILKHTPIGRYIYALGGNEAATQLSGINVNKIKVFVFAVSGFLSALAGLIVTSRLSSAQPTAGVSYELDAIAAVVVGGTSLMGGKGRVMGTLIGALIIGFLNNALNLLDISSYYQMIAKALVILVAVLADNYLGTKKL

SEQ ID NO: 40697 - DNA, 1011 bp, Haemophilus influenzae 86-028NP
  CDS (1)..(1011): transl_table=11
atgagtgccttagaaaaaaacaaatcctttgatctcttaaaacaaaatgcgatttattttgtgttattgattttgctcggcatcatcattgcacaagatccgacattcttaaatttagtcaatttcagtaacatcttaacccaatcttctgtacgtttaattattgctttaggggttgcgggtttattgattacacaagggactgacttatctgcaggtcgtcaagttggtttgtctgcagttatctctgcaacaatgttgcaatcaatggaaaatattaaccgcgtgttccctgaaatgggacaaataccaattccagtggttattctcgcagtttgtgctatcggtgcagtaattggtttagtgaatggtttagttatcgcttacttaaatgtaactccattcatcgcaaccatgggtacaatgatcatcatatatggtttcaactcactatactatgatgctgtaggtggttctccaatcgcaggttttagtgaaaatttctcaacatttgctcaaggattcttccgagtcggcagctttaaactctcttacatcacgatttatgcagctattgcagcattattagtatggattatgtggaacaaaactcgtttcggtaaaaacgtatttgctattgggggtaacccagaagcagctaaagtttcaggcgtgaatgttgctcgtaacttagttgcaatctatatgattgcaggtatgttctatgcctttggtggtatgcttgaagcgggtcgtatcggttctgcaactaacaacttaggttttatgtatgaattagatgctatcgccgcttgcgtagtgggtggcgtatcttttgctggtggggtaggtacagtaattggtgttatcactggggttattatctttactgttatcaactacggtttaacttacatcggtgtaaacccttactggcaatacatcattaaaggtagcattatcattctagcggtagccattgactcgttaaaatatgcgaagaaaaaataa

SEQ ID NO: 40698 - protein, 336 aa, Haemophilus influenzae 86-028NP
MSALEKNKSFDLLKQNAIYFVLLILLGIIIAQDPTFLNLVNFSNILTQSSVRLIIALGVAGLLITQGTDLSAGRQVGLSAVISATMLQSMENINRVFPEMGQIPIPVVILAVCAIGAVIGLVNGLVIAYLNVTPFIATMGTMIIIYGFNSLYYDAVGGSPIAGFSENFSTFAQGFFRVGSFKLSYITIYAAIAALLVWIMWNKTRFGKNVFAIGGNPEAAKVSGVNVARNLVAIYMIAGMFYAFGGMLEAGRIGSATNNLGFMYELDAIAACVVGGVSFAGGVGTVIGVITGVIIFTVINYGLTYIGVNPYWQYIIKGSIIILAVAIDSLKYAKKK

SEQ ID NO: 40699 - DNA, 939 bp, Staphylococcus haemolyticus JCSC1435
  CDS (1)..(939): transl_table=11
atgaaacagttaacagctaaaacatcgttcatggaaaagattattccatttattggtctgattttactaattattgtagtgagtattttaaacccatcatttttagatttatctaatttactcaatttattaagacaaatttctatcaatggtctgattgcctttggtatgacattcattatcttaactggtggtatagacttatcagttggttcaattcttgcattatcatcggcgtttattgcattaatgattacgagtggtgttgacccaataattgcattaattattggcgtactgattggttttgttttaggtgcagtgaacggtttattagttactaaaggaaatatggcgccatttattgcaacacttgcgacgatgacgattttccgtggattaacattagttattactgacggaaatccaataacaaatttaggggatagttatttattccaattatttggtaagggctactttatcggtattccagtaccagcagtaacaatgattatcgtgtttgtgattttgcttattattcttcaaaaaacaacgtttggacgtcatacatatgcaattggtgggaatgaagtagctgctaaaatttcaggtattaaagttaataaaattaaaattttaatttatggaatttcagggctaatgtcagcgttagcaggaggcatattaacatcacgtttaaattctgcacaaccaacagcgggtacttcttatgagttagacgctattgctgccgtagtacttggtggtacgtcattaacaggtggtaaaggacgaattgttggaacattaataggtgtacttattataggtgttttaaataatggattaaatttacttggtgtttcttcattctaccaacaagtcgttaaaggtgtagttattttaattgcggtattaattgatcgtaaaaaataa

SEQ ID NO: 40700 - protein, 312 aa, Staphylococcus haemolyticus JCSC1435
MKQLTAKTSFMEKIIPFIGLILLIIVVSILNPSFLDLSNLLNLLRQISINGLIAFGMTFIILTGGIDLSVGSILALSSAFIALMITSGVDPIIALIIGVLIGFVLGAVNGLLVTKGNMAPFIATLATMTIFRGLTLVITDGNPITNLGDSYLFQLFGKGYFIGIPVPAVTMIIVFVILLIILQKTTFGRHTYAIGGNEVAAKISGIKVNKIKILIYGISGLMSALAGGILTSRLNSAQPTAGTSYELDAIAAVVLGGTSLTGGKGRIVGTLIGVLIIGVLNNGLNLLGVSSFYQQVVKGVVILIAVLIDRKK

SEQ ID NO: 40701 - DNA, 1023 bp, Pseudomonas fluorescens Pf-5
  CDS (1)..(1023): transl_table=11
atgaacgcgataatcgacaacaaacccgcggcggtggcagtcaagccccggcgacgactgcccaccgagctgagcatcttcctggtgctgatcggtatcggcctggtgttcgagctgtttggctggatcgtccgcgaccagagtttcctgctcaattcccagcgcctggtgctgatgattctccaggtctcggtgatcggcctgctggccatcggcgtgacccaggtgatcatcaccaccggcatcgacctgtcttccggttcggtgctggccctgtcggcgatgattgccgcaagcctggcccagacctcggacttcacccgggcggtgtttccatccctgaccgacctgccggtgtggatcccggtgctggccgggctcggggtcggcctcctggcgggggcgatcaacggcagtgtgattgccctgaccggcattcctccctttattgccaccctgggaatgatggtctcggcccgggggctggcgcgttactacacccagggccagccggtgagcatgctctccgattcctacaccgccatcggccacggggcgatgccggtggtgatcttcctggtggtggcgctgatctttcatatcgccctgcgctacaccaagtacggcaagtacacctatgccatcggcggcaacatgcaggcggcgcggacttcggggatcaacgtcaagcgccacctggtgattgtctacagcattgccgggctgttggcggggctggccggggtggtggcctcggcacgggccgccaccgggcaggcggggatgggcatgtcttacgagctggacgcgattgccgcggcagtgatcggcggcaccagcctggccggcggggtggggcgcatcaccggcaccgtgatcggcgcgctgatcctcggggtcatggccagtggcttcacctttgtcggggtcgatgcctacatccaggacatcatcaagggcctgatcatcgtggtggcggtggtcatcgaccagtaccgcaacaagcgcaagctcaagcgctga

SEQ ID NO: 40702 - protein, 340 aa, Pseudomonas fluorescens Pf-5
MNAIIDNKPAAVAVKPRRRLPTELSIFLVLIGIGLVFELFGWIVRDQSFLLNSQRLVLMILQVSVIGLLAIGVTQVIITTGIDLSSGSVLALSAMIAASLAQTSDFTRAVFPSLTDLPVWIPVLAGLGVGLLAGAINGSVIALTGIPPFIATLGMMVSARGLARYYTQGQPVSMLSDSYTAIGHGAMPVVIFLVVALIFHIALRYTKYGKYTYAIGGNMQAARTSGINVKRHLVIVYSIAGLLAGLAGVVASARAATGQAGMGMSYELDAIAAAVIGGTSLAGGVGRITGTVIGALILGVMASGFTFVGVDAYIQDIIKGLIIVVAVVIDQYRNKRKLKR

SEQ ID NO: 40703 - DNA, 1137 bp, Pseudomonas syringae pv. phaseolicola 1448A
  CDS (1)..(1137): transl_table=11
atgaaccaggtcaaacagttcttcacccgctacaaaatgcttgcgctggtgattgccatcgcagtgatctggctgttcttcagttggcagaccgatggagggtttctgaccccgcgcaacctttccaacctgctgcggcagatgtccatcaccggcattctggcttgcggcatggtattggtgatcatcagtggcgagatcgacctgtcggtgggttcattgctgggcctgctcggggggctggcggcgattctggatgtggtttaccaggtgccgctgctggcaaacctgagcgtggttgcgctatgtgggctgatgattggcctggccaacggctacatgacggcctacctgcgcattccctccttcattgtcgggctgggcggtatgctggcctttcgcggcattcttctggggattaccggcggcacgaccatcgccccggtatcgccttcgctggtctacgtcggccagggatatttgccgcactctgtcggtacagcgcttggcgtactgttgctggccctgacgctgttcctgacctggaaacaacggcgcaatagagccctgcacgggctggcggcacattcgatgatccgtgatgtgttacgcgtggtattgatcggcgctgtgttgggcgggtttgtctatgtgctcaacagctacgacggaatccccgttccggtattgctgttgctggtcctgctcggtgtgttcagttatgtcaccagccagacggttttcggacggcgcgtctatgcggtgggcagcaacatggaagccacgcggttatccggcatcaacgtacaggccgtaaaactgtggatcttcggcatcatgggcgtcatgtgtgccttcgccgggctggtcaataccgcacgcctggctgcaggctcaccctcggccggcaacatgggcgaactggacgccattgccgcctgttttatcggcggcacgtccatgcgcggtggctcgggcactgtctacggtgcactgcttggcgcgctggtcatcaccagtctcgataacggcatgtccatgctcgacgtcgacagttactggcagatgatcgtcaagggcggcatcctcgtgctggcggtgtgggtggacgtgagcacacgggccggacggcggtga

SEQ ID NO: 40704 - protein, 378 aa, Pseudomonas syringae pv. phaseolicola 1448A
MNQVKQFFTRYKMLALVIAIAVIWLFFSWQTDGGFLTPRNLSNLLRQMSITGILACGMVLVIISGEIDLSVGSLLGLLGGLAAILDVVYQVPLLANLSVVALCGLMIGLANGYMTAYLRIPSFIVGLGGMLAFRGILLGITGGTTIAPVSPSLVYVGQGYLPHSVGTALGVLLLALTLFLTWKQRRNRALHGLAAHSMIRDVLRVVLIGAVLGGFVYVLNSYDGIPVPVLLLLVLLGVFSYVTSQTVFGRRVYAVGSNMEATRLSGINVQAVKLWIFGIMGVMCAFAGLVNTARLAAGSPSAGNMGELDAIAACFIGGTSMRGGSGTVYGALLGALVITSLDNGMSMLDVDSYWQMIVKGGILVLAVWVDVSTRAGRR

SEQ ID NO: 40705 - DNA, 963 bp, Pseudomonas syringae pv. phaseolicola 1448A
  CDS (1)..(963): transl_table=11
atgtctaccgaatccagcctgcaggctccccgtcagggcatgaacctgcgtcgttttgccgatgactgggtgatgctcctggctgccgtgggaatcttcctgctgtgcgccgtgttcatcgacaacttcatgtcaccgctgaacatgcgggggctaggccttgcgatttccaccgtgggcattgctgcctgcaccatgctcttttgtctggcgtccgggcacttcgacctttcggtcggttcggtgctggcctgttccggggtcatcgccgggattgttatccgcgacaccgacagcgtgtttctcggtgtttccgccgcgctggcgctggggctggtggttggtctgatcaatggcatcgtgattgccaagctgcgcatcaatgccctgatcacgaccctggcgaccatgcagatcgtgcgcggccttgcgtatatcttctccaacggcaaggccgtcggcgtctccaacgaggatttcttcatcttcggcaatggccagatatatggcgtgccggtgccgatcctgatcaccatcgcctgtttcatattcttcggctggttgctcaactacaccacctacgggcgcaacaccatggccatcggtggcaaccaggaagctgcattgctggcgggtgtgcatgtcgatcgcaccaagatcatcatcttcgcggttcacgggcttgtcggggcactggctggcgtggttctggcttcgcgtatgacctcggggcagccaatgatcggtcagggcttcgagctgaccatcatctcggcttgcgtactgggcggtgtttcgctgagcggcggcatcggcatgatccgccatgtaatcgctggtgtgctgattctggcgatcatcgagaatgcgatgaacctgaagaatatcgatacgttctaccaatacgtgattcgcggcacgattctgttgctggcggtgatcatcgaccgactgaaacgctga

SEQ ID NO: 40706 - protein, 320 aa, Pseudomonas syringae pv. phaseolicola 1448A
MSTESSLQAPRQGMNLRRFADDWVMLLAAVGIFLLCAVFIDNFMSPLNMRGLGLAISTVGIAACTMLFCLASGHFDLSVGSVLACSGVIAGIVIRDTDSVFLGVSAALALGLVVGLINGIVIAKLRINALITTLATMQIVRGLAYIFSNGKAVGVSNEDFFIFGNGQIYGVPVPILITIACFIFFGWLLNYTTYGRNTMAIGGNQEAALLAGVHVDRTKIIIFAVHGLVGALAGVVLASRMTSGQPMIGQGFELTIISACVLGGVSLSGGIGMIRHVIAGVLILAIIENAMNLKNIDTFYQYVIRGTILLLAVIIDRLKR

SEQ ID NO: 40707 - DNA, 1884 bp, Pseudomonas syringae pv. phaseolicola 1448A
  CDS (1)..(1884): transl_table=11
atgatcatggacgagcccacctcggcgattggcgagcgcgaggcgcaaaccctgttcaaggccatccgccgactggctgctcgaggcgcaggcatcatctatgtctctcaccgcctcagcgagctggcgcagattgccgacgactacagcatctttcgcgatggcgctttcgtcgaaagcggacgcatggctgatatcgaccgggcacacctggtgcgcggtatcgtgggccaggagttgcagcgcatcgaccacaaggtgggtcgtgaatgcgccgccgagtgctgcctgaatgtcgaaagcctgagccgcaacggcgaattcgaagacatcagcctgcacgtgcgccacggtgaaattctcggcatctacgggctgatggggtcgggtcgcagcgagtttctcaactgcctgtacggcctgaccacgcccgattcgggcagtgtcaccctgcaaggcaaacccatgccgatcggtctgcccaaggcaaccatccgcgcaggcgtttcactggtcaccgaagaccgcaaggacagcggcctggtgctcagtggcagcattctttccaacatcgccttgtcggcttatagacagctgtcgaactggtcgctgatcgatgcgcgcaaagagcacaagctggccgaagacatggtcaggcgcctgcagatcaagaccgcatcactggatctgcccgttgcgtcgatgagcggcggcaaccagcagaaagtggttctcgccaaatgcctttcgaccgagccggtctgcctgctctgcgacgagccgacccgaggcattgacgagggcgccaaacaggaaatctatcacctgctggatcagttcgtacgcggatgccgatctttcccaggaagtcctgctgagtcttgcctcatgaatgccaaaaccattgtcgcccctgccaccactgccaccactgccaccactgcgccacgcagccgcctgcgcttgtccgttgatcgctttggcctgccgctagtgttcattctgctgtgcctggtgatggcctttgccagcgaatatttcatgacctggcgcaactggatggacattctgcgccagacgtcgatcaacggcattctcgcggtcggcatgacctacgtcatcctgaccaagggcatcgacctttccgtcggctctattctggcgtttgccgggttgtgcagcgcactggtggcaacgcagggttacggccttctggctgcggtcagcgccgggatgttcgccggggccatgctaggcgtggtcaacggtttcatggtcgccaacctttcaatcccgccgtttgtggccactctgggcatgctcagtatcgcccgaggcatgaccttcatcctcaatgatggcagcccggtgacagacctgcccgaagagtatctggcgctgggcatcggcagggtcggcccgattggtgtgcccatcatcatctttgccgtggtcgcgctgattttctggatggtcctgcgctacaccacttatggccgctatgtgtacgccgtcggcggcaacgaaaagagcgcacgcacctccgggatcggtgtgcgcaaggtgatgttttcggtgtacgtggtttccgggctgctggcagggctggctggcgtggtgctgtccgccagaaccacctccgccctgccccaggccggtatgtcttatgagctggacgccatcgccgcggtggtcatcggcggcaccagcctgtcgggaggcaccggcagcatcgtcggcacactgttcggcgcattgctgatcggggtgatcaacaacggcctgaacctgctcggcgtgtcttcctattaccagcaggtcgccaagggcctgattatcgtgtttgcggtgttgattgacgtgtggcgcaagaaaaaacgctaa

SEQ ID NO: 40708 - protein, 627 aa, Pseudomonas syringae pv. phaseolicola 1448A
MIMDEPTSAIGEREAQTLFKAIRRLAARGAGIIYVSHRLSELAQIADDYSIFRDGAFVESGRMADIDRAHLVRGIVGQELQRIDHKVGRECAAECCLNVESLSRNGEFEDISLHVRHGEILGIYGLMGSGRSEFLNCLYGLTTPDSGSVTLQGKPMPIGLPKATIRAGVSLVTEDRKDSGLVLSGSILSNIALSAYRQLSNWSLIDARKEHKLAEDMVRRLQIKTASLDLPVASMSGGNQQKVVLAKCLSTEPVCLLCDEPTRGIDEGAKQEIYHLLDQFVRGCRSFPGSPAESCLMNAKTIVAPATTATTATTAPRSRLRLSVDRFGLPLVFILLCLVMAFASEYFMTWRNWMDILRQTSINGILAVGMTYVILTKGIDLSVGSILAFAGLCSALVATQGYGLLAAVSAGMFAGAMLGVVNGFMVANLSIPPFVATLGMLSIARGMTFILNDGSPVTDLPEEYLALGIGRVGPIGVPIIIFAVVALIFWMVLRYTTYGRYVYAVGGNEKSARTSGIGVRKVMFSVYVVSGLLAGLAGVVLSARTTSALPQAGMSYELDAIAAVVIGGTSLSGGTGSIVGTLFGALLIGVINNGLNLLGVSSYYQQVAKGLIIVFAVLIDVWRKKKR

SEQ ID NO: 40709 - DNA, 1026 bp, Pseudomonas syringae pv. phaseolicola 1448A
  CDS (1)..(1026): transl_table=11
atgagcaacgcgatttcgcaaaacaaaccagccttggcaccgaccaggaacaaacggcggctgccaaccgagctgagtatttttctggtgctgatcggtataggtctgatctttgagctgtttggctggatcgtccgtgatcagagctttctgctcaactcccagcgtctggtactgatgatccttcaggtgtcgatcatcggcttgctggccatcggcgtgactcaggtgatcattaccacaggcatcgacctgtcgtccggttcggtgctggcactgtcagcgatgattgccgcgagcctggcgcaaacctcggacttttcccgggcggtatttccttccttgaccgacctgcccgtgtggattccgatcgtggtcgggctcggagtcgggctgctggcgggtgccatcaacggcagcatcattgccataaccggtattccgccattcattgccacgctgggcatgatggtctccgcgcgtggcctggcgcgcttctacaccgaaggtcagccggtgagcatgctctctgactcctacacggctatcggacagggcgcgatgccggtgatcatctttctggtggtggcggtgatcttccacattgccctgcgttacaccaagtacggcaaatacacctacgccatcggcggcaacatgcaggctgcgcgtacttccgggatcaacgtcaagcgccacctggttatcgtctatagcatcgccgggctgctggccgggctggcaggggtggttgcctcggcacgtgccgcaaccgggcaggccagaatgggcatgtcctatgaactggacgctatcgctgccgcagtcatcggcggcaccagcctgtccggtggagtagggcgaatcaccggcactgtgatcggtgcgctgattctcggcgtaatggccagtggtttcacctttgtcggcgtagacgcttatgttcaggacattatcaaaggcctgatcattgtagtggcggtggtaatcgatcaatatcgcaacaagcgcaagaccaagcgctga

SEQ ID NO: 40710 - protein, 341 aa, Pseudomonas syringae pv. phaseolicola 1448A
MSNAISQNKPALAPTRNKRRLPTELSIFLVLIGIGLIFELFGWIVRDQSFLLNSQRLVLMILQVSIIGLLAIGVTQVIITTGIDLSSGSVLALSAMIAASLAQTSDFSRAVFPSLTDLPVWIPIVVGLGVGLLAGAINGSIIAITGIPPFIATLGMMVSARGLARFYTEGQPVSMLSDSYTAIGQGAMPVIIFLVVAVIFHIALRYTKYGKYTYAIGGNMQAARTSGINVKRHLVIVYSIAGLLAGLAGVVASARAATGQARMGMSYELDAIAAAVIGGTSLSGGVGRITGTVIGALILGVMASGFTFVGVDAYVQDIIKGLIIVVAVVIDQYRNKRKTKR

SEQ ID NO: 40711 - DNA, 1251 bp, Mycoplasma hyopneumoniae J
  CDS (1)..(1251): transl_table=4
atggaattttttaataattttaaaaataatttaaaagattttgcaaaaccagttaaaaattatctaaatgagacaaaaagtggacattatcttcaagccagcctccaccatctaaaaaaattttcaatgttatatatttttcttctggtttttgttatttttttagggattaccaaaggaactttattacaagcaaatacattcacccttttatttcaaaataattcttatattattattttggcaatggggatgctacttgtaattttaagtggaaatattgatctttctgttggaactcttgtcggtcttttaggactattttcggtttatatttataataataccggccaaagtatttgactaacttttatacttacaacgctaatcggggctgcaattggttttatccaaggctgacttattggttatggaaatatcccggcatttattgtaactttaggtggatttcttgcttttaaaggggctcaacttgtctattcaaatggggcaacactgactccaattggatccgttgattcaacttatattaagggaacaattgaaggaatccctgatctaaaagtagggaatatttgaattttttctttacttttacctctaattttaggcgcaattattgttagtctgcgaacttgaggatattatacaaaaagaaaatttggcattaaagttcaaaatattattatttttacaataattcaagtaattattttttctttattccttgcttgtggtataatattttcacttggagataaatcaatgcgttactatgttttatatgtaggtattgcactggctttatttacttttcttagccaaaataccgcttttgggcgctctgtttatgcaattggtggcaaccggaaagctgctctattatccggagtcaatgttaaaagaacaacaatgataatttttattatcattggcgcactagccggattttcttcgattattttcacagctacttattcttctgcgacttcttcgcgaggtgatgatcttgctcttgatgtcatttcagttgtctttactggtggagcttcagtctatggtggaattggatcggttagtggaacgatattaggaacatcaattatcggggtaatcaaccaaggtttgcttgttctaaatgttgccgaatcacaaaaatacataattaaaggactaattttagttgctgttgttggatgagatgttctctcaaataagaaaaataactaa

SEQ ID NO: 40712 - protein, 416 aa, Mycoplasma hyopneumoniae J
MEFFNNFKNNLKDFAKPVKNYLNETKSGHYLQASLHHLKKFSMLYIFLLVFVIFLGITKGTLLQANTFTLLFQNNSYIIILAMGMLLVILSGNIDLSVGTLVGLLGLFSVYIYNNTGQSIWLTFILTTLIGAAIGFIQGWLIGYGNIPAFIVTLGGFLAFKGAQLVYSNGATLTPIGSVDSTYIKGTIEGIPDLKVGNIWIFSLLLPLILGAIIVSLRTWGYYTKRKFGIKVQNIIIFTIIQVIIFSLFLACGIIFSLGDKSMRYYVLYVGIALALFTFLSQNTAFGRSVYAIGGNRKAALLSGVNVKRTTMIIFIIIGALAGFSSIIFTATYSSATSSRGDDLALDVISVVFTGGASVYGGIGSVSGTILGTSIIGVINQGLLVLNVAESQKYIIKGLILVAVVGWDVLSNKKNN

SEQ ID NO: 40713 - DNA, 1251 bp, Mycoplasma hyopneumoniae 7448
  CDS (1)..(1251): transl_table=4
atggaattttttaataatttaaaaaataatttaaaagattttgcaaaaccagttaaaaattatctaaatgagacaaaaagtggacattatcttcaagccagcctccaccatctaaaaaaattttcaatgttatatatttttcttctggtttttgttatttttttagggattaccaaaggaactttattacaagcaaatacattcacccttttatttcaaaataattcttatattattattttggcaatggggatgctacttgtaattttaagtggaaatattgatctttctgttggaactcttgtcggtcttttaggactattttcggtttatatttataataataccggccaaagtatttgactaacttttatacttacaacgctaatcggggccgcaattggttttatccaaggctgacttattggttatggaaatatcccggcatttattgtaactttaggtggatttcttgcttttaaaggggctcaacttgtctattcaaatggggcaactctgactccgattggatctgttggatcaacttatattaaaggaacaattgaaggaatccctgatctaaaagtagggaatatttgaattttttctttacttttacctctaattttaggcgcaattattgttagtctgcgaacttgaggatattatacaaaaagaaaatttggcattaaagttcaaaatattattatttttacaataattcaagtaattattttttctttattccttgcttgtggtataatattttcacttggagataaatcaatgcgttactatgttttatatgtaggtatcgcactggctttatttacttttcttagccaaaataccgcttttgggcgctctgtttatgcaattggtggaaaccggaaagctgctctattatccggagtcaatgttaaaagaacaacaatgataatttttattatcattggcgcacttgctggattttcttcgattattttcacagctacttattcttctgcgacttcttcgcgaggtgatgatcttgctcttgatgtcatttcagttgtctttactggtggagcttcagtctatggtggaattggatcggttagtggaacaattctaggaacatcaattatcggggtaatcaaccaaggtttacttgttctaaatgttgccgaatcacagaaatacataattaaaggactaattttagttgctgttgttggatgagatgttctctcaaataagaaaaataactaa

SEQ ID NO: 40714 - protein, 416 aa, Mycoplasma hyopneumoniae 7448
MEFFNNLKNNLKDFAKPVKNYLNETKSGHYLQASLHHLKKFSMLYIFLLVFVIFLGITKGTLLQANTFTLLFQNNSYIIILAMGMLLVILSGNIDLSVGTLVGLLGLFSVYIYNNTGQSIWLTFILTTLIGAAIGFIQGWLIGYGNIPAFIVTLGGFLAFKGAQLVYSNGATLTPIGSVGSTYIKGTIEGIPDLKVGNIWIFSLLLPLILGAIIVSLRTWGYYTKRKFGIKVQNIIIFTIIQVIIFSLFLACGIIFSLGDKSMRYYVLYVGIALALFTFLSQNTAFGRSVYAIGGNRKAALLSGVNVKRTTMIIFIIIGALAGFSSIIFTATYSSATSSRGDDLALDVISVVFTGGASVYGGIGSVSGTILGTSIIGVINQGLLVLNVAESQKYIIKGLILVAVVGWDVLSNKKNN

SEQ ID NO: 40715 - DNA, 1254 bp, Thermobifida fusca YX
  CDS (1)..(1254): transl_table=11
atggctcagcaaaccaccccggctccccagggcgccacggtcgcccgggacccccggctcatcatggacggctccggtctaggcgggctggtgcgcggcgcgctgcgccggctccgcagcggagaactcggcccgctgccggtcctcgtcggactcatcgtgatcgccggcgtcttctggagcctcaaccccaagttcctcaccgcccagaatctgtccaacctcaccctgcagatcgtcgccgtcggcttcatggcctgcggcgtgatcatggtgctgctgctcggggagatcgacctctccgtcggatcggtcgcaggcgtgtgcggcgtgatcgtgacgctcctggcagtcaactaccagtggaacgagatcgccgcgatcgtggtcgccatcctcgccggcaccctcatcggcaccctgcacggcacgatcttcgccaagatcggggtacccgccttcgtggtcaccttggccggattgatcggctggcagggcgcccagctctacctgctcggccctgaaggcacgatcaacgtcccctacaacggcctgatcggtgccatcacccacacctatctcgtcccggcggtcggctgggggatcggaatcaccgcggtcgccctctacgggctgatcagcgtccgcggggcgcgccgccgcgccgcggccgggctgcccgccaagtcggtcacggagatcggggtgcgcaccgcgctcctcgccctccccgtcctcggcggggtgtgggtgctcaactccttccgcggagtgcccgtcgctttcctgctcttcgtcggggtcgtggtgctcttcgacctgatcctgcggaagacccgctacgggcggatggtgttcgccgtgggcggcagcgcagaagcggcacgccgcgccggcatcaacgtcgacctgatccgcatctccgtgttcgctctcgcctccaccctggccggggtgggcggcatcctcctcgtgtcgcgcagctacgccgtcaaccagctcaccgggggcggcgacgacctgatgatggcgatcgcggccgcggtcatcggcggcaccagcctcttcggcggacgcggcagcgcctactcggccctgctcggcggcctcgtgctcggcgcgatctcctcggggctgtacctgctgcagatggactcctcggtgcggttcatgatcaccgcggtggtcctcctggtagcggtcatcctcgacgcggtgtcccgccggacccgcaaagcccacgcccgggagtag

SEQ ID NO: 40716 - protein, 417 aa, Thermobifida fusca YX
MAQQTTPAPQGATVARDPRLIMDGSGLGGLVRGALRRLRSGELGPLPVLVGLIVIAGVFWSLNPKFLTAQNLSNLTLQIVAVGFMACGVIMVLLLGEIDLSVGSVAGVCGVIVTLLAVNYQWNEIAAIVVAILAGTLIGTLHGTIFAKIGVPAFVVTLAGLIGWQGAQLYLLGPEGTINVPYNGLIGAITHTYLVPAVGWGIGITAVALYGLISVRGARRRAAAGLPAKSVTEIGVRTALLALPVLGGVWVLNSFRGVPVAFLLFVGVVVLFDLILRKTRYGRMVFAVGGSAEAARRAGINVDLIRISVFALASTLAGVGGILLVSRSYAVNQLTGGGDDLMMAIAAAVIGGTSLFGGRGSAYSALLGGLVLGAISSGLYLLQMDSSVRFMITAVVLLVAVILDAVSRRTRKAHARE

SEQ ID NO: 40717 - DNA, 1023 bp, Ralstonia eutropha JMP134
  CDS (1)..(1023): transl_table=11
atgcgcaattccattcatcccacggcgcacgccgttgcttcacaaggcgcggcgcgcacgcttggtcgccccggcggcgccaccacgcaggaacgccttcgagccctcggcatgctgccggtgctggtgctgctgtgcgccggcttcacggtgctgaccgacaacttcgccagcctgcaaaacctgtcgatcatcgcgcagcaggcgtcgatcaacctggtgctggcggccggcatgaccttcgtcatcctgacgggcgggatcgacctgtcggtcggttccatcctgtcgatctcggcggtggcggcgatgctgacgtcgctgacgccggaactgagtgcgctcagcgtgcccgccgcgctgctgtgcggcctgctgttcgggctggtgaacggcgcgctgattgccttcatgaagctgccgccgttcatcgtcacgctcggaagcctgaccgcagtgcgcgggctggcgcggctggtcgggcatgacagcacgctctacaacccggacatcggttttgccttcatcggcaatggcgacgtgctgggcgtgccgtggctcgtgatcatcgcgggtgccgtgatcgcggtgtcctgggtcgtgctgcgccggaccgtactggggctgcagatctacgccgtgggcggcaacgccgaggcggcgcggctgtcgggcatcaaggtgtgggtggtgctgctgttcgtctatgccgtgtctggcctgctggcggggctgggcggcgtgatgtccgcctcgcgcctgtacgcggccaacggcctgcagttgggccagtcttatgagctcgatgcgatcgccgcggtgatcctcggtggcacgagcttcgtgggcggcgtcggctccatcggcggcacgctgatcggcgcgctgatcattgccgcgctttccaatgggctggtgctgctgggtgtgtcggacatctggcaatacatcatcaagggtctggtcatcatcggcgcggtggcgctggaccgctatcgccagaagggctcggcccggacctga

SEQ ID NO: 40718 - protein, 340 aa, Ralstonia eutropha JMP134
MRNSIHPTAHAVASQGAARTLGRPGGATTQERLRALGMLPVLVLLCAGFTVLTDNFASLQNLSIIAQQASINLVLAAGMTFVILTGGIDLSVGSILSISAVAAMLTSLTPELSALSVPAALLCGLLFGLVNGALIAFMKLPPFIVTLGSLTAVRGLARLVGHDSTLYNPDIGFAFIGNGDVLGVPWLVIIAGAVIAVSWVVLRRTVLGLQIYAVGGNAEAARLSGIKVWVVLLFVYAVSGLLAGLGGVMSASRLYAANGLQLGQSYELDAIAAVILGGTSFVGGVGSIGGTLIGALIIAALSNGLVLLGVSDIWQYIIKGLVIIGAVALDRYRQKGSART

SEQ ID NO: 40719 - DNA, 966 bp, Ralstonia eutropha JMP134
  CDS (1)..(966): transl_table=11
atgagctccgccatcctgaacatgccgctgtccgcggactcccgcgcgcttgtcggccgcctgctggcgctggccgtgctgtgcgcgctgctgtcggtatcgtcggacgcgttcctgacgctgggcaacctgctcaatgtgctgcggcaggcgagcctgctgttcctgctcgcttctgggctgacgcttgtgatcctgacgggcggcctcgacctttccgtcggggccaacgtggcgatgtccgcgtgtctggcggcaagcgtcatgaaggcgacggaatcgaccatgctcggcgtaggtgccggtctcggttgcggcgtgctgatcggcctggcgaacggcctgctggtggctgcgctgcgtatcccgccgttcattgccacgtacggcatgttgtgggtgctgcatggcctgacgtactggttcatggcgggtgaaaccatccacggattcgcgccggaattccgcgccatcggcagcggctacctgtggggcgtgccagtgcccgtgttcctgatgctcgccttcctgacagccggcacggtgatctcccagaagaccacctacggccaggagatctatgcgatcggcgccaacccggtcgcggcgcggctctctggcgtgccggtaacctgtcgcctgctgctggtctacgtggtcagcggcgccatggccgggctggcgagcctggtgttcctggcgcgcctgaactccgccgaaggcgatatcggcgaaacgctcacgctgccggccatcgcggcggtgctgatcgggggcacatcgctgttcggcggcgtagggcgggtatccggcacgctcgtcggcgccatcctgctgacgctggtgctgaacggcatgaacctgctcacggtcagcgccaactggcagccgctggtgaccggggtcatcgtggtgctggcggtggtcctagacacgctgtcccgtcgccgtctcggcaagtcatga

SEQ ID NO: 40720 - protein, 321 aa, Ralstonia eutropha JMP134
MSSAILNMPLSADSRALVGRLLALAVLCALLSVSSDAFLTLGNLLNVLRQASLLFLLASGLTLVILTGGLDLSVGANVAMSACLAASVMKATESTMLGVGAGLGCGVLIGLANGLLVAALRIPPFIATYGMLWVLHGLTYWFMAGETIHGFAPEFRAIGSGYLWGVPVPVFLMLAFLTAGTVISQKTTYGQEIYAIGANPVAARLSGVPVTCRLLLVYVVSGAMAGLASLVFLARLNSAEGDIGETLTLPAIAAVLIGGTSLFGGVGRVSGTLVGAILLTLVLNGMNLLTVSANWQPLVTGVIVVLAVVLDTLSRRRLGKS

SEQ ID NO: 40721 - DNA, 942 bp, Staphylococcus saprophyticus subsp. saprophyticus ATCC 15305
  CDS (1)..(942): transl_table=11
atgaaacaatctagcttatcattttcatatttagaaaaaattattccatttattggtttaatattattagtcattatcattagtgtattaaatagtgcatttttagaaccatctaatctgtttaacttattgagacaagtttctataaatggattaattgcatttggtatgacatttgtaattttaacgggcggcatagacttatctgttggttctacactagcgttatccagtgcgcttatagctattttaatggtctcaggtgtagattctatgattgcgctattagtaggctgtattttaggtgcgattttaggtgctattaacgggcttttaattacgcttggtaagatggcgccatttatagcgactttggctacaatgactgtctttagaggtttgacactggttattacagatggcaatccaattactaatttaaatggcagctatgcctttcaattatttggacgaggttattttttaggtattccagttccagcagtgacaatgtttattactttcattattttgtatatcattttacataaaacaatatttggtagacaaacttatgctatgggtggtaatgaaaaggcagcttttatctctggtattaaagtgaataaattaaaaatcatgatttatagtttagctggtttaatgtctgcaatggctggtgcgattctcacatctcgtttaaactcagcgcagccaactgcaggtatgtcatatgaattggatgcaatcgctgctgttgtattgggtggtacatctttaacaggtggtaagggacgtatacttggcacattaataggtgtattaattataggtgtgttgaataatggactaaatttattaggggtttcttcattttaccaacaagtagttaaaggagttgtcattattattgcagtactcattgatagaaagaataaataa

SEQ ID NO: 40722 - protein, 313 aa, Staphylococcus saprophyticus subsp. saprophyticus ATCC 15305
MKQSSLSFSYLEKIIPFIGLILLVIIISVLNSAFLEPSNLFNLLRQVSINGLIAFGMTFVILTGGIDLSVGSTLALSSALIAILMVSGVDSMIALLVGCILGAILGAINGLLITLGKMAPFIATLATMTVFRGLTLVITDGNPITNLNGSYAFQLFGRGYFLGIPVPAVTMFITFIILYIILHKTIFGRQTYAMGGNEKAAFISGIKVNKLKIMIYSLAGLMSAMAGAILTSRLNSAQPTAGMSYELDAIAAVVLGGTSLTGGKGRILGTLIGVLIIGVLNNGLNLLGVSSFYQQVVKGVVIIIAVLIDRKNK

SEQ ID NO: 40723 - DNA, 990 bp, Shigella sonnei Ss046
  CDS (1)..(990): transl_table=11
atgatgtcttctgtttctacatcgggttctggcgcacctaagtcgtcattcagcttcgggcgtatctgggatcagtacggcatgctggtggtgtttgcggtgctctttatcgcctgtgccatttttgtcccaaattttgccaccttcattaatatgaaagggttgggcctggcaatttccatgtcggggatggtggcgtgtggcatgttgttctgccttgcttccggtgactttgacctttctgtcgcctccgtaattgcctgtgcgggtgtcaccacggcggtggttatcaacctgactgaaagcctgtggattggcgtggcagcggggttgctgcttggcattctctgtggcctggtcaatggctttgttatcgccaaactgaaaataaatgctctgatcacaacactggcaacgatgcagattgttcgaggtctggcgtacatcatttcagacggtaaagcggtcggtatcgaagatgaaagcttctttgcccttggttacgctaactggttcggtctgcctgcgccaatctggctcaccgtcgcgtgtctgattatctttggtttgttgctgaataaaaccacctttggtcgtaacaccctggcgattggcgggaacgaagaggctgcgcgtctggcgggtgtaccggttgttcgcaccaaaattattatctttgttctctctggcctggtatctgcgatagccggaattattctggcttcacgtatgactagtgggcagccaatgacgtcgattggttatgagcttattgttatctccgcctgcgttttaggtggcgtttctctgaaaggtggcatcggaaaaatctcatatgtggtggcgggtatcttaattttaggcaccgtggaaaacgccatgaacctgcttaatatttctcctttcgcgcagtacgtggttcgcggcttaatcctgctggcagcggtgatcttcgaccgttacaagcaaaaagcgaaacgcattgtctga

SEQ ID NO: 40724 - protein, 329 aa, Shigella sonnei Ss046
MMSSVSTSGSGAPKSSFSFGRIWDQYGMLVVFAVLFIACAIFVPNFATFINMKGLGLAISMSGMVACGMLFCLASGDFDLSVASVIACAGVTTAVVINLTESLWIGVAAGLLLGILCGLVNGFVIAKLKINALITTLATMQIVRGLAYIISDGKAVGIEDESFFALGYANWFGLPAPIWLTVACLIIFGLLLNKTTFGRNTLAIGGNEEAARLAGVPVVRTKIIIFVLSGLVSAIAGIILASRMTSGQPMTSIGYELIVISACVLGGVSLKGGIGKISYVVAGILILGTVENAMNLLNISPFAQYVVRGLILLAAVIFDRYKQKAKRIV

SEQ ID NO: 40725 - DNA, 999 bp, Shigella sonnei Ss046
  CDS (1)..(999): transl_table=11
atgtctgcttcgtcattaccattgccgcagggcaagagcgtctcgctcaaacaatttgtcagtcgccatattaatgagatcggtttgctggtggtgattgccattctttatctggtcttctccctgaacgcgcctggctttatctcattgaataaccagatgaacgtgctgcgcgatgccgccaccattgggattgccgcctgggcgatgacgctgattattatctccggtgaaattgatgtcagcgttgggccgatggtggcttttgtctcggtgtgcctggcatttttgctgcaatttgaagttccgttggcgattgcttgtctgctggtgttgctgttaggcgcgctgatgggaacgctcgccggggtgctgcgcggcgtgtttaacgtaccaagtttcgttgccacactggggctgtggagcgccctgcgcggaatggggctgtttatgaccaacgcactgccagtgccgattgacgaaaacgaggtgctggactggctgggcggacaatttctcggtgtgccagtatccgcgctgatcatgatggtgttgtttgcgctgtttgtgttcattagccgaaaaaccgccttcgggcgctcggtttttgccgttggcggtaatgccacggcggcgcagttgtgcggtattaacgttcgtcgggtgcgcattcttatctttaccctttcgggattattagcggcggtgaccggcattttgctggcggcacgcctcggttccggtaacgcaggtgccgcaaacggtctggagtttgacgtcatcgccgcggtcgtggtcggcggtacggcactttccggcggtcgcggttccctgttcggtacattgcttggtgtgctggtgattacgctaatcggtaacggtctggtgctgctcggtattaactcctttttccagcaggtggtacgcggcgtcatcatcgtggtggcggtgctggcgaatatcttgctgacccagcgaagcagtaaagcgaaacgctaa

SEQ ID NO: 40726 - protein, 332 aa, Shigella sonnei Ss046
MSASSLPLPQGKSVSLKQFVSRHINEIGLLVVIAILYLVFSLNAPGFISLNNQMNVLRDAATIGIAAWAMTLIIISGEIDVSVGPMVAFVSVCLAFLLQFEVPLAIACLLVLLLGALMGTLAGVLRGVFNVPSFVATLGLWSALRGMGLFMTNALPVPIDENEVLDWLGGQFLGVPVSALIMMVLFALFVFISRKTAFGRSVFAVGGNATAAQLCGINVRRVRILIFTLSGLLAAVTGILLAARLGSGNAGAANGLEFDVIAAVVVGGTALSGGRGSLFGTLLGVLVITLIGNGLVLLGINSFFQQVVRGVIIVVAVLANILLTQRSSKAKR

SEQ ID NO: 40727 - DNA, 1128 bp, Haemophilus somnus 129PT
  CDS (1)..(1128)
atgaataagttcaaatcaatcaatttacaagtctatattatgctgattgccattatggtgattatgttttttttctcaattgcaacagaaggggcttatttaagtgcaagaaatatctctaacttattacgtcaaactgctatcaccggtattcttgctattggtatggtgtttgtgattatctctgcagaaattgacttatcagttggttcactaatggggctactcggtggctttgcggcaattagtaatgtttggtggggttggccgttacccttaactatccttgttaccttgctcttaggtttactaatcggggcgtggagcggttggtgggttgcttatcaaaaagtaccatctttcatcgttaccttagcaggcatgcttgcatttcggggaattttgatcggattaacgaatggtactaccgtttcccccatcagtaatgatatgacaattatcggtcaaggttatctttccgacactatagggataattttagggagcatcataatattttgctttattgcttggggaagttatcagcgtaaagccagacaaaacctaaatttaccagttgccaaaatgcccaaagaaacagtgaaatatggcatgatagcaatccttattcttggtgcaatttatctgcttaacgattatcgaggcatgccaattccagtattaattctctgtggattagccattataggaacattcatttcgaaaaaaacagcatttggtcgacatatttacgcaattggtggcaatattgatgcagctcgcctatcaggtattgccgtggaaaaagttaaattaaccatttttgctcttaacggcttattagtggcaatagccggcttgattttaagttcccgtttaggagccggagcaccctctgccggtcaaaatgcagaactcgatgctattgccgcttgtgttatcggtggagccagtttagccggcggtatcggcagtatttttggcgtagtaatcggggcatttatcatcgccttattggataacggaatgagtatgctggatgtaccgactttttggcaatatattgtaaaaggtggcattttattactagcagtatggatagataccattagtaagaaaaaggtctaa

SEQ ID NO: 40728 - protein, 375 aa, Haemophilus somnus 129PT
MNKFKSINLQVYIMLIAIMVIMFFFSIATEGAYLSARNISNLLRQTAITGILAIGMVFVIISAEIDLSVGSLMGLLGGFAAISNVWWGWPLPLTILVTLLLGLLIGAWSGWWVAYQKVPSFIVTLAGMLAFRGILIGLTNGTTVSPISNDMTIIGQGYLSDTIGIILGSIIIFCFIAWGSYQRKARQNLNLPVAKMPKETVKYGMIAILILGAIYLLNDYRGMPIPVLILCGLAIIGTFISKKTAFGRHIYAIGGNIDAARLSGIAVEKVKLTIFALNGLLVAIAGLILSSRLGAGAPSAGQNAELDAIAACVIGGASLAGGIGSIFGVVIGAFIIALLDNGMSMLDVPTFWQYIVKGGILLLAVWIDTISKKKV

SEQ ID NO: 40729 - DNA, 1128 bp, Actinobacillus pleuropneumoniae serovar 1 str. 4074
  CDS (1)..(1128)
atgttgaagctaaaatctgtcaatttacaagtttatattatgctcattgctattgttgtgattatgagctttttctcggtagcaaccgacggtgcctatttaagcgcacgtaatatttcaaacttattacgccaaacctccattaccgggattttagcgatcgggatggtatttgtgattatctcggcggaaattgacctatccgtcggttcattaatggggttattaggcggattcgccgctatcgccgacgtttggtggggctggtctttaccgcttactattgcggtaacacttgtgctaggtacattattaggtgcttggaacggttggtgggtctcttatcgtaaagtaccgtcctttatcgtcaccttagcggggatgttagccttccgcggtattttaatcggcttaaccaacggtacgaccgtttcaccgattagtaatgatatgaccgctatcggtcaaggctatattccggatgttaccggtatgattctcggtttagtggcggtattctgtttcgttacttgggggacttatcaacgtaaagcgcgtaaaaacttaaacttgaatgtgcctgatgcgacgaaagacattatgaaatacggcttatttgctatctgtgtcttaggtgcgatttacttattgaacgattatcgcggtatcccgttccctgtactggtattagcgattttaaccgtggtcggtatgtttatcgcacgtaaaaccgcatttggtcgccatatttatgccatcggcggtaatattgaggcggcaagactttcagggattaacgttgaaaaagtaaaattaaccattttcgcaatcaacggttttatggtagcgattgccggtttaatccttagtgcgcgtttaggtgcgggggcgccgtctgcaggtcaaaatgcggagctggatgcgattgcggcttgtgtcatcggcggggtaagtttagccggcggtatcggtagcgtatatggcgttattatcggtgcctttattatcgctttacttgataacggtatgagtatgttagacgtgccgactttctggcaatatatcgtaaaaggtgcgattctattattagcggtttgggtcgatactatgagtaagaaaaaaatgtaa

SEQ ID NO: 40730 - protein, 375 aa, Actinobacillus pleuropneumoniae serovar 1 str. 4074
MLKLKSVNLQVYIMLIAIVVIMSFFSVATDGAYLSARNISNLLRQTSITGILAIGMVFVIISAEIDLSVGSLMGLLGGFAAIADVWWGWSLPLTIAVTLVLGTLLGAWNGWWVSYRKVPSFIVTLAGMLAFRGILIGLTNGTTVSPISNDMTAIGQGYIPDVTGMILGLVAVFCFVTWGTYQRKARKNLNLNVPDATKDIMKYGLFAICVLGAIYLLNDYRGIPFPVLVLAILTVVGMFIARKTAFGRHIYAIGGNIEAARLSGINVEKVKLTIFAINGFMVAIAGLILSARLGAGAPSAGQNAELDAIAACVIGGVSLAGGIGSVYGVIIGAFIIALLDNGMSMLDVPTFWQYIVKGAILLLAVWVDTMSKKKM

SEQ ID NO: 40731 - DNA, 1128 bp, Haemophilus influenzae R2866
  CDS (1)..(1128)
atgtttaagttaaaatccgtaaatttacaagtttacattatgttaatagctattgccgtcattatagcattctttagtgttgctactgatggtgcttatttaagtgcaagaaatatttctaacttgttacgccaaacttcaattactggcattcttgcaattggaatggtttttgtcattatttctgctgaaattgacttatctgttggttcacttatgggcctactgggcggatttgcagctattgccgatgtttggtggggcttcccattacctgtaactattattgcaacaattgctcttggtttaatttttggtatttggaatggttggtgggtggcttatcgcaaagtgccatcctttattgttacacttgcaggttatctcgcattccgtggaattttgattggtttgactaatggcacaactgtatctcctattagtggatctatgacagttattggacaaggttatttatcagatattgcaggatttatcttaggtggtattgcagttattggatttgttctttggggaaattatcaacgtagaagtcgccagcagcttcagctggaagtgtctgcattatcaaaagattttacgaaatatgctttgtttgcagtaattgtattaggagcaatttatttacttaatgattatcgtggcattccatttcctgttttagtactagcagttcttgcaatcttagggttattcctctctcgtaaaacttcattcggccgccacgtttatgcgattggtggcaatattgatgcggcaaaattatctggtatcaatgtagagaaaacaaaactgattatctttgcaatgaatggtgtgttagttgcaatagcagggttgattttaagtgctcgtttaggtgcaggctcaccatcggcagggcaaaatgcagaactagatgcgattgcagcttgtgtcattggaggggcaagcttagcgggtggtgtaggaagtgtgtttggggttgttattggtgcacttatcatcgcatcgcttgataatggtatgagtatgcttgatgtgccaactttttggcaatatattgtcaaaggtgccattttgttacttgctgtatggatagatactagtaataagaaaaagatgtaa

SEQ ID NO: 40732 - protein, 375 aa, Haemophilus influenzae R2866
MFKLKSVNLQVYIMLIAIAVIIAFFSVATDGAYLSARNISNLLRQTSITGILAIGMVFVIISAEIDLSVGSLMGLLGGFAAIADVWWGFPLPVTIIATIALGLIFGIWNGWWVAYRKVPSFIVTLAGYLAFRGILIGLTNGTTVSPISGSMTVIGQGYLSDIAGFILGGIAVIGFVLWGNYQRRSRQQLQLEVSALSKDFTKYALFAVIVLGAIYLLNDYRGIPFPVLVLAVLAILGLFLSRKTSFGRHVYAIGGNIDAAKLSGINVEKTKLIIFAMNGVLVAIAGLILSARLGAGSPSAGQNAELDAIAACVIGGASLAGGVGSVFGVVIGALIIASLDNGMSMLDVPTFWQYIVKGAILLLAVWIDTSNKKKM

SEQ ID NO: 40733 - DNA, 1137 bp, Pseudomonas fluorescens PfO-1
  CDS (1)..(1137)
atgaatcaggtcaaacaactcttcacccgctacaagatgctcgcactggtgtttgccgtggcgttgatctggctgttcttcagctggcagaccgagggcggattcctgacaccacgcaacctctccaacctgctgcgccagatgtccatcaccgggatcctcgcctgcggcatggtgctggtcatcatcagcggcgagatcgatctgtccgtcggctcattgctgggcctgctcggtggcgtggcagccattctcgacgttgtctatcacataccactgctggcgaacctgagccttgtggtggtgtgcggactgctgatcggcctcgccaacggctacatggcggcctacctgcgcattccgtcgttcatcgtggggctgggaggcatgctggcttttcgggggattttgctggggatcaccggcggcacgaccattgcgccggtgtcgccggaactcgtctacattggccagggttatctgccccatacggtcggcgcgggtctgggtgtcctgctgttcgcactgacgttgttcctgacctggaaacaacggcgcaatcgcgcccttcacggcctcgcggcacattcactggcgcgtgacgtggcacgcgtgttgctgatcggcgcggtgctggccgggtttgtccagaccctcaacagctatgacggcattcccgtgccggtcctgctcctgctgatcctgctgggcggattcagctatgtgaccagccagaccgtgttcggccgacgcgtctattccgtgggcagcaacatggaagcgacgcgcctgtccggtatcaatgtgcaggccgtgaagctctggatcttcgggatcatgggcgtgatgtgcgccctcgccggcgtggtcaacaccgcgcgcctggccgccggctccccctcggccggcagcatgggcgaactcgacgccatcgccgcctgcttcatcggtggcacctcgatgcgtggcggttccggcacagtctatggcgccctcctcggcgccctggtcatcaccagcctggacaacggcatgtccatgctcgacgtcgacagctactggcagatgatcgtcaagggcagcattctggtgttggcggtttgggttgatgtgagtacgcggactgggcggcgttga

SEQ ID NO: 40734 - protein, 378 aa, Pseudomonas fluorescens PfO-1
MNQVKQLFTRYKMLALVFAVALIWLFFSWQTEGGFLTPRNLSNLLRQMSITGILACGMVLVIISGEIDLSVGSLLGLLGGVAAILDVVYHIPLLANLSLVVVCGLLIGLANGYMAAYLRIPSFIVGLGGMLAFRGILLGITGGTTIAPVSPELVYIGQGYLPHTVGAGLGVLLFALTLFLTWKQRRNRALHGLAAHSLARDVARVLLIGAVLAGFVQTLNSYDGIPVPVLLLLILLGGFSYVTSQTVFGRRVYSVGSNMEATRLSGINVQAVKLWIFGIMGVMCALAGVVNTARLAAGSPSAGSMGELDAIAACFIGGTSMRGGSGTVYGALLGALVITSLDNGMSMLDVDSYWQMIVKGSILVLAVWVDVSTRTGRR

SEQ ID NO: 40735 - DNA, 1200 bp, Burkholderia fungorum LB400
  CDS (1)..(1200)
atgacgcccgacgttacttcccaacgcgccgatgaagccctgccgcgaggcgcattcggcggtccgcagcgccttcagcaactgtttgcgcgctacaagattctcgcgctgctgatcgccgtggccgcgatctggattttcttttcggtgctgacgcacggcgctttcgttacgccgcgcaatctgtcgaacctgctgcggcagatgtcgattaccggcatgctcgcgtgcggcatggtgttcgtgatcattgccggcgagatcgatctgtcggtcgggtcgctactcggtttgctcggcggcgtggcggcgatactcgacgtcaaccggcactggccgctcgccgtcacgttacccgtggtgatgttgctcggcgtgctgatcggcatgttcaacggatggtggtcgacttaccggcgcgtgccgtcgttcattgtcgggctcggcggcatgctggcgtatcgcggcattctgctcggcgtgacaggcggctcgacgattgcgccggtgtcggacggcttcgtgttcgtcgggcaaggatatctgccgaggctcgcgggcgatacgcttgccgtggtgctgtttgtgctgctggcatttctgacgatacggcagcggcgaaaccgcgagcgttatcagttgcgtgtggtgccggtttggcaggacgtcgtgaaagtggtgggcgcgggcgtgattctcgccggctttgtcgctacgctcgaccgttacggcggtattccggtgccggtcctgttgctgctcgcgctgctgggtatctttacgtggatcgccacgcagacggtgttcgggcggcgcatctatgcggttggttcgaacctcgaagcgacgcgactctcgggcgtcaacaccaaccgcgtgaaactggcgattttcgcgctgatggggctgatgtgcgcgttcggcggcatcgtcaatacggcgcggcttgctgccgggtcgccttcggccggatcgatgggcgagctcgatgctattgcggcttgctttatcggtgggacgtcgatgcgcggtggttccggcacggtctacggtgcgttgatcggcgcactggtcatggcgagcctcgataacggcatgtcgatgctcgatgtcgatgcttactggcagatgatcgtgaagggcagcattctcgtgctggccgtgtggatcgatgtggtgtcggggtcgaaccggcggtga

SEQ ID NO: 40736 - protein, 399 aa, Burkholderia fungorum LB400
MTPDVTSQRADEALPRGAFGGPQRLQQLFARYKILALLIAVAAIWIFFSVLTHGAFVTPRNLSNLLRQMSITGMLACGMVFVIIAGEIDLSVGSLLGLLGGVAAILDVNRHWPLAVTLPVVMLLGVLIGMFNGWWSTYRRVPSFIVGLGGMLAYRGILLGVTGGSTIAPVSDGFVFVGQGYLPRLAGDTLAVVLFVLLAFLTIRQRRNRERYQLRVVPVWQDVVKVVGAGVILAGFVATLDRYGGIPVPVLLLLALLGIFTWIATQTVFGRRIYAVGSNLEATRLSGVNTNRVKLAIFALMGLMCAFGGIVNTARLAAGSPSAGSMGELDAIAACFIGGTSMRGGSGTVYGALIGALVMASLDNGMSMLDVDAYWQMIVKGSILVLAVWIDVVSGSNRR

SEQ ID NO: 40737 - DNA, 1200 bp, Burkholderia vietnamiensis G4
  CDS (1)..(1200): transl_table=11
atgaataccgaactttcctcctcttccgccgtgccgccggacgccgacgcgcgccgcctgcgcggccatccgctgcggcagatcttcgtgcgctacaaggtgctcgcgctgctgttcgcggtcgtcgcgatctgggcgttcttctcggtgctgaccgacggcgcgttcgtcacgccgcgcaacgtgtcgaacctgctgcggcagatgtcgatcaccggcatgctcgcgtgcgggatggtgttcgtcatcatcgccggcgagatcgacctgtcggtcggctcgctgctcgggctgctcggcggcgtcgcggcgatcctcgacgtcaaccgccactggccggtggccgcgacggtgccggcggtgctcgcgctcggcgtgctggtcgggctgttcaatggctggtggtcgacctatcggcgcgtgccgtcgttcatcgtcgggctcggcgggatgctcgcattccgcgggatcctgctcggcgtgaccggcggctcgacgatcgcgccggtgtccgacggcttcgtgttcctcggccagggctatctgccgcgcgcggtgggcgacggcctcgcggtgctgttgttcgcgctcgtcgcgctgctggtcgtgcggcagcgcggcacgcggcgccgctaccggctcgcggtcgtgccgccgtggcaggacgtcgcgaaggtcgtcggcgccggcgccgtgctgttcgcgttcgtcgcgacgctcgatcgctacggcggcattccggtgccggtgctgctgctgctcgcgctgctcggcgtgttctcgtggatcgcgacgcagacggtgttcggccggcgcatctatgcggtcggctcgaacctggaggccacgcgcctgtccggcgtcgataccgatcgcgtgaagctcgcgatcttcgcgctgatggggctgatgtgcgcgtttgccggcatcgtcaacaccgcgcggctcgcggccggctcgccgtcggccggcacgatgggcgagctcgacgcgatcgccgcgtgcttcatcggcggcacgtcgatgcgcggcgggtcgggcaccgtgtacggcgcgctgatcggcgcgctcgtgatggcgagcctcgacaacgggatgtcgatgctcgacgtcgacgcgtactggcagatgatcgtgaagggcgcggtgctggtgctggccgtgtggatcgacgtggtgtcgcgctcgaaccggcgctga

SEQ ID NO: 40738 - protein, 399 aa, Burkholderia vietnamiensis G4
MNTELSSSSAVPPDADARRLRGHPLRQIFVRYKVLALLFAVVAIWAFFSVLTDGAFVTPRNVSNLLRQMSITGMLACGMVFVIIAGEIDLSVGSLLGLLGGVAAILDVNRHWPVAATVPAVLALGVLVGLFNGWWSTYRRVPSFIVGLGGMLAFRGILLGVTGGSTIAPVSDGFVFLGQGYLPRAVGDGLAVLLFALVALLVVRQRGTRRRYRLAVVPPWQDVAKVVGAGAVLFAFVATLDRYGGIPVPVLLLLALLGVFSWIATQTVFGRRIYAVGSNLEATRLSGVDTDRVKLAIFALMGLMCAFAGIVNTARLAAGSPSAGTMGELDAIAACFIGGTSMRGGSGTVYGALIGALVMASLDNGMSMLDVDAYWQMIVKGAVLVLAVWIDVVSRSNRR

SEQ ID NO: 40739 - DNA, 1200 bp, Burkholderia cenocepacia AU 1054
  CDS (1)..(1200): transl_table=11
atgaattccgaactttcttcctcgaccccggcgacgccggatgcaggcgccggccgcgcgccgcggctgccattgcgccatgtcttcacgcgctacaaggtgctcgcgctgctgttcgcggtcgtcgcgatctgggcattcttctcggtgctgacggacggcgcgttcgtcacgccccgcaacgtatcgaacctgctgcggcagatgtcgatcaccggcatgctcgcgtgcggcatggtgttcgtcatcatcgcgggcgagatcgacctgtcggtcggctcgctgctcgggctgctcggcggcgtcgccgcgatcctcgacgtcaaccgccactggccggtcgcggcgacggtcccggccgtgctcgcgctcggcgtgctgatcgggctcttcaacggctggtggtcgacctatcggcgcgtgccgtcgttcatcgtcgggctcggcgggatgctcgcgtttcgcggcatcctgctcggcgtgacgggcggctcgacgatcgcgcccgtgtcggacggcttcgtgttcatcgggcagggctatctgccgcgcgtggccggcgacggcctcgcggtcctgctgttcgtggtcgcgacgctgctggtggtgcggcagcgcggcacgcggcggcgctaccggctcgcggtcgccccgctgtggcaggacgtcgcgaagatcgtcggcgcgggggcggtgctgttcgcgttcgtcgcgacgctcgaccgttacggcggtattccggtgcccgtgctgctgctgctcgcgctgctcggcgtgttctcgtggatcgcgacgcagacggtattcggccggcgcatctatgcagtggggtcgaacctggaggcgacgcggctgtcgggcgtggacaccgatcgcgtgaaactcgcgatcttcgcgctgatgggcctgatgtgcgcgttcgccggcctcgtcaacacggcgcggctcgcggccgggtcgccgtccgccggcacgatgggcgagctcgacgcgatcgccgcgtgcttcatcggcggcacctcgatgcgcggcgggtcgggcacggtctacggcgcgctgatcggcgcgctcgtgatggcgagcctcgacaacgggatgtcgatgctggacgtcgacgcgtactggcagatgatcgtcaagggcgcggtgctggtgctggcggtgtggatcgacgtggtgtcgcgctcgaaccggcggtga

SEQ ID NO: 40740 - protein, 399 aa, Burkholderia cenocepacia AU 1054
MNSELSSSTPATPDAGAGRAPRLPLRHVFTRYKVLALLFAVVAIWAFFSVLTDGAFVTPRNVSNLLRQMSITGMLACGMVFVIIAGEIDLSVGSLLGLLGGVAAILDVNRHWPVAATVPAVLALGVLIGLFNGWWSTYRRVPSFIVGLGGMLAFRGILLGVTGGSTIAPVSDGFVFIGQGYLPRVAGDGLAVLLFVVATLLVVRQRGTRRRYRLAVAPLWQDVAKIVGAGAVLFAFVATLDRYGGIPVPVLLLLALLGVFSWIATQTVFGRRIYAVGSNLEATRLSGVDTDRVKLAIFALMGLMCAFAGLVNTARLAAGSPSAGTMGELDAIAACFIGGTSMRGGSGTVYGALIGALVMASLDNGMSMLDVDAYWQMIVKGAVLVLAVWIDVVSRSNRR

SEQ ID NO: 40741 - DNA, 1152 bp, Chromohalobacter salexigens DSM 3043
  CDS (1)..(1152): transl_table=11
atgtccaatatgaaccaaaccgcttccagctcgcgttcgcaaggcggcggacgtcgtttcgacgtggcgcgcatgctgctggaggggcgcgctttcttcgccttgatcgcgatcatcgtcatcttctcgttgctgtcgcctgtctacttttcgaccagcaactttctgaccatgtcgtcgcacgtcgccatcttcgggttgctgtcgctggggatgttgctggtgatcttgacggggggcatcgatctgtccgtggggtccacgcttggcctggcgggcgtgttcgcgggatttctgatgcagggcgtctcgttcgaagcctttggcgtggtggtgtatccgcccgtttgggtggtggtcgtgctgacgtgtggcctgggggccctggtcggagcgatcaacggcgttctcatcgcctatttcaaggtgccggcgttcgtggcgaccttggggctcttgtacgtggcccgtggcgttgcgctgctgatgaccgatggcttgacctacaacaacctcggtggaagcgaggcgctgggcaataccgggttcgattggctggggttcaatcggctgttcggcatcccggtcggcgtgctgatcctggcggccgtggcgatcgcctgcctgttgctgctgtcgcgcacgccgttcgggcgctgggtgtattccaccggcggcaacgcgcgggccgccgagctttccggggtgccggtcaagcgcgtgcaggtctcggtgtatgtgctgtccggtatctgcgcggcgatcgccggcctggtgctgtcctcgcagttgacctcggcggggccgacggccggcacgacctatgagctcaccgcgatcgcgggggtggtcatcggtggcgcggcactcaccggtggtcgcggcaacgtgcgcggcaccctgctgggcgccttcgtgatcgggtttctctccgacgggctggtgatcatcggggtctcgtcgtactggcagaccgtgttcaccggggccgtcatcattctcgcggttctgctcaacagcattcagtacagcggtcggaagaacagcaagcccgcttccgatggcaagccgacttcaccgcaaccggaaggcgccagcgagcgctcgccggccacgggaagcactaccggcaaagccggtgcacaatcataa

SEQ ID NO: 40742 - protein, 383 aa, Chromohalobacter salexigens DSM 3043
MSNMNQTASSSRSQGGGRRFDVARMLLEGRAFFALIAIIVIFSLLSPVYFSTSNFLTMSSHVAIFGLLSLGMLLVILTGGIDLSVGSTLGLAGVFAGFLMQGVSFEAFGVVVYPPVWVVVVLTCGLGALVGAINGVLIAYFKVPAFVATLGLLYVARGVALLMTDGLTYNNLGGSEALGNTGFDWLGFNRLFGIPVGVLILAAVAIACLLLLSRTPFGRWVYSTGGNARAAELSGVPVKRVQVSVYVLSGICAAIAGLVLSSQLTSAGPTAGTTYELTAIAGVVIGGAALTGGRGNVRGTLLGAFVIGFLSDGLVIIGVSSYWQTVFTGAVIILAVLLNSIQYSGRKNSKPASDGKPTSPQPEGASERSPATGSTTGKAGAQS

SEQ ID NO: 40743 - DNA, 1194 bp, Moorella thermoacetica ATCC 39073
  CDS (1)..(1194): transl_table=11
gtgtttaatcttattaaaactatttcccctgcagaaacggtacaatctaaacctaaagcgaatgggtatttaagtagaatagatatacgcgcttatacaatgatattagccttattgggtatatgggctattttcacttatactacccagggtgcttttttgacttcccgtaatctatcaaacctcttcaggcagatgtcaattacctctattttagcgataggtatggtctttgtaatagtagccggtcatattgacctttccgtaggttctctcatgggacttactggaggggtagcggcaattttacaggtctggtatggttggcagaccattcctgctatttttataagctttttaattggtctgctggccggcttatggcagggctggtgggttgcctataaaaaggtgcctgctttcattgtcaccctgggcggtatgatggtatttcggggaattctaataggaattagtcatggcgaaacagtttcgcctctcatggatagttttaaacaaataggccaatcctatgtacctgaaagtacaggcttcttattagcattcctgggtattatttatgtgatctatgttactgtaaagcaacggtatactagaattaagtatggttttactgtgccttctttagctctggaaataatgcgtaccattttttacgcctttctcattggcctttttgtctatctaatgaatgattaccagggtatacctgtacctgtcctaatcgtagtggcgatggcatttatttttacgggtttagcaacgaaaactcgcttcgggcgttatgtctacgcaattggtggtaacagtgaagcagcacgtttatccggtattaatattcgatataacatcctggccgtttttgttatcagtgggttaatggctgccttaagcggtatcctgttaactgcaagattaaacggtgcttcagtagctgcagggcaaaatgctgagcttgatgccattgcagcgtgcgttataggtggtacaagtcttatgggtggtacaggtagtattggtggggcgatgataggagcacttgttatggccagtttagataatggcctgagcatgatgaataccccgaccttctggcagtttatagttaaaggtttgattcttgtgctggcggtatggatcgatatcgcaactaaaacaagggctcaaaattga

SEQ ID NO: 40744 - protein, 397 aa, Moorella thermoacetica ATCC 39073
MFNLIKTISPAETVQSKPKANGYLSRIDIRAYTMILALLGIWAIFTYTTQGAFLTSRNLSNLFRQMSITSILAIGMVFVIVAGHIDLSVGSLMGLTGGVAAILQVWYGWQTIPAIFISFLIGLLAGLWQGWWVAYKKVPAFIVTLGGMMVFRGILIGISHGETVSPLMDSFKQIGQSYVPESTGFLLAFLGIIYVIYVTVKQRYTRIKYGFTVPSLALEIMRTIFYAFLIGLFVYLMNDYQGIPVPVLIVVAMAFIFTGLATKTRFGRYVYAIGGNSEAARLSGINIRYNILAVFVISGLMAALSGILLTARLNGASVAAGQNAELDAIAACVIGGTSLMGGTGSIGGAMIGALVMASLDNGLSMMNTPTFWQFIVKGLILVLAVWIDIATKTRAQN

SEQ ID NO: 40745 - DNA, 1200 bp, Burkholderia ambifaria AMMD
  CDS (1)..(1200): transl_table=11
atgaataccgaactgtcttcctcttccgccgtgccgccggacgccgacgcgcgccgcgggcaccgccatccgttgcgtcaggtcttcgtgcgctacaaggtgctcgcgctgctgttcgcggtcgcggcgatctgggtgttcttttcggtgctgaccgacggggcattcgtcacgccgcgcaacgtgtcgaacctgctgcggcagatgtcgatcaccggaatgctcgcgtgcgggatggtgttcgtgatcatcgcgggcgagatcgacctgtcggtcggctcgttgctcgggctgctcggcggcgtcgcggcgatcctcgacgtcaatcggcactggcccgtcgccgcgacggtgccggcggtgctcgcgctcggcgtgctggtcgggttgttcaacggctggtggtcgacctaccgtcgcgtgccgtcgttcatcgtcgggctgggcggaatgctcgcgttccgcggcatcctgctcggcgtgacgggcggctcgacgatcgcgccggtgtccgacggcttcgtgttcatcggtcagggctacctgccgcgcatggcgggcgacggcctcgcgctgctgctgttcgcgctcgtcgcgctgctggtcgtccggcagcgcggcacgcggcgccgttaccggctcgcggtcgcgccgctgtggcaggacgtcgcgaaggtcgtcggcgccggggccgtgctgttcgcgttcgtcgcgatgctcgaccgctacggcggcattcccgtgcccgtgctgctgctgctcgcgctgctcggcgcgttctcgtggatcgcgacgcagaccgtgttcggccgacgcatctatgcggtgggttcgaacctggaggcgacgcggctgtcgggcgtcgatacggatcgcgtgaagctggcgatcttcgcgctgatggggctgatgtgcgcgttcgcggggatcatcaataccgcgcggctcgcggccggctcgccgtcggccggcacgatgggcgaactcgacgcgatcgccgcgtgcttcatcggcggcacgtcgatgcgcggcgggtcgggcaccgtctatggcgcgctgatcggtgcgctcgtgatggcgagcctcgacaacgggatgtcgatgctcgacgtcgacgcgtactggcagatgatcgtcaagggcgcggtgctggtactggcggtgtggatcgacgtggtgtcgcgttcgaaccggcggtga

SEQ ID NO: 40746 - protein, 399 aa, Burkholderia ambifaria AMMD
MNTELSSSSAVPPDADARRGHRHPLRQVFVRYKVLALLFAVAAIWVFFSVLTDGAFVTPRNVSNLLRQMSITGMLACGMVFVIIAGEIDLSVGSLLGLLGGVAAILDVNRHWPVAATVPAVLALGVLVGLFNGWWSTYRRVPSFIVGLGGMLAFRGILLGVTGGSTIAPVSDGFVFIGQGYLPRMAGDGLALLLFALVALLVVRQRGTRRRYRLAVAPLWQDVAKVVGAGAVLFAFVAMLDRYGGIPVPVLLLLALLGAFSWIATQTVFGRRIYAVGSNLEATRLSGVDTDRVKLAIFALMGLMCAFAGIINTARLAAGSPSAGTMGELDAIAACFIGGTSMRGGSGTVYGALIGALVMASLDNGMSMLDVDAYWQMIVKGAVLVLAVWIDVVSRSNRR

SEQ ID NO: 40747 - DNA, 1179 bp, Bacillus sp
  CDS (1)..(1179): transl_table=11
atgaaaagtttggtttcttttcgagcctccatggattcagaaaaacggagaaggctgcttccaaaattggatttccgctcatatacgcttgtcattgcccttgtgcttatagcgcttatttttggagtgttaacagacggggagttcctatcgtcacgcaatttgtccaacttatttatgcaaatgtctgtaatctcgattttagcaatcgggatgacactagttattatagcaggtcatattgatttatctgtaggctcggtcgttggattaacaggaggaattgcagccattttacaagtttggtatggttggggaactgtttctgttattgttgtggcaattattgtcggtgcattgataggactttggcaaggctggtgggtttcttatcgcaatgtgcctgcgtttattgttacactaggcggcatgctgatttttaggggaattttaatcgggatcagtaatggagagacgattgccccgttgaataaaagttttgaagcaattgggaatagttatctgccatatgcagttggatatgtactagcaatcatcggtattatcatgctatttgtttttgtgaatagaaaccgcaaaaagaggaagctattagggttaactgtccataccaaagccaatgattatggaaaagcggcgatttactcactgtgcattttggtattagtttacatgttaaaccgctactacggtattccgatcccaatgcttattgtcgttctacttgctatccttttcgtttttatcgctgtcaaaactccatttggaagatacatttacgccattggcgggaatattgaagcagcagctctctcagggataaatatcaaacgtgttgtacttactatatttgttttaatgggagcgctttctggagtagcaggcattattttaacgagtagattgaatgcggcaacagtaagtagcggggaaatgtatgagttagatgcaattgctgcctgcgtcattggaggcacaagcctaatgggcggaagaggaaatataatcggagctatgatcggcgcccttattatggctagcatcgataatgggatgagcatgatgaacatcgaaaccttttggcaatttattgtaaaaggattgattcttattatcgctgtctggattgatatatcgagtaaaagccgaactaactaa

SEQ ID NO: 40748 - protein, 392 aa, Bacillus sp
MKSLVSFRASMDSEKRRRLLPKLDFRSYTLVIALVLIALIFGVLTDGEFLSSRNLSNLFMQMSVISILAIGMTLVIIAGHIDLSVGSVVGLTGGIAAILQVWYGWGTVSVIVVAIIVGALIGLWQGWWVSYRNVPAFIVTLGGMLIFRGILIGISNGETIAPLNKSFEAIGNSYLPYAVGYVLAIIGIIMLFVFVNRNRKKRKLLGLTVHTKANDYGKAAIYSLCILVLVYMLNRYYGIPIPMLIVVLLAILFVFIAVKTPFGRYIYAIGGNIEAAALSGINIKRVVLTIFVLMGALSGVAGIILTSRLNAATVSSGEMYELDAIAACVIGGTSLMGGRGNIIGAMIGALIMASIDNGMSMMNIETFWQFIVKGLILIIAVWIDISSKSRTN

SEQ ID NO: 40749 - DNA, 1734 bp, Mycobacterium leprae
  CDS (1)..(1734): transl_table=11
gtggtagacatcgacggacggattgagtccattaatcccgccgctactcggatattgggcttacgagcccacgatgtcgttgacatgaagcatggccatccattctgcttctacgatacagacaatcagcgggttgatcttgagcgtgaggtcatgcgcgtcgtacgacgcgaagtaacaacggtaagcaaagtcgtcggcattgaccaacacagtggccagcggttatggctatcggtaaacgtgagcctgcttgcgtacaaggctcccccacactctgcactggtagtctcgttttctgacatttctgcccaccacctttcgatcgaacggctcacctacgaggcaacccacgactgtctcaccggtcttgccaatcgcaggtttgcggaagaccagatcaccaaatcactgcagcatgacgaacgctctcgattagctgctgtactgcttcttgacctcgacgatttcaaagtgatcaacgactcactaggccacgacgtaggtgacgcggtgttgcagactgtagcgcagcgactacgctcggctgtgcggcccgacgatgtcgtcgcgcggctgggcggagacgagttcatcgtactactccggggtcccctttcggacatgaatgctaacgacgtcgcaaaaagactgcacacaacactgtccgagtcactcgtggtcgaccagctcacggtgcctatcggagcgagtgttggcatccttgaggtgagacctgacgatcgacggcgggccgccgacattttgcgtgatgccgactccgcgatgtatgcagccaagaacaagaaacaatgtgccgtcacgccgcagcagctggtaccgttcgtcgcgctgatcgcactgtttgtgttttttacagctgcggccggagctaagttctatgcaccatcaaatctgctggtcattctccaacaaaccgtggtgctggcgatcgtcggatacggcatgactttcgttatcatggcaggctccgttgaactatcggtgggctcgatcgtcgcattgactggagtcaccgcggcactcgtggctgcacagaatcaattcgctgcgatcgtcaccgccctgctggtggggttggctgctgggatggtaaacggcatcgtttttgcctacgggaagattccgtcattcgttagcaccctcggcatgcttcaagtctgccgtggtatcaccctgatgatcagcgacagttctgccaaaccgatgccgtttcacggaatactgggtgcaatgggagccatgccgtggatcctcatcgtctgtcttttcgtcacaatcctggcagggatcttattccaattcaccatgtttggtcggtgggtcaaagccatcggtggcaacgaacgtgtcgcaacgttagccggggtacctacccgcgggatcaaagtcgcgatcttcgcgatctgcggactgacagcaggcctcggcggtatcgtgcttgcttcccgcctcggagccgggacacccaccgcagcaacaggtttcgagatcgatgtcatcgccgcagtcgtcatcggcggcacgcccttaaccggcggattgggacgactcagcggaacgctgatcggtgcaataatcatctcgatgctctccaacggcatggtgtttatgggtgttgggaatgccgcctcgcagatcatcaagggaattatgctcgccgctgcggtttttgtcttcctacaacgccgcaagatcggcattatcaaatga

SEQ ID NO: 40750 - protein, 577 aa, Mycobacterium leprae
MVDIDGRIESINPAATRILGLRAHDVVDMKHGHPFCFYDTDNQRVDLEREVMRVVRREVTTVSKVVGIDQHSGQRLWLSVNVSLLAYKAPPHSALVVSFSDISAHHLSIERLTYEATHDCLTGLANRRFAEDQITKSLQHDERSRLAAVLLLDLDDFKVINDSLGHDVGDAVLQTVAQRLRSAVRPDDVVARLGGDEFIVLLRGPLSDMNANDVAKRLHTTLSESLVVDQLTVPIGASVGILEVRPDDRRRAADILRDADSAMYAAKNKKQCAVTPQQLVPFVALIALFVFFTAAAGAKFYAPSNLLVILQQTVVLAIVGYGMTFVIMAGSVELSVGSIVALTGVTAALVAAQNQFAAIVTALLVGLAAGMVNGIVFAYGKIPSFVSTLGMLQVCRGITLMISDSSAKPMPFHGILGAMGAMPWILIVCLFVTILAGILFQFTMFGRWVKAIGGNERVATLAGVPTRGIKVAIFAICGLTAGLGGIVLASRLGAGTPTAATGFEIDVIAAVVIGGTPLTGGLGRLSGTLIGAIIISMLSNGMVFMGVGNAASQIIKGIMLAAAVFVFLQRRKIGIIK

SEQ ID NO: 40751 - DNA, 1242 bp, Streptomyces kanamyceticus
  CDS (1)..(1242): transl_table=11
atgacgaccacgaccactcccccgggctcctcccgggacgcgtccgacgccccgccacccgcgcggtggccggcgggcgcgctgctgctgcgaagcgtgcgctccaacacgcgccagtacggcatgctcatcgccctggcgttcctcgtcgtgctgttccagatctggaccgacgggacgctgctgctcccgaacaacgtctccaacctgatccagcagaacggctacatcctcatcctggccatcggcatgatgatcgtcatcatcgcgggccacatcgacctctccgtgggctcgttggtcgccttcgtcggcgccatgtcggcggtcatgatggtcaagcacgacatgccctgggtgctcgccctggtcctctcgctcctgatcggcgcggtcgcgggggcctggcagggcttcttcatcgcgtacgtcggcatcccctcgttcatcgtgacgctggccgggatgctgctcttccgcggactcacccagatcgtccttgagggccagtcgctcgcgccgttccccgacgggttccagaacatcgccaagggcttcatcccggagatgggcccctacacccagtaccacaacccgacgctcgtcctcggcctgctcgccgtcgcgttgctgctcctgcgtgaacggcgcgctcgcaagcgccagttggcgtacgagctcgatgtcctgccgaccggtctgtgggcggccaagtgcgtggcgatgaccgcggccgtggtggcgttcaccctcaccctcgccagcttccacggcgtgcccgtcgtcatgctcatcatgtgcggcctgctcatcgcgctgggctatgtcatgcgcaacgccgtcatcggccgccatgtgtacgccctcggcggcaacaaggccgcggcgaagctgtcgggcgtcaaggacaagcgggtcaccctcctggtcttcgtgaacatgggcgtcctcgcggcgctcgcgggctgcgtgtacgcggcgcgcctgaacgcgggcaccccgcaggccgggctcaacttcgaactggaggcgatcgccgcctcgttcatcggcggcgcgtcgatgagcggcggcgtcggcacggtccttggcgcggtcatcggcggcctcgtcctcggcgtcctgaacaacggcatgtccctggtcggcatcggcacggactaccagcaggtcatcaaggggctcgtactgctcgccgcggtcggcttcgacgtctggaacaagcgcaaggcgggccgctag

SEQ ID NO: 40752 - protein, 413 aa, Streptomyces kanamyceticus
MTTTTTPPGSSRDASDAPPPARWPAGALLLRSVRSNTRQYGMLIALAFLVVLFQIWTDGTLLLPNNVSNLIQQNGYILILAIGMMIVIIAGHIDLSVGSLVAFVGAMSAVMMVKHDMPWVLALVLSLLIGAVAGAWQGFFIAYVGIPSFIVTLAGMLLFRGLTQIVLEGQSLAPFPDGFQNIAKGFIPEMGPYTQYHNPTLVLGLLAVALLLLRERRARKRQLAYELDVLPTGLWAAKCVAMTAAVVAFTLTLASFHGVPVVMLIMCGLLIALGYVMRNAVIGRHVYALGGNKAAAKLSGVKDKRVTLLVFVNMGVLAALAGCVYAARLNAGTPQAGLNFELEAIAASFIGGASMSGGVGTVLGAVIGGLVLGVLNNGMSLVGIGTDYQQVIKGLVLLAAVGFDVWNKRKAGR

SEQ ID NO: 40753 - DNA, 1167 bp, Thermoanaerobacter ethanolicus
  CDS (1)..(1167): transl_table=11
atgatggaaagcaaagtgagcaaaacaactgaaaagcgcattttaaatcatttcaagatagatataaggtcatatactatgatattagctttattggggatatggattattttttcaatattgacccatggcgattttctatctccgagaaacttgtccatgcttgccaggcaaatgtctataacagcaattttagcttcaggtatggttttagttatagttgctgggcatatagacttatctgttggttctgtggcagggtttacaggagctatagctgcaattcttcaggtgatatatcattgggatacagtgccgacaataatagtgactcttatggctgggcttgctattggagtttggcaaggattttggatagcctatagaaaagtgcctgcttttatagtgaccttaagctcaatgcttgtttttagaggtggaattttattaattacaaaaggtgttactatatctcctttaaaacaggacttcacagtcgtaggacagggatatattcctccattgtttagcgttattcttgctgtggtggcaggtgttttgtatgtaatcatggaccttaagaatagaaattctcgaattaaatacggcttaagtgtgtccagctggggaatagaactggcaaaaattgcaggagtattgattttcatcgctttgtttacaagtgttatgatatcttatgaaggaattcctgtgccagtattacttgttttggtaattgtgattttgcttacttttgtggctcaaaatacgacttttggacgttatgtttatgcgataggcggaaataaagaagcagcagcttactcaggaataaacatagctaagacgaacatgacgattttcttgattatgggggttttatcggcaattgcaggtatagttttgacttcaaggttaaatgctgctacaactagtgcaggaaatttgtttgagctggatgctatagcttcggcaattatcggtggaacaagcacgttaggaggagaaggaacagtaccaggagcgattttaggtgctcttattatggctagcatagataatggcatgagtcttatgaatatagattattctatattgacaattgtaaagggccttgtattagtacttgcagtgtgggtggatatttcaacaaagaagaggggataa

SEQ ID NO: 40754 - protein, 388 aa, Thermoanaerobacter ethanolicus
MMESKVSKTTEKRILNHFKIDIRSYTMILALLGIWIIFSILTHGDFLSPRNLSMLARQMSITAILASGMVLVIVAGHIDLSVGSVAGFTGAIAAILQVIYHWDTVPTIIVTLMAGLAIGVWQGFWIAYRKVPAFIVTLSSMLVFRGGILLITKGVTISPLKQDFTVVGQGYIPPLFSVILAVVAGVLYVIMDLKNRNSRIKYGLSVSSWGIELAKIAGVLIFIALFTSVMISYEGIPVPVLLVLVIVILLTFVAQNTTFGRYVYAIGGNKEAAAYSGINIAKTNMTIFLIMGVLSAIAGIVLTSRLNAATTSAGNLFELDAIASAIIGGTSTLGGEGTVPGAILGALIMASIDNGMSLMNIDYSILTIVKGLVLVLAVWVDISTKKRG

SEQ ID NO: 40755 - DNA, 981 bp, Rhizobium sp
  CDS (1)..(981): transl_table=11
atgactgactctctcgcaatcgctgctcagcccatcgcaactggccgcaggcacttcgtcgacatcgcgctacgttacgggctgattatcgtgcttgtcgtcctggtcgccgtcagccagttcctgtatccacgttttctcgatccgcaaaacatcaagaatattctgagccagaacgcgccgctcggcatcgtagcggtcggcatgacgctcgtcatgatcacccgtggtttcgatctctcggttggcgcgagctacgctgccggcgcgaccgtttttgcaagccttgcagttgccggatggtccctatggtgggccggcgcggtgacgctactcatcggccttgtggccggcctgatcaacgggacgatcatcacgcgtatcaacgtcaatccgttcgtggcaacgctcggcaccacctcggtcttcagcggtctcgccttgctctactcgaattcctcgcctttcgtggtctccgacaagaccttcgccatgatcggccgcgggagtttcctcgacgtgccgatcagcatctggatcctcgctgcggtgctcgtcgtcggcgagctcgtgctggcgcgtaccgtctacggccgctccctctacgcgatcggcggcaatgacgaggcggctcgcctcgccgggcttcccacagcgatgctgcgtacttcgacatatgtcatttgcggcgtgtgcgccgcgctcggcggcatgatcatcgcctcgcgcctttccatagggcaagcggatatcggcacgtcgatggcgctcgattccatcgccgtggtggtcatcggcggcacgtcactgatgggcggcgagggatccgtctggcgaagcgccatcggcctcatgatcgttgcggtgctgaccaatcttctcgacagtctggcggtcgattccaactaccagctcgtcatcaagggaacgatcgtggttgccgcggtcgcgctcgacgccttcgctcggtcgcgccgatga

SEQ ID NO: 40756 - protein, 326 aa, Rhizobium sp
MTDSLAIAAQPIATGRRHFVDIALRYGLIIVLVVLVAVSQFLYPRFLDPQNIKNILSQNAPLGIVAVGMTLVMITRGFDLSVGASYAAGATVFASLAVAGWSLWWAGAVTLLIGLVAGLINGTIITRINVNPFVATLGTTSVFSGLALLYSNSSPFVVSDKTFAMIGRGSFLDVPISIWILAAVLVVGELVLARTVYGRSLYAIGGNDEAARLAGLPTAMLRTSTYVICGVCAALGGMIIASRLSIGQADIGTSMALDSIAVVVIGGTSLMGGEGSVWRSAIGLMIVAVLTNLLDSLAVDSNYQLVIKGTIVVAAVALDAFARSRR

SEQ ID NO: 40757 - DNA, 1146 bp, Streptomyces olivaceoviridis
  CDS (1)..(1146): transl_table=11
atgaaggcgggcgaactggggtccatccccgtcgtcgtcggcctgatcctcatctgcgtcatcttccagagcctgaactcggcgttcctgtccgcgcagaacatcagcgacatcaccgtcacgatggtcggcaccggcatgatctcggtcggcatcgtcttcgtgctgctgctcggcgagatcgacctgtccgtcggctcggtcagcggcgcctccagcgccatcgcggccgtcctcgccgtgaaccagggcctgcccgagtggctggcggtgctgctcgccgtcgccgccggcgcggccatcggcgcggcccacggcttcttcttcgcggtgctcggcgcccccgccttcgccgtgaccctggccggcctgctgttctggctcggcttcatgctcaagatcctgggcgagaacggcaccatcaacctcgacagcgacggtctgatcgggcagctgacgacgtacttcttcgcggacgtcgccgccgcctacggcctggccgccctcgtcgtcgcggtgttcttcatcacctccttcctgggcaaccggcgccgcgaagccgcgggcatcccgtcccggccgctcagcgacatcgtgctgcgcaccgtgctgctggccgtcgtctccttcgccgcggcgatcatgtacaaccagtacaagggcctgccgctggccacggtgatcttcctcgccttcctcatcggcacggacttcctgctccgccgcaccgcctacggccgcaaggtcttcgccctcggcggcagcgtcgaggcgtcccgccgcgccggcatcaacgtcacggcgatccgcatctccgtgttcggcatcgcgggcggcttcgccgcgatcggcggcctgttcctggcctccaagatcgcgtccgccaaccagagcgccggtaccggtgacctgctgatgaacgcgatcgccgcggccgtgatcggcggcacgtcgctgttcggcggtcgcggccggacctggaacgcgctgctcggtgtgctggtgatcgtctccatccagtacgggctccagctggagtccatcgcggagccggtgaagtacatgatcaccgcggcggtcctgctgaccaccgtcgtgatcgactccgtgacgcgccggacgcagaagaccgcgggccgggcgtag

SEQ ID NO: 40758 - protein, 381 aa, Streptomyces olivaceoviridis
MKAGELGSIPVVVGLILICVIFQSLNSAFLSAQNISDITVTMVGTGMISVGIVFVLLLGEIDLSVGSVSGASSAIAAVLAVNQGLPEWLAVLLAVAAGAAIGAAHGFFFAVLGAPAFAVTLAGLLFWLGFMLKILGENGTINLDSDGLIGQLTTYFFADVAAAYGLAALVVAVFFITSFLGNRRREAAGIPSRPLSDIVLRTVLLAVVSFAAAIMYNQYKGLPLATVIFLAFLIGTDFLLRRTAYGRKVFALGGSVEASRRAGINVTAIRISVFGIAGGFAAIGGLFLASKIASANQSAGTGDLLMNAIAAAVIGGTSLFGGRGRTWNALLGVLVIVSIQYGLQLESIAEPVKYMITAAVLLTTVVIDSVTRRTQKTAGRA

SEQ ID NO: 40759 - DNA, 1002 bp, Rhizobium leguminosarum bv
  CDS (1)..(1002): transl_table=11
atggcaagactgatcagaaaacgcgaaaccctgctgttcctcatcatcgtcgtgatgatcgtggtcttttcgacgcgggctgcggatttcgccacacccggcaatctcgccggcatcttcaacgatacctcgatcctgatcatcctggcgctggcgcagatgacggtcatcctgacgaaatcgatcgacctgtcggtcgctgccaacctcgccttcaccggcatggcaatcgcgatgatgaacgccgcccaccccgatctgccgctcgtcgtgctgatcctgatggccgtcgtcatcggcgcctgtctcggcgccatcaacggctttctcgtctgggcgctggaaatcccgccgatcgtcgtcaccctcggcacgctcaccatctatcgcggcatggccttcgtgctttccggcggcgcctgggtcaacgcgcaccagatgacgccgatcttcctgtcggtgccgcgcacgccggtcctcggcctgcccgtgctcagttgggtgggcatcatcatcgtcatcctgatgtatgtgcttcttcgatatacccagttcggccgctccgcctatgcaaccggcggcaacccgactgccgccgtctatgccggtatcgatacgggctggacgaaattcctcgccttcgtcctctcgggcgctctggccggcctcgccagctatctctgggtatcgcgttatgccgtcgcctatgtcgatatcgccaacggcttcgagctcgacagcgtcgcggcttgcgtcatcggcggcatctcgattgccggtggcgtcggctcggtcgccggcaccgtgctcggcgcgcttttcctcggcgtcatcaaaaacgccctgccggtgatcggcatttcacccttcacgcagatggcgatatcaggcaccgtcatcattctcgccgtcgccttcaacgcccggcgcgagcgcaaccgcggccgcatcatcctgcgtgaccgcgccgcgaccgaaatcaaagcggaggccgcagcatga

SEQ ID NO: 40760 - protein, 333 aa, Rhizobium leguminosarum bv
MARLIRKRETLLFLIIVVMIVVFSTRAADFATPGNLAGIFNDTSILIILALAQMTVILTKSIDLSVAANLAFTGMAIAMMNAAHPDLPLVVLILMAVVIGACLGAINGFLVWALEIPPIVVTLGTLTIYRGMAFVLSGGAWVNAHQMTPIFLSVPRTPVLGLPVLSWVGIIIVILMYVLLRYTQFGRSAYATGGNPTAAVYAGIDTGWTKFLAFVLSGALAGLASYLWVSRYAVAYVDIANGFELDSVAACVIGGISIAGGVGSVAGTVLGALFLGVIKNALPVIGISPFTQMAISGTVIILAVAFNARRERNRGRIILRDRAATEIKAEAAA

SEQ ID NO: 40761 - DNA, 1224 bp, Bacillus stearothermophilus
  CDS (1)..(1224): transl_table=11
atgggagcactaatgcaaaaaacagcacaacattctccaaagcggtctacagaaagtcagcagttatcgttgaagcagatgatcaaaaacaatatgagaagttacagtatggtcatcgctctcattttgattatgttattgttccaagtgttaactggaggcattttgttgcggccattaaatattacaaacttgattttgcaaaacagttatattttggtgctggctgttggcatgatgcttgtcattatcaccggacatattgatttgtccgtcggatcggtggcagcttttgtcggggcattggccggcattctgatggttcagcaccatgcatcagtatggttgacggtgctcatttgtttattgctcggagccttgattggcgcatggcaaggattttgggtggcgtacgtaaaaattccatcattcattgttacattagcagggatgttgctgttccgaggattgacgatggttattttggaaggacagtcgatcgccccgtttccgaaaacattccaaaatatgagttctgggtttctccctgacgtatttcatggaggagagatccatctgttcaccattgtgatcggtttcgccgcttctctcttatttgttgtactggaatggagaaaacgaaacagtcagaaaaaatatgggtttgcggtcacccctgcggcgatgtttgccttgaagctggctgtgattgccgctgtgatcatgatttttacttatattttagcgacgtatgaacgaattccgacgattctagtgattttggttgcgttgatcattgcttattcctttgtggcgaaccggacggtcgtcggccgccatatttatgcgattggtggtaatgagaaggctgcgcaattgtccgggattaaaacgaaacgtgtcacgttttgggtgtttgtcaacatgggcgtgttggccgctttgtccggattgatttttgccgctcgcctcaacgctgcgacgccgaaagcggggaacttgtttgagctcgatgccattgcggcgtgctttattggaggcgcatccgcttatggaggaatcggcacgattagcggagcgatcatcggcggtctagtcatgggcgtaatgaataacgggatgtccttgctggggctcggtattgactggcaacaggccatcaaagggcttgtattgcttattgctgtggcttttgatatttacaacaaaaataaagctgcttaa

SEQ ID NO: 40762 - protein, 407 aa, Bacillus stearothermophilus
MGALMQKTAQHSPKRSTESQQLSLKQMIKNNMRSYSMVIALILIMLLFQVLTGGILLRPLNITNLILQNSYILVLAVGMMLVIITGHIDLSVGSVAAFVGALAGILMVQHHASVWLTVLICLLLGALIGAWQGFWVAYVKIPSFIVTLAGMLLFRGLTMVILEGQSIAPFPKTFQNMSSGFLPDVFHGGEIHLFTIVIGFAASLLFVVLEWRKRNSQKKYGFAVTPAAMFALKLAVIAAVIMIFTYILATYERIPTILVILVALIIAYSFVANRTVVGRHIYAIGGNEKAAQLSGIKTKRVTFWVFVNMGVLAALSGLIFAARLNAATPKAGNLFELDAIAACFIGGASAYGGIGTISGAIIGGLVMGVMNNGMSLLGLGIDWQQAIKGLVLLIAVAFDIYNKNKAA

SEQ ID NO: 40763 - DNA, 990 bp, Escherichia coli
  CDS (1)..(990): transl_table=11
atgatgtcttctgtttctacatcggggtctggcgcacctaagtcgtcattcagcttcgggcgtatctgggatcagtacggcatgctggtggtgtttgcggtgctctttatcgcctgtgccatttttgtcccaaattttgccaccttcattaatatgaaagggttgggcctggcaatttccatgtcggggatggtggcttgtggcatgttgttctgcctcgcttccggtgactttgacctttctgtcgcctccgtaattgcctgtgcgggtgtcaccacggcggtggttattaacctgactgaaagcctgtggattggcgtggcagcggggttgttgctgggcgttctctgtggcctggtcaatggctttgttatcgccaaactgaaaataaatgctctgatcacgacattggcaacgatgcagattgttcgaggtctggcgtacatcatttcagacggtaaagcggtcggtatcgaagatgaaagcttctttgcccttggttacgccaactggttcggtctgcctgcgccaatctggctcaccgtcgcgtgtctgattatctttggtttgctgctgaataaaaccacctttggtcgtaacaccctggcgattggcgggaacgaagaggccgcgcgtctggcgggtgtaccggttgttcgcaccaaaattattatctttgttctctcaggcctggtatcagcgatagccggaattattctggcttcacgtatgaccagtgggcagccaatgacgtcgattggttatgagctgattgttatctccgcctgcgttttaggtggcgtttctctgaaaggtggcatcggaaaaatctcatatgtggtggcgggtatcttaattttaggcaccgtggaaaacgccatgaacctgcttaatatttctcctttcgcgcagtacgtggttcgcggcttaatcctgctggcagcggtgatcttcgaccgttacaagcaaaaagcgaaacgcactgtctga

SEQ ID NO: 40764 - protein, 329 aa, Escherichia coli
MMSSVSTSGSGAPKSSFSFGRIWDQYGMLVVFAVLFIACAIFVPNFATFINMKGLGLAISMSGMVACGMLFCLASGDFDLSVASVIACAGVTTAVVINLTESLWIGVAAGLLLGVLCGLVNGFVIAKLKINALITTLATMQIVRGLAYIISDGKAVGIEDESFFALGYANWFGLPAPIWLTVACLIIFGLLLNKTTFGRNTLAIGGNEEAARLAGVPVVRTKIIIFVLSGLVSAIAGIILASRMTSGQPMTSIGYELIVISACVLGGVSLKGGIGKISYVVAGILILGTVENAMNLLNISPFAQYVVRGLILLAAVIFDRYKQKAKRTV

SEQ ID NO: 40765 - DNA, 1011 bp, Escherichia coli
  CDS (1)..(1011): transl_table=11
atgagtgcgttaaataagaaaagttttcttacttacctgaaagagggcggtatttacgtcgttcttttagttttgctggcgattattattttccaggacccaacatttttaagtctgttgaacttaagtaatattctcacccagtcatcggtgcgtattattatcgcgctcggtgtggcagggttaattgtcacccaggggaccgatctttctgctggtcgtcaggtagggctggcggcagtggtggctgcgacattattgcagtccatggataacgccaacaaagtgttcccggaaatggcgacgatgccgattgcgctggttattctgattgtctgtgccattggtgcggtgatcggtttgatcaacggtctgattatcgcttatctcaacgtgacgccgttcattaccacgctcggcacgatgatcatcgtctatggcatcaactcgctctattacgactttgtcggggcgtcgccaatttctggttttgacagtggcttctctacctttgctcagggctttgtcgcgctggggagtttccgtctctcttacatcaccttctacgcgttgattgcggtggcgttcgtctgggtgttgtggaacaaaacccgcttcggtaagaacatttttgccattggcggtaacccggaagcggcaaaagtatctggtgtcaacgtcggcctgaacctgctgatgatctacgcgttgtctggcgtgttctatgcctttggcgggatgttagaagccggacgtatcggctctgccaccaacaacctcggctttatgtatgagctggatgctatcgcggcgtgcgtggtaggcggtgtatcgttcagcggcggtgtggggacggtgattggcgtggtgaccggggtaattatttttaccgtcatcaactatggcctgacgtatatcggcgtaaacccatactggcagtacatcatcaaaggggcgattattatcttcgccgtagcgctggattcactgaaatacgcgcgtaagaaatga

SEQ ID NO: 40766 - protein, 336 aa, Escherichia coli
MSALNKKSFLTYLKEGGIYVVLLVLLAIIIFQDPTFLSLLNLSNILTQSSVRIIIALGVAGLIVTQGTDLSAGRQVGLAAVVAATLLQSMDNANKVFPEMATMPIALVILIVCAIGAVIGLINGLIIAYLNVTPFITTLGTMIIVYGINSLYYDFVGASPISGFDSGFSTFAQGFVALGSFRLSYITFYALIAVAFVWVLWNKTRFGKNIFAIGGNPEAAKVSGVNVGLNLLMIYALSGVFYAFGGMLEAGRIGSATNNLGFMYELDAIAACVVGGVSFSGGVGTVIGVVTGVIIFTVINYGLTYIGVNPYWQYIIKGAIIIFAVALDSLKYARKK

SEQ ID NO: 40767 - DNA, 1011 bp, Haemophilus influenzae
  CDS (1)..(1011): transl_table=11
atgagtgccttagaaaaaaacaaatcctttgatctcttaaaacaaaatgcgatttattttgtgttattgattttgctcggcatcatcattgcacaagatccgacattcttaaatttagtcaatttcagtaacatcttaacccaatcttctgtacgtttaattattgctttaggggttgcgggtttattgattacacaagggactgacttatctgcaggtcgtcaagttggtttggctgcagttatctctgcaacaatgttgcaatcaatggaaaatattaaccgcgtgttccctgaaatgggacaaataccaattccagtggttattctcgcagtttgtgctatcggtgcagtaattggtttagtgaatggtttagttatcgcttacttaaatgtaactccattcatcgcaaccatgggtacaatgatcatcatatatggtttcaactcactatactatgatgctgtaggtggttctccaatcgcaggttttagtgaaaatttctcaacatttgctcaaggattcttccgagtcggcagctttaaactctcttacatcacgatttatgcagctattgcagcattattagtatggattatgtggaacaaaactcgtttcggtaaaaacgtatttgctatcggtggtaacccagaagcagctaaagtatctggtgtaaacgttgcacgtaacttagttgcaatctatatgattgcaggtatgttctatgcctttggtggtatgcttgaagcgggtcgtatcggttctgcaactaacaacttaggttttatgtatgaattagatgctatcgccgcttgcgtagtgggtggtgtatcttttgctggtggggtaggtacagtaattggtgttatcactggggttattatctttactgttatcaactacggtttaacttacatcggtgtaaacccttactggcaatacatcattaaaggtagcattatcattctagcggtagccattgactcgttaaaatatgcgaagaaaaaataa

SEQ ID NO: 40768 - protein, 336 aa, Haemophilus influenzae
MSALEKNKSFDLLKQNAIYFVLLILLGIIIAQDPTFLNLVNFSNILTQSSVRLIIALGVAGLLITQGTDLSAGRQVGLAAVISATMLQSMENINRVFPEMGQIPIPVVILAVCAIGAVIGLVNGLVIAYLNVTPFIATMGTMIIIYGFNSLYYDAVGGSPIAGFSENFSTFAQGFFRVGSFKLSYITIYAAIAALLVWIMWNKTRFGKNVFAIGGNPEAAKVSGVNVARNLVAIYMIAGMFYAFGGMLEAGRIGSATNNLGFMYELDAIAACVVGGVSFAGGVGTVIGVITGVIIFTVINYGLTYIGVNPYWQYIIKGSIIILAVAIDSLKYAKKK

SEQ ID NO: 40769 - DNA, 1011 bp, Salmonella typhimurium
  CDS (1)..(1011): transl_table=11
atgagtgcgttaaacaagaaaagctttttgacctggctgaaagagggcggaatttacgtcgttcttttagtgttgctggcgattattattttccaggacccgacttttttaagtttgctgaatttaagtaatattctgacgcaatcttcggtacgtattattatcgcgctgggcgtggcgggactcatcgtcacccaggggacagatctgtcggcggggcgtcaggtagggctggcggcggtcgtggcggcaacattactgcaatcaatggaaaacgccaataaagtgtttccggaaatggcgaccatgccgattgcgctggtcatcctgattgtctgcgcgattggcgcggtgattggcttggtgaacggcatcatcattgcttacctgaacgtgacgccgtttattaccacgcttggcacgatgattatcgtttatgggatcaactccctttactatgactttgtcggcgcttcgcccatttccggctttgacagcggcttttccacctttgcacagggctttgtggcgatgggcagtttccggctctcatacatcaccttttacgctctgattgcggtagcgtttgtctgggtgctgtggaataagacccgttttggtaaaaacatttttgctattggcggcaacccggaagcggcgaaagtttctggcgtaaacgtggcgctgaacctgctgatgatttatgcgctctccggcgtgttttatgccttcggcggcttactggaagcagggcgtattggttctgccaccaacaacctcggctttatgtatgaactggatgcgattgccgcgtgcgtggtcgggggcgtatcgtttagcggcggagtgggtacggtcttcggcgtggtgaccggcgtcattatctttaccgtcatcaactacggcctgacctatatcggggtaaacccgtactggcagtacattatcaaaggcggcattatcattttcgccgtggcgctggactcgctgaaatacgcgcgtaagaagtag

SEQ ID NO: 40770 - protein, 336 aa, Salmonella typhimurium
MSALNKKSFLTWLKEGGIYVVLLVLLAIIIFQDPTFLSLLNLSNILTQSSVRIIIALGVAGLIVTQGTDLSAGRQVGLAAVVAATLLQSMENANKVFPEMATMPIALVILIVCAIGAVIGLVNGIIIAYLNVTPFITTLGTMIIVYGINSLYYDFVGASPISGFDSGFSTFAQGFVAMGSFRLSYITFYALIAVAFVWVLWNKTRFGKNIFAIGGNPEAAKVSGVNVALNLLMIYALSGVFYAFGGLLEAGRIGSATNNLGFMYELDAIAACVVGGVSFSGGVGTVFGVVTGVIIFTVINYGLTYIGVNPYWQYIIKGGIIIFAVALDSLKYARKK

SEQ ID NO: 40771 - DNA, 969 bp, Bacillus subtilis
  CDS (1)..(969): transl_table=11
atgaaaacggaacaactgcaaacagaacaaaaacggattcacttcgacggagtcatgcaaaaactcggcccgtttcttggtttatttattctcgttatcattgtatctattttaaatcccagctttcttgaaccgctgaatattttaaacctgcttcgccaggtcgccattaacggattaatcgcgttcgggatgacctttgttattttgacaggcggcattgatctttctgttggcgctattcttgccctgtccagtgctttagttgcggggatgattgtgtccggtgtcgatccggttctcgcgatcatccttggctgtatcattggtgccgtactaggcatgatcaacggattattgattactaaaggaaaaatggcgccctttatcgccacgcttgcgaccatgactgtgtttcgcggactgacgctagtgtatacagatggaaatccgattaccggacttggcacaaactacggttttcagatgttcggacgcggttactttttaggcattcctgtaccggcaattacgatggttcttgcctttgtcatcctttgggtgcttcttcataaaacaccattcggacgccgaacgtacgctatcggcggcaacgaaaaagccgcgctcatttcaggcatcaaagtgacgcgcgtgaaagtgatgatctattctttagccgggcttttatccgctcttgcaggtgccatattgacttcccgcctgcattcggcccagccgactgcgggagaatcgtacgaacttgatgctatcgcggcagtcgtcttaggagggacaagtctttccggcggccgaggacgcattgtcggcacgttaatcggggtgctgatcatcggcacacttaataacggacttaatctgcttggcgtctcatcattttatcagctggttgtcaaagggattgttatcttaattgcggtattgttagaccgcaagaagtcagcttag

SEQ ID NO: 40772 - protein, 322 aa, Bacillus subtilis
MKTEQLQTEQKRIHFDGVMQKLGPFLGLFILVIIVSILNPSFLEPLNILNLLRQVAINGLIAFGMTFVILTGGIDLSVGAILALSSALVAGMIVSGVDPVLAIILGCIIGAVLGMINGLLITKGKMAPFIATLATMTVFRGLTLVYTDGNPITGLGTNYGFQMFGRGYFLGIPVPAITMVLAFVILWVLLHKTPFGRRTYAIGGNEKAALISGIKVTRVKVMIYSLAGLLSALAGAILTSRLHSAQPTAGESYELDAIAAVVLGGTSLSGGRGRIVGTLIGVLIIGTLNNGLNLLGVSSFYQLVVKGIVILIAVLLDRKKSA

SEQ ID NO: 40773 - DNA, 966 bp, Escherichia coli
  CDS (1)..(966): transl_table=11
atgacaacccagactgtctctggtcgccgttatttcacgaaagcgtggctgatggagcagaaatcgcttatcgctctgctggtgctgatcgcgattgtctcgacgttaagcccgaactttttcaccatcaataacttattcaatattctccagcaaacctcagtgaacgccattatggcggtcgggatgacgctggtgatcctgacgtcgggcatcgacttgtcggtaggttctctgttggcgctaaccggcgcagttgctgcatctatcgtcggcattgaagtcaatgcgctggtggctgtcgctgccgctctcgcgttaggtgccgcaattggtgcggtaaccggagtgattgtagcgaaaggtcgcgtccaggcgtttatcgctacgctggttatgatgcttttactgcgcggcgtgaccatggtttataccaacggtagcccagtgaataccggctttactgagaacgccgatctgtttggctggtttggtattggtcgtccgctgggcgtaccgacgccagtctggatcatggggattgtcttcctcgcggcctggtacatgctgcatcacacgcgtctggggcgttacatctacgcgctgggcggcaacgaagcggcaacgcgtctttctggtatcaacgtcaataaaatcaaaatcatcgtctattctctttgtggtctgctggcatcactggccgggatcattgaagtggcgcgtctctcctccgcacaacccacggcggggactggctatgagctggatgctattgctgcggtggttctgggcggtacgagtctggcgggcggaaaaggtcgcattgttgggacgttgatcggcgcattaattcttggcttccttaataatggattgaatttgttaggtgtttcctcctattaccagatgatcgtcaaagcggtggtgattttgctggcggtgctggtagacaacaaaaagcagtaa

SEQ ID NO: 40774 - protein, 321 aa, Escherichia coli
MTTQTVSGRRYFTKAWLMEQKSLIALLVLIAIVSTLSPNFFTINNLFNILQQTSVNAIMAVGMTLVILTSGIDLSVGSLLALTGAVAASIVGIEVNALVAVAAALALGAAIGAVTGVIVAKGRVQAFIATLVMMLLLRGVTMVYTNGSPVNTGFTENADLFGWFGIGRPLGVPTPVWIMGIVFLAAWYMLHHTRLGRYIYALGGNEAATRLSGINVNKIKIIVYSLCGLLASLAGIIEVARLSSAQPTAGTGYELDAIAAVVLGGTSLAGGKGRIVGTLIGALILGFLNNGLNLLGVSSYYQMIVKAVVILLAVLVDNKKQ

SEQ ID NO: 40775 - DNA, 972 bp, Haemophilus influenzae
  CDS (1)..(972): transl_table=11
atgatgaaaaatgaaacatctaattttcaaataggaagatttttgattgaacagcgttcttttattgcattgattattcttatcgcgattgtatcaatgattaatcctgatttttttagcgtagataatattttgaatattttacgccaaacttcggttaatgcgattattgcagtgggtatgactttcgttattttaattgcaggtatagatctttctgttggatctgtattggcattgacaggtgcaatcgccgcttcaatggtgagtattgaattgcctatttttttagtcattcctgtggttttattgattggaacacttcttggtggcataagtggtgtaattgtggcaaagggaaaagttcaggcttttattgctaccttggttaccatgaccttactgcgtggtataacaatggtttatacagatggtcgtcctattacgacaggtttttcggataatgctgatctatttgctagcattggtacaggctatgttttaggtatcccagtaccaatttggattatgagtatcgtgtttgcggttgcttggtatattttaaaagacacaccaatcggtcgctatatttatgctttaggtggaaatgaggcagcgacccaactttctggtattaacgtcaataaaatcaaagtatttgtttttgcggtgagtggatttctttctgcgctggcgggtttaattgtaacttcacgtttatcttccgctcaacccactgctggcgtatcttatgaattagatgcaattgccgccgtggtagtcggtggaaccagtttgatgggggggaaaggtcgtgtaatgggaactctcatcggtgcattaatcatcggatttttaaacaatgcattaaatttattagatatttcatcttactatcaaatgatagcaaaagcgttggttattttggttgctgttttagccgataactatcttggtacaaaaaaactgtaa

SEQ ID NO: 40776 - protein, 323 aa, Haemophilus influenzae
MMKNETSNFQIGRFLIEQRSFIALIILIAIVSMINPDFFSVDNILNILRQTSVNAIIAVGMTFVILIAGIDLSVGSVLALTGAIAASMVSIELPIFLVIPVVLLIGTLLGGISGVIVAKGKVQAFIATLVTMTLLRGITMVYTDGRPITTGFSDNADLFASIGTGYVLGIPVPIWIMSIVFAVAWYILKDTPIGRYIYALGGNEAATQLSGINVNKIKVFVFAVSGFLSALAGLIVTSRLSSAQPTAGVSYELDAIAAVVVGGTSLMGGKGRVMGTLIGALIIGFLNNALNLLDISSYYQMIAKALVILVAVLADNYLGTKKL

SEQ ID NO: 40777 - DNA, 1128 bp, Haemophilus influenzae
  CDS (1)..(1128): transl_table=11
atgtttaagttaaaatccgtaaatttacaagtttacattatgttaatagctattgcagtcattatggcattctttagtgttgctactgatggcgcttatttaagtgcaagaaatatttctaacttgttacgccaaacytcaattactggcawtcttgcaattggaatggtttttgtcattatttctgctgaaattgacttatctgttggttcacttatgggcctactgggcggatttgcagctattgccgatgtttggtggggcttcccattacctgtaactattattgcaacaattgctcttggtttaatttttggtatttggaatggttggtgggtggcttatcgcaaagtgccatccttcattgttacacttgcaggttatctcgcatttcgtggaattttgattggtttgactaatggtacaactgtatctcctattagtggaactatgacagttattgggcaaggttatttatcagatattgcaggggttatcttaggtggtattgcagttattggatttgttctttggggaaattatcaacgtagaagtcgccagcagcttcagctggaagtgtctgcattatcaaaagattttacgaaatatgctttgtttgcagtaattgtattaggagcaatttatttacttaatgattatcgtggcattccatttcctgttttagtactggcagttcttgcaatcttagggttattcctctctcgtaaaacttcattcggccgccacgtttatgcaattggtggcaatattgatgcggcaaaattatctggtatcaatgtagagaaaacaaaactgattatctttgcaatgaatggtgtgttagttgcaatagcagggttgattttaagtgctcgtttaggtgcaggatcaccatctgctgggcaaaatgcagaactagatgcgattgcagcttgtgtcattggaggggcaagcttagctggtggtgtaggaagtgtgtttggggtcgttattggcgcacttatcatcgcatcgcttgataatggtatgagtatgcttgatgtgccaactttttggcaatatattgtcaaaggtggcattttgttacttgctgtatggatagatactagtaataagaaaaagatgtaa

SEQ ID NO: 40778 - protein, 375 aa, Haemophilus influenzae
  misc_feature (51)..(51): Xaa can be any naturally occuring amino acid
MFKLKSVNLQVYIMLIAIAVIMAFFSVATDGAYLSARNISNLLRQTSITGXLAIGMVFVIISAEIDLSVGSLMGLLGGFAAIADVWWGFPLPVTIIATIALGLIFGIWNGWWVAYRKVPSFIVTLAGYLAFRGILIGLTNGTTVSPISGTMTVIGQGYLSDIAGVILGGIAVIGFVLWGNYQRRSRQQLQLEVSALSKDFTKYALFAVIVLGAIYLLNDYRGIPFPVLVLAVLAILGLFLSRKTSFGRHVYAIGGNIDAAKLSGINVEKTKLIIFAMNGVLVAIAGLILSARLGAGSPSAGQNAELDAIAACVIGGASLAGGVGSVFGVVIGALIIASLDNGMSMLDVPTFWQYIVKGGILLLAVWIDTSNKKKM

SEQ ID NO: 40779 - DNA, 1029 bp, Escherichia coli
  CDS (1)..(1029): transl_table=11
atgctgaagtttattcagaacaaccgtgaaatcacggcactgctggcggtggtgctgctgtttgtattacccggttttctcgaccgccagtatttaagtgtgcaaacgctgaccatggtttatagcagcgcgcaaatcctgatcctgctggcaatgggcgcgacgctggtaatgcttacgcgcaatattgatgtttcagtgggttcgattaccggaatgtgcgcggtgctgttggggatgttactgaacgcaggatattcactacctgttgcttgtgtcgcgactttactgcttggtttgctcgcgggatttttcaacggtgtcctggtcgcgtggctaaagatccctgccattgttgccacccttggcacgttagggttgtacagaggcatcatgttgctgtggactggcggcaaatggattgaagggttacccgccgaactgaaacagctctccgccccgctgctgcttggcgtttcagcaattggttggttgacgataattctggtggcatttatggcctggctgctggcaaagacggcgtttggacgcagtttttatgccacgggcgataatttacagggcgctcgtcaactgggcgttcgtactgaagccattcgcattgtggcattttcgttgaacggctgcatggcggcactggcgggaattgtgtttgcttcgcagattggttttatccccaaccagaccggtaccgggctggagatgaaagcaattgcagcctgcgtgctgggcggcattagtttgctcggtggttccggtgcgatcattggtgcggtactcggcgcatggttcctgacgcagatcgatagcgtactggtgctgttgcgcattccggcatggtggaatgattttatcgcgggtctggttctgctggcggtgctggtgtttgatggacgcctgcgttgtgcgctggaacgtaatctacggcggcaaaaatatgcccgctttatgacgccaccgccatccgttaaacccgcttcgtcaggtaaaaaacgggaggccgcataa

SEQ ID NO: 40780 - protein, 342 aa, Escherichia coli
MLKFIQNNREITALLAVVLLFVLPGFLDRQYLSVQTLTMVYSSAQILILLAMGATLVMLTRNIDVSVGSITGMCAVLLGMLLNAGYSLPVACVATLLLGLLAGFFNGVLVAWLKIPAIVATLGTLGLYRGIMLLWTGGKWIEGLPAELKQLSAPLLLGVSAIGWLTIILVAFMAWLLAKTAFGRSFYATGDNLQGARQLGVRTEAIRIVAFSLNGCMAALAGIVFASQIGFIPNQTGTGLEMKAIAACVLGGISLLGGSGAIIGAVLGAWFLTQIDSVLVLLRIPAWWNDFIAGLVLLAVLVFDGRLRCALERNLRRQKYARFMTPPPSVKPASSGKKREAA

SEQ ID NO: 40781 - DNA, 999 bp, Escherichia coli
  CDS (1)..(999): transl_table=11
atgtctgcttcgtcattaccattgccgcagggcaagagcgtctcgctcaaacaatttgtcagtcgccatattaatgagatcggtttgctggtggtgattgccattctttatctggtcttctccctgaacgcgcctggctttatctcattgaataaccagatgaacgtgctgcgcgatgccgccaccattgggattgccgcctgggcgatgacgctgattattatctccggtgaaattgatgtcagcgttgggccgatggtggcttttgtctcggtgtgcctggcatttttgctgcaatttgaagttccgctggcggtggcgtgcctgctggtgttgctgttaggcgcgctgatgggaacgctggccggggtgctgcgcggcgtgtttaatgtaccaagtttcgttgccacactggggctgtggagcgccctgcgcggaatggggctgtttatgacgaacgcactgccagtgccgattgatgaaaacgaggtgctggactggctgggcggacaatttctcggtgtgccggtatccgcgctgatcatgattgtgttgtttgcgctgtttgtgttcatcagccgcaaaaccgccttcgggcgctcggtttttgccgttggcggtaatgctacggcggcgcagttgtgcggcatcaacgttcgtcgggtgcgcattcttatctttaccctttcgggattattagcggcggtgaccggcattttgttggcggcgcgcctcggttctggtaacgcaggtgccgcaaacggtctggagtttgacgtcatcgccgcggtcgtggtcggcggtacggcactttccggcggtcgcggttccctgttcggtacattgcttggtgtgctggtgattacgctaatcggtaacggtctggtgctgctcggtattaactcctttttccagcaggtggtacgcggcgtcatcatcgtggtggcggtgctggcgaatatcttgctgacccagcgaagcagtaaagcgaaacgctaa

SEQ ID NO: 40782 - protein, 332 aa, Escherichia coli
MSASSLPLPQGKSVSLKQFVSRHINEIGLLVVIAILYLVFSLNAPGFISLNNQMNVLRDAATIGIAAWAMTLIIISGEIDVSVGPMVAFVSVCLAFLLQFEVPLAVACLLVLLLGALMGTLAGVLRGVFNVPSFVATLGLWSALRGMGLFMTNALPVPIDENEVLDWLGGQFLGVPVSALIMIVLFALFVFISRKTAFGRSVFAVGGNATAAQLCGINVRRVRILIFTLSGLLAAVTGILLAARLGSGNAGAANGLEFDVIAAVVVGGTALSGGRGSLFGTLLGVLVITLIGNGLVLLGINSFFQQVVRGVIIVVAVLANILLTQRSSKAKR

SEQ ID NO: 40783 - DNA, 22 bp, Artificial sequence
  Primer sequence
atgtcgaaaagcaatccgtctg

SEQ ID NO: 40784 - DNA, 24 bp, Artificial sequence
  Primer sequence
ttaagaacggcgtttggttgcgga

SEQ ID NO: 40785 - protein, 468 aa, Artificial sequence
  Consensus
  Variant (2)..(3): Xaa in position 2 to 3 is any amino acid
  Variant (5)..(14): Xaa in position 5 to 14 is any amino acid
  Variant (15)..(21): Xaa in position 15 to 21 is any or no amino acid
  Variant (23)..(25): Xaa in position 23 to 25 is any amino acid
  Variant (26)..(26): Xaa in position 26 is any or no amino acid
  Variant (28)..(30): Xaa in position 28 to 30 is any amino acid
  Variant (32)..(35): Xaa in position 32 to 35 is any amino acid
  Variant (37)..(39): Xaa in position 37 to 39 is any amino acid
  Variant (40)..(40): Xaa in position 40 is any or no amino acid
  Variant (44)..(44): Xaa in position 44 is any amino acid
  Variant (47)..(48): Xaa in position 47 to 48 is any amino acid
  Variant (52)..(54): Xaa in position 52 to 54 is any amino acid
  Variant (55)..(56): Xaa in position 55 to 56 is any or no amino acid
  Variant (64)..(64): Xaa in position 64 is any amino acid
  Variant (67)..(72): Xaa in position 67 to 72 is any amino acid
  Variant (74)..(84): Xaa in position 74 to 84 is any amino acid
  Variant (85)..(163): Xaa in position 85 to 163 is any or no amino acid
  Variant (165)..(166): Xaa in position 165 to 166 is any amino acid
  Variant (167)..(167): Xaa in position 167 is any or no amino acid
  Variant (169)..(170): Xaa in position 169 to 170 is any amino acid
  Variant (172)..(174): Xaa in position 172 to 174 is any amino acid
  Variant (176)..(177): Xaa in position 176 to 177 is any amino acid
  Variant (180)..(181): Xaa in position 180 to 181 is any amino acid
  Variant (183)..(186): Xaa in position 183 to 186 is any amino acid
  Variant (188)..(189): Xaa in position 188 to 189 is any amino acid
  Variant (192)..(192): Xaa in position 192 is any amino acid
  Variant (196)..(196): Xaa in position 196 is any amino acid
  Variant (198)..(200): Xaa in position 198 to 200 is any amino acid
  Variant (203)..(209): Xaa in position 203 to 209 is any amino acid
  Variant (211)..(226): Xaa in position 211 to 226 is any amino acid
  Variant (227)..(320): Xaa in position 227 to 320 is any or no amino acid
  Variant (322)..(337): Xaa in position 322 to 337 is any amino acid
  Variant (339)..(341): Xaa in position 339 to 341 is any amino acid
  Variant (343)..(344): Xaa in position 343 to 344 is any amino acid
  Variant (347)..(348): Xaa in position 347 to 348 is any amino acid
  Variant (355)..(356): Xaa in position 355 to 356 is any amino acid
  Variant (359)..(360): Xaa in position 359 to 360 is any amino acid
  Variant (364)..(369): Xaa in position 364 to 369 is any amino acid
  Variant (371)..(371): Xaa in position 371 is any amino acid
  Variant (374)..(374): Xaa in position 374 is any amino acid
  Variant (376)..(376): Xaa in position 376 is any amino acid
  Variant (378)..(380): Xaa in position 378 to 380 is any amino acid
  Variant (387)..(389): Xaa in position 387 to 389 is any amino acid
  Variant (392)..(392): Xaa in position 392 is any amino acid
  Variant (395)..(398): Xaa in position 395 to 398 is any amino acid
  Variant (399)..(399): Xaa in position 399 is any or no amino acid
  Variant (401)..(403): Xaa in position 401 to 403 is any amino acid
  Variant (406)..(407): Xaa in position 406 to 407 is any amino acid
  Variant (411)..(411): Xaa in position 411 is any amino acid
  Variant (416)..(416): Xaa in position 416 is any amino acid
  Variant (419)..(419): Xaa in position 419 is any amino acid
  Variant (422)..(422): Xaa in position 422 is any amino acid
  Variant (424)..(424): Xaa in position 424 is any amino acid
  Variant (426)..(426): Xaa in position 426 is any amino acid
  Variant (428)..(428): Xaa in position 428 is any amino acid
  Variant (430)..(430): Xaa in position 430 is any amino acid
  Variant (432)..(432): Xaa in position 432 is any amino acid
  Variant (436)..(437): Xaa in position 436 to 437 is any amino acid
  Variant (439)..(440): Xaa in position 439 to 440 is any amino acid
  Variant (443)..(443): Xaa in position 443 is any amino acid
  Variant (446)..(446): Xaa in position 446 is any amino acid
  Variant (447)..(447): Xaa in position 447 is any or no amino acid
  Variant (449)..(452): Xaa in position 449 to 452 is any amino acid
  Variant (454)..(454): Xaa in position 454 is any amino acid
  Variant (457)..(457): Xaa in position 457 is any amino acid
  Variant (459)..(459): Xaa in position 459 is any amino acid
  Variant (463)..(463): Xaa in position 463 is any amino acid
  Variant (466)..(467): Xaa in position 466 to 467 is any amino acid
LXXLXXXXXXXXXXXXXXXXXFXXXXNXXXIXXXXSXXXXILAXGMXXVILXXXXXIDLSVGSXLAXXXXXXAXXXXXXXXXXXXXXXXXXXXXXXXXXXXXXXXXXXXXXXXXXXXXXXXXXXXXXXXXXXXXXXXXXXXXXXXXXXXXXXXXXXXXXXXXXIXXXLXXGXXXGXXNGXXIXXXXVXXFIXTLGXMXXXRGXXXXXXXGXXXXXXXXXXXXXXXXXXXXXXXXXXXXXXXXXXXXXXXXXXXXXXXXXXXXXXXXXXXXXXXXXXXXXXXXXXXXXXXXXXXXXXXXXXXXXXXXXXXXXXXXXXXXXXIXXXXXXXXXXXXXXXXLXXXTXXGRXXYAIGGNXXAAXXSGIXXXXXXIXVYXLXGXXXALAGIIXXXRLXSAXXXXXGXXXELXXIAAXVIGGXSLXGGXGXIXGXLXGXLIIXXLXXGLXLLXXVXXXXQXIIXGXVILXAVXXD

SEQ ID NO: 40786 - protein, 44 aa, Artificial sequence
  Consensus
  Variant (2)..(9): Xaa in position 2 to 9 is any amino acid
  Variant (10)..(10): Xaa in position 10 is Ala, Gly, Ser, Thr or Val
  Variant (11)..(15): Xaa in position 11 to 15 is any amino acid
  Variant (16)..(16): Xaa in position 16 is Ala, Gly, Ser, Thr or Val
  Variant (17)..(17): Xaa in position 17 is any amino acid
  Variant (18)..(18): Xaa in position 18 is Ala, Gly or Thr
  Variant (19)..(22): Xaa in position 19 to 22 is any amino acid
  Variant (23)..(23): Xaa in position 23 is Phe, Ile, Leu, Met or Val
  Variant (24)..(28): Xaa in position 24 to 28 is any amino acid
  Variant (29)..(29): Xaa in position 29 is Asp or Glu
  Variant (32)..(32): Xaa in position 32 is any amino acid
  Variant (33)..(39): Xaa in position 33 to 39 is any or no amino acid
  Variant (41)..(43): Xaa in position 41 to 43 is any amino acid
  Variant (44)..(44): Xaa in position 44 is Ala, Cys, Gly, Ser or Val
NXXXXXXXXXXXXXXXXXXXXXXXXXXXXLSXXXXXXXXGXXXX

SEQ ID NO: 40787 - protein, 32 aa, Artificial sequence
  Consensus
  Variant (2)..(3): Xaa in position 2 to 3 is any amino acid
  Variant (4)..(4): Xaa in position 4 is any or no amino acid
  Variant (6)..(8): Xaa in position 6 to 8 is any amino acid
  Variant (10)..(16): Xaa in position 10 to 16 is any amino acid
  Variant (17)..(17): Xaa in position 17 is Ile, Leu, Met or Val
  Variant (18)..(18): Xaa in position 18 is any amino acid
  Variant (19)..(19): Xaa in position 19 is Ala, Asp, Pro or Ser
  Variant (20)..(20): Xaa in position 20 is Phe, Ile, Leu or Val
  Variant (21)..(21): Xaa in position 21 is Ala, Ile, Leu or Val
  Variant (22)..(22): Xaa in position 22 is any amino acid
  Variant (25)..(25): Xaa in position 25 is Ala, Gly, Ser, Thr or Val
  Variant (26)..(31): Xaa in position 26 to 31 is any amino acid
  Variant (32)..(32): Xaa in position 32 is Ala, Gly, Asn or Ser
GXXXGXXXGXXXXXXXXXXXXXTLXXXXXXXX

SEQ ID NO: 40788 - protein, 36 aa, Artificial sequence
  Consensus
  Variant (2)..(2): Xaa in position 2 is any amino acid
  Variant (4)..(4): Xaa in position 4 is Asp, Gly or Ser
  Variant (6)..(7): Xaa in position 6 to 7 is any amino acid
  Variant (8)..(8): Xaa in position 8 is any or no amino acid
  Variant (10)..(12): Xaa in position 10 to 12 is any amino acid
  Variant (13)..(13): Xaa in position 13 is any or no amino acid
  Variant (15)..(15): Xaa in position 15 is Ile, Leu or Val
  Variant (16)..(24): Xaa in position 16 to 24 is any amino acid
  Variant (25)..(25): Xaa in position 25 is Phe or Tyr
  Variant (26)..(28): Xaa in position 26 to 28 is any amino acid
  Variant (30)..(32): Xaa in position 30 to 32 is any amino acid
  Variant (33)..(33): Xaa in position 33 is Ala, Gly or Ser
  Variant (34)..(34): Xaa in position 34 is any amino acid
  Variant (35)..(35): Xaa in position 35 is Ala, Gly, Ser, Thr or Val
  Variant (36)..(36): Xaa in position 36 is Ala, Gly or Ser
AXGXNXXXAXXXXGXXXXXXXXXXXXXXGXXXXXXX

SEQ ID NO: 40789 - protein, 61 aa, Artificial sequence
  Consensus
  Variant (2)..(2): Xaa in position 2 is any amino acid
  Variant (3)..(4): Xaa in position 3 to 4 is any or no amino acid
  Variant (6)..(6): Xaa in position 6 is Phe, Leu or Met
  Variant (7)..(7): Xaa in position 7 is any amino acid
  Variant (8)..(8): Xaa in position 8 is Ala, Ile or Val
  Variant (10)..(11): Xaa in position 10 to 11 is any amino acid
  Variant (12)..(12): Xaa in position 12 is Ala, Cys, Ser, Thr or Val
  Variant (13)..(13): Xaa in position 13 is any amino acid
  Variant (14)..(14): Xaa in position 14 is Ile, Leu, Met or Val
  Variant (17)..(20): Xaa in position 17 to 20 is any amino acid
  Variant (23)..(23): Xaa in position 23 is any amino acid
  Variant (25)..(31): Xaa in position 25 to 31 is any amino acid
  Variant (33)..(34): Xaa in position 33 to 34 is any amino acid
  Variant (35)..(35): Xaa in position 35 is Phe, Ile, Leu, Met or Val
  Variant (36)..(38): Xaa in position 36 to 38 is any amino acid
  Variant (39)..(39): Xaa in position 39 is Ile, Leu, Met or Val
  Variant (40)..(60): Xaa in position 40 to 60 is any amino acid
  Variant (61)..(61): Xaa in position 61 is Phe, Ile, Leu or Met
GXXXEXXXIXXXXXGGXXXXGGXGXXXXXXXGXXXXXXXXXXXXXXXXXXXXXXXXXXXXX

SEQ ID NO: 40790 - DNA, 1431 bp, Escherichia coli; identical to SEQ ID NO: 14875
  CDS (1)..(1431)

SEQ ID NO: 40791 - protein, 476 aa, Escherichia coli; identical to SEQ ID NO: 14876

SEQ ID NO: 40792 - DNA, 1638 bp, Fusobacterium nucleatum subsp. nucleatum ATCC 25586; identical to SEQ ID NO: 14877
  CDS (1)..(1638): transl_table=11

SEQ ID NO: 40793 - protein, 545 aa, Fusobacterium nucleatum subsp. nucleatum ATCC 25586; identical to SEQ ID NO: 14878

SEQ ID NO: 40794 - DNA, 1392 bp, Clostridium tetani E88; identical to SEQ ID NO: 14879
  CDS (1)..(1392): transl_table=11

SEQ ID NO: 40795 - protein, 463 aa, Clostridium tetani E88; identical to SEQ ID NO: 14880

SEQ ID NO: 40796 - DNA, 1380 bp, Bacteroides thetaiotaomicron VPI-5482; identical to SEQ ID NO: 14881
  CDS (1)..(1380): transl_table=11

SEQ ID NO: 40797 - protein, 459 aa, Bacteroides thetaiotaomicron VPI-5482; identical to SEQ ID NO: 14882

SEQ ID NO: 40798 - DNA, 1380 bp, Porphyromonas gingivalis W83; identical to SEQ ID NO: 14883
  CDS (1)..(1380): transl_table=11

SEQ ID NO: 40799 - protein, 459 aa, Porphyromonas gingivalis W83; identical to SEQ ID NO: 14884

SEQ ID NO: 40800 - DNA, 1449 bp, Rhodopseudomonas palustris CGA009; identical to SEQ ID NO: 14885
  CDS (1)..(1449): transl_table=11

SEQ ID NO: 40801 - protein, 482 aa, Rhodopseudomonas palustris CGA009; identical to SEQ ID NO: 14886

SEQ ID NO: 40802 - DNA, 1380 bp, Treponema denticola ATCC 35405; identical to SEQ ID NO: 14887
  CDS (1)..(1380): transl_table=11

SEQ ID NO: 40803 - protein, 459 aa, Treponema denticola ATCC 35405; identical to SEQ ID NO: 14888

SEQ ID NO: 40804 - DNA, 1380 bp, Treponema denticola ATCC 35405; identical to SEQ ID NO: 14889
  CDS (1)..(1380): transl_table=11

SEQ ID NO: 40805 - protein, 459 aa, Treponema denticola ATCC 35405; identical to SEQ ID NO: 14890

SEQ ID NO: 40806 - DNA, 1617 bp, Entamoeba histolytica HM-1:IMSS; identical to SEQ ID NO: 14891
  CDS (1)..(1617)

SEQ ID NO: 40807 - protein, 538 aa, Entamoeba histolytica HM-1:IMSS; identical to SEQ ID NO: 14892

SEQ ID NO: 40808 - DNA, 1389 bp, Desulfovibrio vulgaris subsp. vulgaris str. Hildenborough; identical to SEQ ID NO: 14893
  CDS (1)..(1389): transl_table=11

SEQ ID NO: 40809 - protein, 462 aa, Desulfovibrio vulgaris subsp. vulgaris str. Hildenborough; identical to SEQ ID NO: 14894

SEQ ID NO: 40810 - DNA, 1377 bp, Propionibacterium acnes KPA171202; identical to SEQ ID NO: 14895
  CDS (1)..(1377): transl_table=11

SEQ ID NO: 40811 - protein, 458 aa, Propionibacterium acnes KPA171202; identical to SEQ ID NO: 14896

SEQ ID NO: 40812 - DNA, 1365 bp, Symbiobacterium thermophilum IAM 14863; identical to SEQ ID NO: 14897
  CDS (1)..(1365): transl_table=11

SEQ ID NO: 40813 - protein, 454 aa, Symbiobacterium thermophilum IAM 14863; identical to SEQ ID NO: 14898

SEQ ID NO: 40814 - DNA, 1416 bp, Symbiobacterium thermophilum IAM 14863; identical to SEQ ID NO: 14899
  CDS (1)..(1416): transl_table=11

SEQ ID NO: 40815 - protein, 471 aa, Symbiobacterium thermophilum IAM 14863; identical to SEQ ID NO: 14900

SEQ ID NO: 40816 - DNA, 1443 bp, Photobacterium profundum SS9; identical to SEQ ID NO: 14901
  CDS (1)..(1443): transl_table=11

SEQ ID NO: 40817 - protein, 480 aa, Photobacterium profundum SS9; identical to SEQ ID NO: 14902

SEQ ID NO: 40818 - DNA, 1467 bp, Photobacterium profundum SS9; identical to SEQ ID NO: 14903
  CDS (1)..(1467): transl_table=11

SEQ ID NO: 40819 - protein, 488 aa, Photobacterium profundum SS9; identical to SEQ ID NO: 14904

SEQ ID NO: 40820 - DNA, 1401 bp, Photobacterium profundum SS9; identical to SEQ ID NO: 14905
  CDS (1)..(1401): transl_table=11

SEQ ID NO: 40821 - protein, 466 aa, Photobacterium profundum SS9; identical to SEQ ID NO: 14906

SEQ ID NO: 40822 - DNA, 1344 bp, Haloarcula marismortui ATCC 43049; identical to SEQ ID NO: 14907
  CDS (1)..(1344): transl_table=11

SEQ ID NO: 40823 - protein, 447 aa, Haloarcula marismortui ATCC 43049; identical to SEQ ID NO: 14908

SEQ ID NO: 40824 - DNA, 1449 bp, Azoarcus sp. EbN1; identical to SEQ ID NO: 14909
  CDS (1)..(1449): transl_table=11

SEQ ID NO: 40825 - protein, 482 aa, Azoarcus sp. EbN1; identical to SEQ ID NO: 14910

SEQ ID NO: 40826 - DNA, 1404 bp, Nostoc punctiforme PCC 73102; identical to SEQ ID NO: 14911
  CDS (1)..(1404)

SEQ ID NO: 40827 - protein, 467 aa, Nostoc punctiforme PCC 73102; identical to SEQ ID NO: 14912

SEQ ID NO: 40828 - DNA, 1416 bp, Haemophilus somnus 129PT; identical to SEQ ID NO: 14913
  CDS (1)..(1416)

SEQ ID NO: 40829 - protein, 471 aa, Haemophilus somnus 129PT; identical to SEQ ID NO: 14914

SEQ ID NO: 40830 - DNA, 1569 bp, Fusobacterium nucleatum subsp. vincentii ATCC 49256; identical to SEQ ID NO: 14915
  CDS (1)..(1569): transl_table=11

SEQ ID NO: 40831 - protein, 522 aa, Fusobacterium nucleatum subsp. vincentii ATCC 49256; identical to SEQ ID NO: 14916

SEQ ID NO: 40832 - DNA, 1383 bp, Fusobacterium nucleatum subsp. vincentii ATCC 49256; identical to SEQ ID NO: 14917
  CDS (1)..(1383): transl_table=11

SEQ ID NO: 40833 - protein, 460 aa, Fusobacterium nucleatum subsp. vincentii ATCC 49256; identical to SEQ ID NO: 14918

SEQ ID NO: 40834 - DNA, 1182 bp, Haemophilus influenzae 86-028NP; identical to SEQ ID NO: 14919
  CDS (1)..(1182)

SEQ ID NO: 40835 - protein, 393 aa, Haemophilus influenzae 86-028NP; identical to SEQ ID NO: 14920

SEQ ID NO: 40836 - DNA, 1347 bp, Solibacter usitatus Ellin6076; identical to SEQ ID NO: 14921
  CDS (1)..(1347): transl_table=11

SEQ ID NO: 40837 - protein, 448 aa, Solibacter usitatus Ellin6076; identical to SEQ ID NO: 14922

SEQ ID NO: 40838 - DNA, 1374 bp, Desulfitobacterium hafniense DCB-2; identical to SEQ ID NO: 14923
  CDS (1)..(1374): transl_table=11

SEQ ID NO: 40839 - protein, 457 aa, Desulfitobacterium hafniense DCB-2; identical to SEQ ID NO: 14924

SEQ ID NO: 40840 - DNA, 1389 bp, Desulfitobacterium hafniense DCB-2; identical to SEQ ID NO: 14925
  CDS (1)..(1389): transl_table=11

SEQ ID NO: 40841 - protein, 462 aa, Desulfitobacterium hafniense DCB-2; identical to SEQ ID NO: 14926

SEQ ID NO: 40842 - DNA, 1443 bp, uncultured bacterium; identical to SEQ ID NO: 14927
  CDS (1)..(1443)

SEQ ID NO: 40843 - protein, 480 aa, uncultured bacterium; identical to SEQ ID NO: 14928

SEQ ID NO: 40844 - DNA, 1365 bp, Symbiobacterium thermophilum; identical to SEQ ID NO: 14929
  CDS (1)..(1365)

SEQ ID NO: 40845 - protein, 454 aa, Symbiobacterium thermophilum; identical to SEQ ID NO: 14930

SEQ ID NO: 40846 - DNA, 1365 bp, Symbiobacterium thermophilum; identical to SEQ ID NO: 14897
  CDS (1)..(1365)

SEQ ID NO: 40847 - protein, 454 aa, Symbiobacterium thermophilum; identical to SEQ ID NO: 14898

SEQ ID NO: 40848 - DNA, 1386 bp, Chromobacterium violaceum; identical to SEQ ID NO: 14933
  CDS (1)..(1386): transl_table=11

SEQ ID NO: 40849 - protein, 461 aa, Chromobacterium violaceum; identical to SEQ ID NO: 14934

SEQ ID NO: 40850 - DNA, 1419 bp, Clostridium tetani; identical to SEQ ID NO: 14935
  CDS (1)..(1419): transl_table=11

SEQ ID NO: 40851 - protein, 472 aa, Clostridium tetani; identical to SEQ ID NO: 14936

SEQ ID NO: 40852 - DNA, 1389 bp, Enterobacter aerogenes; identical to SEQ ID NO: 14937
  CDS (1)..(1389): transl_table=11

SEQ ID NO: 40853 - protein, 462 aa, Enterobacter aerogenes; identical to SEQ ID NO: 14938

SEQ ID NO: 40854 - DNA, 1419 bp, Haemophilus influenzae; identical to SEQ ID NO: 14939
  CDS (1)..(1419): transl_table=11

SEQ ID NO: 40855 - protein, 472 aa, Haemophilus influenzae; identical to SEQ ID NO: 14940

SEQ ID NO: 40856 - DNA, 1347 bp, Halobacterium salinarium; identical to SEQ ID NO: 14941
  CDS (1)..(1347)

SEQ ID NO: 40857 - protein, 448 aa, Halobacterium salinarium; identical to SEQ ID NO: 14942

SEQ ID NO: 40858 - DNA, 1416 bp, Pasteurella multocida; identical to SEQ ID NO: 14943
  CDS (1)..(1416): transl_table=11

SEQ ID NO: 40859 - protein, 471 aa, Pasteurella multocida; identical to SEQ ID NO: 14944

SEQ ID NO: 40860 - DNA, 1401 bp, Photorhabdus luminescens; identical to SEQ ID NO: 14945
  CDS (1)..(1401): transl_table=11

SEQ ID NO: 40861 - protein, 466 aa, Photorhabdus luminescens; identical to SEQ ID NO: 14946

SEQ ID NO: 40862 - DNA, 1398 bp, Proteus inconstans; identical to SEQ ID NO: 14947
  CDS (1)..(1398): transl_table=11

SEQ ID NO: 40863 - protein, 465 aa, Proteus inconstans; identical to SEQ ID NO: 14948

SEQ ID NO: 40864 - DNA, 1404 bp, Proteus vulgaris; identical to SEQ ID NO: 14949
  CDS (1)..(1404): transl_table=11

SEQ ID NO: 40865 - protein, 467 aa, Proteus vulgaris; identical to SEQ ID NO: 14950

SEQ ID NO: 40866 - DNA, 1365 bp, Rhodobacter capsulatus; identical to SEQ ID NO: 14951
  CDS (1)..(1365): transl_table=11

SEQ ID NO: 40867 - protein, 454 aa, Rhodobacter capsulatus; identical to SEQ ID NO: 14952

SEQ ID NO: 40868 - DNA, 1389 bp, Thermoanaerobacter tengcongensis; identical to SEQ ID NO: 14953
  CDS (1)..(1389): transl_table=11

SEQ ID NO: 40869 - protein, 462 aa, Thermoanaerobacter tengcongensis; identical to SEQ ID NO: 14954

SEQ ID NO: 40870 - DNA, 1419 bp, Vibrio cholerae; identical to SEQ ID NO: 14955
  CDS (1)..(1419): transl_table=11

SEQ ID NO: 40871 - protein, 472 aa, Vibrio cholerae; identical to SEQ ID NO: 14956

SEQ ID NO: 40872 - DNA, 1401 bp, Vibrio parahaemolyticus; identical to SEQ ID NO: 14957
  CDS (1)..(1401): transl_table=11

SEQ ID NO: 40873 - protein, 466 aa, Vibrio parahaemolyticus; identical to SEQ ID NO: 14958

SEQ ID NO: 40874 - DNA, 1422 bp, Vibrio vulnificus; identical to SEQ ID NO: 14959
  CDS (1)..(1422): transl_table=11

SEQ ID NO: 40875 - protein, 473 aa, Vibrio vulnificus; identical to SEQ ID NO: 14960

SEQ ID NO: 40876 - DNA, 1371 bp, Citrobacter freundii; identical to SEQ ID NO: 14961
  CDS (1)..(1371): transl_table=11

SEQ ID NO: 40877 - protein, 456 aa, Citrobacter freundii; identical to SEQ ID NO: 14962

SEQ ID NO: 40878 - DNA, 1383 bp, Clostridium tetani; identical to SEQ ID NO: 14963
  CDS (1)..(1383)

SEQ ID NO: 40879 - protein, 460 aa, Clostridium tetani; identical to SEQ ID NO: 14964

SEQ ID NO: 40880 - DNA, 1371 bp, Enterobacter agglomerans; identical to SEQ ID NO: 14965
  CDS (1)..(1371): transl_table=11

SEQ ID NO: 40881 - protein, 456 aa, Enterobacter agglomerans; identical to SEQ ID NO: 14966

SEQ ID NO: 40882 - DNA, 1383 bp, Fusobacterium nucleatum; identical to SEQ ID NO: 14967
  CDS (1)..(1383): transl_table=11

SEQ ID NO: 40883 - protein, 460 aa, Fusobacterium nucleatum; identical to SEQ ID NO: 14968

SEQ ID NO: 40884 - DNA, 1377 bp, Pasteurella multocida; identical to SEQ ID NO: 14969
  CDS (1)..(1377): transl_table=11

SEQ ID NO: 40885 - protein, 458 aa, Pasteurella multocida; identical to SEQ ID NO: 14970

SEQ ID NO: 40886 - DNA, 1377 bp, Symbiobacterium sp; identical to SEQ ID NO: 14971
  CDS (1)..(1377): transl_table=11

SEQ ID NO: 40887 - protein, 458 aa, Symbiobacterium sp; identical to SEQ ID NO: 14972

SEQ ID NO: 40888 - DNA, 27 bp, Artificial sequence
  Primer sequence
atgaaggattatgtaatggaaaacttt

SEQ ID NO: 40889 - DNA, 26 bp, Artificial sequence
  Primer sequence
ttaaacttctttaagttttgcggtga

SEQ ID NO: 40890 - protein, 533 aa, Artificial sequence; identical to SEQ ID NO: 14975
  Consensus
  Variant (2)..(2): Xaa in position 2 is any amino acid
  Variant (7)..(7): Xaa in position 7 is any amino acid
  Variant (10)..(10): Xaa in position 10 is any amino acid
  Variant (12)..(18): Xaa in position 12 to 18 is any amino acid
  Variant (20)..(22): Xaa in position 20 to 22 is any amino acid
  Variant (24)..(25): Xaa in position 24 to 25 is any amino acid
  Variant (27)..(28): Xaa in position 27 to 28 is any amino acid
  Variant (30)..(30): Xaa in position 30 is any amino acid
  Variant (32)..(32): Xaa in position 32 is any amino acid
  Variant (34)..(34): Xaa in position 34 is any amino acid
  Variant (36)..(37): Xaa in position 36 to 37 is any amino acid
  Variant (49)..(49): Xaa in position 49 is any amino acid
  Variant (53)..(54): Xaa in position 53 to 54 is any amino acid
  Variant (56)..(56): Xaa in position 56 is any or no amino acid
  Variant (61)..(61): Xaa in position 61 is any amino acid
  Variant (70)..(71): Xaa in position 70 to 71 is any amino acid
  Variant (73)..(74): Xaa in position 73 to 74 is any amino acid
  Variant (76)..(78): Xaa in position 76 to 78 is any amino acid
  Variant (80)..(80): Xaa in position 80 is any amino acid
  Variant (83)..(83): Xaa in position 83 is any amino acid
  Variant (86)..(88): Xaa in position 86 to 88 is any amino acid
  Variant (89)..(134): Xaa in position 89 to 134 is any or no amino acid
  Variant (137)..(137): Xaa in position 137 is any amino acid
  Variant (145)..(145): Xaa in position 145 is any amino acid
  Variant (147)..(150): Xaa in position 147 to 150 is any amino acid
  Variant (153)..(160): Xaa in position 153 to 160 is any amino acid
  Variant (161)..(170): Xaa in position 161 to 170 is any or no amino acid
  Variant (172)..(173): Xaa in position 172 to 173 is any amino acid
  Variant (175)..(175): Xaa in position 175 is any amino acid
  Variant (178)..(179): Xaa in position 178 to 179 is any amino acid
  Variant (181)..(184): Xaa in position 181 to 184 is any amino acid
  Variant (187)..(190): Xaa in position 187 to 190 is any amino acid
  Variant (192)..(195): Xaa in position 192 to 195 is any amino acid
  Variant (197)..(202): Xaa in position 197 to 202 is any amino acid
  Variant (203)..(210): Xaa in position 203 to 210 is any or no amino acid
  Variant (214)..(215): Xaa in position 214 to 215 is any amino acid
  Variant (218)..(218): Xaa in position 218 is any amino acid
  Variant (221)..(223): Xaa in position 221 to 223 is any amino acid
  Variant (225)..(227): Xaa in position 225 to 227 is any amino acid
  Variant (229)..(230): Xaa in position 229 to 230 is any amino acid
  Variant (231)..(231): Xaa in position 231 is any or no amino acid
  Variant (233)..(234): Xaa in position 233 to 234 is any amino acid
  Variant (236)..(238): Xaa in position 236 to 238 is any amino acid
  Variant (241)..(241): Xaa in position 241 is any amino acid
  Variant (243)..(244): Xaa in position 243 to 244 is any amino acid
  Variant (252)..(252): Xaa in position 252 is any amino acid
  Variant (256)..(259): Xaa in position 256 to 259 is any amino acid
  Variant (261)..(263): Xaa in position 261 to 263 is any amino acid
  Variant (265)..(265): Xaa in position 265 is any amino acid
  Variant (267)..(267): Xaa in position 267 is any amino acid
  Variant (269)..(270): Xaa in position 269 to 270 is any amino acid
  Variant (273)..(273): Xaa in position 273 is any amino acid
  Variant (275)..(276): Xaa in position 275 to 276 is any amino acid
  Variant (283)..(285): Xaa in position 283 to 285 is any amino acid
  Variant (287)..(288): Xaa in position 287 to 288 is any amino acid
  Variant (290)..(292): Xaa in position 290 to 292 is any amino acid
  Variant (295)..(296): Xaa in position 295 to 296 is any amino acid
  Variant (298)..(299): Xaa in position 298 to 299 is any amino acid
  Variant (301)..(301): Xaa in position 301 is any amino acid
  Variant (303)..(303): Xaa in position 303 is any amino acid
  Variant (307)..(309): Xaa in position 307 to 309 is any amino acid
  Variant (316)..(316): Xaa in position 316 is any amino acid
  Variant (323)..(323): Xaa in position 323 is any amino acid
  Variant (325)..(327): Xaa in position 325 to 327 is any amino acid
  Variant (329)..(330): Xaa in position 329 to 330 is any amino acid
  Variant (331)..(348): Xaa in position 331 to 348 is any or no amino acid
  Variant (351)..(357): Xaa in position 351 to 357 is any amino acid
  Variant (359)..(360): Xaa in position 359 to 360 is any amino acid
  Variant (363)..(364): Xaa in position 363 to 364 is any amino acid
  Variant (370)..(370): Xaa in position 370 is any amino acid
  Variant (375)..(375): Xaa in position 375 is any amino acid
  Variant (379)..(379): Xaa in position 379 is any amino acid
  Variant (382)..(382): Xaa in position 382 is any amino acid
  Variant (384)..(388): Xaa in position 384 to 388 is any amino acid
  Variant (391)..(392): Xaa in position 391 to 392 is any amino acid
  Variant (395)..(395): Xaa in position 395 is any amino acid
  Variant (398)..(398): Xaa in position 398 is any amino acid
  Variant (401)..(403): Xaa in position 401 to 403 is any amino acid
  Variant (405)..(407): Xaa in position 405 to 407 is any amino acid
  Variant (410)..(413): Xaa in position 410 to 413 is any amino acid
  Variant (414)..(414): Xaa in position 414 is any or no amino acid
  Variant (416)..(416): Xaa in position 416 is any or no amino acid
  Variant (421)..(421): Xaa in position 421 is any amino acid
  Variant (426)..(429): Xaa in position 426 to 429 is any amino acid
  Variant (431)..(433): Xaa in position 431 to 433 is any or no amino acid
  Variant (436)..(439): Xaa in position 436 to 439 is any amino acid
  Variant (443)..(444): Xaa in position 443 to 444 is any amino acid
  Variant (446)..(448): Xaa in position 446 to 448 is any amino acid
  Variant (451)..(453): Xaa in position 451 to 453 is any amino acid
  Variant (457)..(458): Xaa in position 457 to 458 is any amino acid
  Variant (460)..(460): Xaa in position 460 is any amino acid
  Variant (462)..(467): Xaa in position 462 to 467 is any amino acid
  Variant (468)..(470): Xaa in position 468 to 470 is any or no amino acid
  Variant (472)..(479): Xaa in position 472 to 479 is any or no amino acid
  Variant (481)..(482): Xaa in position 481 to 482 is any amino acid
  Variant (485)..(485): Xaa in position 485 is any amino acid
  Variant (489)..(490): Xaa in position 489 to 490 is any amino acid
  Variant (493)..(494): Xaa in position 493 to 494 is any amino acid
  Variant (498)..(498): Xaa in position 498 is any amino acid
  Variant (500)..(505): Xaa in position 500 to 505 is any amino acid
  Variant (507)..(512): Xaa in position 507 to 512 is any amino acid
  Variant (514)..(514): Xaa in position 514 is any amino acid
  Variant (515)..(515): Xaa in position 515 is any or no amino acid
  Variant (518)..(521): Xaa in position 518 to 521 is any amino acid
  Variant (524)..(525): Xaa in position 524 to 525 is any amino acid
  Variant (526)..(527): Xaa in position 526 to 527 is any or no amino acid
  Variant (530)..(530): Xaa in position 530 is any amino acid
  Variant (532)..(532): Xaa in position 532 is any amino acid

SEQ ID NO: 40891 - protein, 85 aa, Artificial sequence; identical to SEQ ID NO: 14976
  Consensus
  Variant (2)..(2): Xaa in position 2 is Pro or Ser
  Variant (3)..(4): Xaa in position 3 to 4 is any amino acid
  Variant (5)..(5): Xaa in position 5 is Ile, Leu or Met
  Variant (6)..(8): Xaa in position 6 to 8 is any amino acid
  Variant (10)..(10): Xaa in position 10 is any amino acid
  Variant (11)..(18): Xaa in position 11 to 18 is any or no amino acid
  Variant (20)..(25): Xaa in position 20 to 25 is any amino acid
  Variant (26)..(26): Xaa in position 26 is Ala, Ser or Val
  Variant (27)..(28): Xaa in position 27 to 28 is any amino acid
  Variant (30)..(30): Xaa in position 30 is any amino acid
  Variant (32)..(32): Xaa in position 32 is any amino acid
  Variant (33)..(33): Xaa in position 33 is Ile or Leu
  Variant (34)..(34): Xaa in position 34 is any amino acid
  Variant (35)..(35): Xaa in position 35 is Ala, Gly or Ser
  Variant (36)..(39): Xaa in position 36 to 39 is any amino acid
  Variant (49)..(49): Xaa in position 49 is Ala, Gly, Asn, Ser or Thr
  Variant (51)..(51): Xaa in position 51 is Ile, Met or Val
  Variant (52)..(52): Xaa in position 52 is Ser or Thr
  Variant (53)..(53): Xaa in position 53 is Asp, Asn, Gln or Ser
  Variant (54)..(56): Xaa in position 54 to 56 is any amino acid
  Variant (57)..(57): Xaa in position 57 is Ala, Gly or Ser
  Variant (58)..(58): Xaa in position 58 is Ala or Gly
  Variant (59)..(59): Xaa in position 59 is Ile, Leu, Met or Val
  Variant (60)..(60): Xaa in position 60 is Phe, Ile, Leu or Met
  Variant (61)..(61): Xaa in position 61 is any amino acid
  Variant (65)..(65): Xaa in position 65 is Ala or Ser
  Variant (67)..(67): Xaa in position 67 is Ala or Ser
  Variant (69)..(69): Xaa in position 69 is Ala, Gly or Ser
  Variant (70)..(70): Xaa in position 70 is any amino acid
  Variant (71)..(71): Xaa in position 71 is Asn or Ser
  Variant (72)..(72): Xaa in position 72 is Phe, Trp or Tyr
  Variant (73)..(74): Xaa in position 73 to 74 is any amino acid
  Variant (75)..(75): Xaa in position 75 is Phe, Leu or Met
  Variant (76)..(78): Xaa in position 76 to 78 is any amino acid
  Variant (79)..(79): Xaa in position 79 is Ala, Gly, Ile or Val
  Variant (80)..(83): Xaa in position 80 to 83 is any amino acid
  Variant (84)..(84): Xaa in position 84 is Asp, Gly, Asn or Pro
  Variant (85)..(85): Xaa in position 85 is Phe or Tyr

SEQ ID NO: 40892 - protein, 41 aa, Artificial sequence; identical to SEQ ID NO: 14977
  Consensus
  Variant (2)..(2): Xaa in position 2 is Ala or Thr
  Variant (7)..(7): Xaa in position 7 is Ala or Gly
  Variant (10)..(10): Xaa in position 10 is any amino acid
  Variant (11)..(15): Xaa in position 11 to 15 is any or no amino acid
  Variant (17)..(40): Xaa in position 17 to 40 is any amino acid
  Variant (41)..(41): Xaa in position 41 is Ala, Glu, Gly, Gln or Thr

SEQ ID NO: 40893 - protein, 100 aa, Artificial sequence; identical to SEQ ID NO: 14978
  Consensus
  Variant (2)..(13): Xaa in position 2 to 13 is any amino acid
  Variant (14)..(17): Xaa in position 14 to 17 is any or no amino acid
  Variant (19)..(19): Xaa in position 19 is Cys, Asn, Ser or Val
  Variant (21)..(22): Xaa in position 21 to 22 is any amino acid
  Variant (27)..(27): Xaa in position 27 is Ile or Val
  Variant (29)..(29): Xaa in position 29 is Ile, Leu or Met
  Variant (30)..(30): Xaa in position 30 is any amino acid
  Variant (32)..(32): Xaa in position 32 is Ile, Leu or Met
  Variant (33)..(33): Xaa in position 33 is any amino acid
  Variant (34)..(34): Xaa in position 34 is Ala, Asp, Glu, Gly or Ser
  Variant (35)..(37): Xaa in position 35 to 37 is any amino acid
  Variant (38)..(38): Xaa in position 38 is Ile, Leu, Met or Val
  Variant (39)..(39): Xaa in position 39 is Ala, Cys or Thr
  Variant (40)..(43): Xaa in position 40 to 43 is any amino acid
  Variant (44)..(44): Xaa in position 44 is Ile or Val
  Variant (45)..(45): Xaa in position 45 is any amino acid
  Variant (46)..(46): Xaa in position 46 is Phe, Ile, Leu, Met or Val
  Variant (47)..(48): Xaa in position 47 to 48 is any amino acid
  Variant (50)..(50): Xaa in position 50 is Ala, Ser or Val
  Variant (51)..(51): Xaa in position 51 is Ala, Cys or Thr
  Variant (53)..(53): Xaa in position 53 is any amino acid
  Variant (54)..(54): Xaa in position 54 is Ala, Cys, Ser or Val
  Variant (57)..(57): Xaa in position 57 is Ala or Cys
  Variant (58)..(58): Xaa in position 58 is His, Trp or Tyr
  Variant (60)..(60): Xaa in position 60 is Ile or Val
  Variant (61)..(62): Xaa in position 61 to 62 is any amino acid
  Variant (63)..(63): Xaa in position 63 is Asp, Gln or Arg
  Variant (64)..(64): Xaa in position 64 is Asp or Glu
  Variant (65)..(68): Xaa in position 65 to 68 is any amino acid
  Variant (69)..(69): Xaa in position 69 is Asp, Glu, Gly, Asn or Ser
  Variant (70)..(71): Xaa in position 70 to 71 is any amino acid
  Variant (72)..(72): Xaa in position 72 is Ile, Leu, Pro or Val
  Variant (73)..(73): Xaa in position 73 is any amino acid
  Variant (74)..(74): Xaa in position 74 is Asp, Glu, Gln, Ser or Thr
  Variant (75)..(75): Xaa in position 75 is Ile or Val
  Variant (76)..(77): Xaa in position 76 to 77 is any amino acid
  Variant (78)..(78): Xaa in position 78 is Asp, Glu or Lys
  Variant (79)..(83): Xaa in position 79 to 83 is any amino acid
  Variant (84)..(84): Xaa in position 84 is Asp or Glu
  Variant (85)..(88): Xaa in position 85 to 88 is any amino acid
  Variant (90)..(90): Xaa in position 90 is Ala, Gly or Ser
  Variant (94)..(94): Xaa in position 94 is Ala, Cys, Gly, Pro or Thr
  Variant (95)..(95): Xaa in position 95 is Phe, Ile, Leu or Met
  Variant (96)..(96): Xaa in position 96 is Ala, Leu or Val
  Variant (97)..(97): Xaa in position 97 is Asn, Pro or Gln
  Variant (98)..(98): Xaa in position 98 is Ile or Met

SEQ ID NO: 40894 - protein, 84 aa, Artificial sequence; identical to SEQ ID NO: 14979
  Consensus
  Variant (2)..(4): Xaa in position 2 to 4 is any amino acid
  Variant (8)..(8): Xaa in position 8 is Leu or Met
  Variant (9)..(9): Xaa in position 9 is Ala, Glu, Asn, Ser or Thr
  Variant (11)..(11): Xaa in position 11 is any amino acid
  Variant (12)..(12): Xaa in position 12 is Ala or Asp
  Variant (13)..(13): Xaa in position 13 is Ile, Leu or Met
  Variant (14)..(16): Xaa in position 14 to 16 is any amino acid
  Variant (18)..(18): Xaa in position 18 is any amino acid
  Variant (20)..(20): Xaa in position 20 is Phe, Ile or Leu
  Variant (21)..(31): Xaa in position 21 to 31 is any amino acid
  Variant (33)..(33): Xaa in position 33 is Ile or Val
  Variant (34)..(34): Xaa in position 34 is any amino acid
  Variant (36)..(39): Xaa in position 36 to 39 is any amino acid
  Variant (40)..(40): Xaa in position 40 is Ala, Gly, Asn or Val
  Variant (41)..(42): Xaa in position 41 to 42 is any amino acid
  Variant (44)..(46): Xaa in position 44 to 46 is any amino acid
  Variant (47)..(47): Xaa in position 47 is Asp, Glu, Gly or Asn
  Variant (48)..(48): Xaa in position 48 is Ile or Val
  Variant (49)..(49): Xaa in position 49 is Ala, Ile, Leu, Pro or Val
  Variant (50)..(52): Xaa in position 50 to 52 is any amino acid
  Variant (53)..(53): Xaa in position 53 is Ala or Pro
  Variant (54)..(54): Xaa in position 54 is any amino acid
  Variant (56)..(56): Xaa in position 56 is any or no amino acid
  Variant (58)..(58): Xaa in position 58 is Ala, Gly or Thr
  Variant (59)..(60): Xaa in position 59 to 60 is any amino acid
  Variant (61)..(61): Xaa in position 61 is Ile, Leu or Val
  Variant (62)..(62): Xaa in position 62 is Asp or Glu
  Variant (63)..(63): Xaa in position 63 is Ala, Gly or Thr
  Variant (64)..(67): Xaa in position 64 to 67 is any amino acid
  Variant (68)..(68): Xaa in position 68 is Glu, Asn, Pro or Thr
  Variant (69)..(75): Xaa in position 69 to 75 is any amino acid
  Variant (76)..(76): Xaa in position 76 is Gly, Ile or Pro
  Variant (77)..(77): Xaa in position 77 is Ala, Asp, Gly or Ser
  Variant (78)..(80): Xaa in position 78 to 80 is any amino acid
  Variant (81)..(81): Xaa in position 81 is Ala, Cys, Gly, Asn, Ser, Thr or Val
  Variant (82)..(83): Xaa in position 82 to 83 is any amino acid
  Variant (84)..(84): Xaa in position 84 is Ile, Leu or Val

SEQ ID NO: 40895 - DNA, 1041 bp, Escherichia coli; identical to SEQ ID NO: 14980
  CDS (1)..(1041)

SEQ ID NO: 40896 - protein, 346 aa, Escherichia coli; identical to SEQ ID NO: 14981

SEQ ID NO: 40897 - DNA, 1152 bp, Pyrococcus abyssi GE5; identical to SEQ ID NO: 14982
  CDS (1)..(1152): transl_table=11

SEQ ID NO: 40898 - protein, 383 aa, Pyrococcus abyssi GE5; identical to SEQ ID NO: 14983

SEQ ID NO: 40899 - DNA, 1122 bp, Aeropyrum pernix K1; identical to SEQ ID NO: 14984
  CDS (1)..(1122): transl_table=11

SEQ ID NO: 40900 - protein, 373 aa, Aeropyrum pernix K1; identical to SEQ ID NO: 14985

SEQ ID NO: 40901 - DNA, 1014 bp, Aquifex aeolicus VF5; identical to SEQ ID NO: 14986
  CDS (1)..(1014): transl_table=11

SEQ ID NO: 40902 - protein, 337 aa, Aquifex aeolicus VF5; identical to SEQ ID NO: 14987

SEQ ID NO: 40903 - DNA, 825 bp, Thermotoga maritima MSB8; identical to SEQ ID NO: 14988
  CDS (1)..(825): transl_table=11

SEQ ID NO: 40904 - protein, 274 aa, Thermotoga maritima MSB8; identical to SEQ ID NO: 14989

SEQ ID NO: 40905 - DNA, 900 bp, Vibrio cholerae O1 biovar eltor str. N16961; identical to SEQ ID NO: 14990
  CDS (1)..(900): transl_table=11

SEQ ID NO: 40906 - protein, 299 aa, Vibrio cholerae O1 biovar eltor str. N16961; identical to SEQ ID NO: 14991

SEQ ID NO: 40907 - DNA, 837 bp, Vibrio cholerae O1 biovar eltor str. N16961; identical to SEQ ID NO: 14992
  CDS (1)..(837): transl_table=11

SEQ ID NO: 40908 - protein, 278 aa, Vibrio cholerae O1 biovar eltor str. N16961; identical to SEQ ID NO: 14993

SEQ ID NO: 40909 - DNA, 1212 bp, Pasteurella multocida subsp. multocida str. Pm70; identical to SEQ ID NO: 14994
  CDS (1)..(1212): transl_table=11

SEQ ID NO: 40910 - protein, 403 aa, Pasteurella multocida subsp. multocida str. Pm70; identical to SEQ ID NO: 14995

SEQ ID NO: 40911 - DNA, 897 bp, Lactococcus lactis subsp. lactis Il1403; identical to SEQ ID NO: 14996
  CDS (1)..(897): transl_table=11

SEQ ID NO: 40912 - protein, 298 aa, Lactococcus lactis subsp. lactis Il1403; identical to SEQ ID NO: 14997

SEQ ID NO: 40913 - DNA, 816 bp, Methanothermobacter thermautotrophicus str. Delta H; identical to SEQ ID NO: 14998
  CDS (1)..(816)

SEQ ID NO: 40914 - protein, 271 aa, Methanothermobacter thermautotrophicus str. Delta H; identical to SEQ ID NO: 14999

SEQ ID NO: 40915 - DNA, 837 bp, Methanothermobacter thermautotrophicus str. Delta H; identical to SEQ ID NO: 15000
  CDS (1)..(837)

SEQ ID NO: 40916 - protein, 278 aa, Methanothermobacter thermautotrophicus str. Delta H; identical to SEQ ID NO: 15001

SEQ ID NO: 40917 - DNA, 1212 bp, Deinococcus radiodurans R1; identical to SEQ ID NO: 15002
  CDS (1)..(1212): transl_table=11

SEQ ID NO: 40918 - protein, 403 aa, Deinococcus radiodurans R1; identical to SEQ ID NO: 15003

SEQ ID NO: 40919 - DNA, 1290 bp, Mycobacterium leprae TN; identical to SEQ ID NO: 15004
  CDS (1)..(1290): transl_table=11

SEQ ID NO: 40920 - protein, 429 aa, Mycobacterium leprae TN; identical to SEQ ID NO: 15005

SEQ ID NO: 40921 - DNA, 1170 bp, Mycobacterium tuberculosis CDC1551; identical to SEQ ID NO: 15006
  CDS (1)..(1170): transl_table=11

SEQ ID NO: 40922 - protein, 389 aa, Mycobacterium tuberculosis CDC1551; identical to SEQ ID NO: 15007

SEQ ID NO: 40923 - DNA, 1218 bp, Sulfolobus solfataricus P2; identical to SEQ ID NO: 15008
  CDS (1)..(1218): transl_table=11

SEQ ID NO: 40924 - protein, 405 aa, Sulfolobus solfataricus P2; identical to SEQ ID NO: 15009

SEQ ID NO: 40925 - DNA, 897 bp, Clostridium acetobutylicum ATCC 824; identical to SEQ ID NO: 15010
  CDS (1)..(897): transl_table=11

SEQ ID NO: 40926 - protein, 298 aa, Clostridium acetobutylicum ATCC 824; identical to SEQ ID NO: 15011

SEQ ID NO: 40927 - DNA, 1002 bp, Synechocystis sp. PCC 6803; identical to SEQ ID NO: 15012
  CDS (1)..(1002): transl_table=11

SEQ ID NO: 40928 - protein, 333 aa, Synechocystis sp. PCC 6803; identical to SEQ ID NO: 15013

SEQ ID NO: 40929 - DNA, 1152 bp, Synechocystis sp. PCC 6803; identical to SEQ ID NO: 15014
  CDS (1)..(1152): transl_table=11

SEQ ID NO: 40930 - protein, 383 aa, Synechocystis sp. PCC 6803; identical to SEQ ID NO: 15015

SEQ ID NO: 40931 - DNA, 1041 bp, Salmonella typhimurium LT2; identical to SEQ ID NO: 15016
  CDS (1)..(1041): transl_table=11

SEQ ID NO: 40932 - protein, 346 aa, Salmonella typhimurium LT2; identical to SEQ ID NO: 15017

SEQ ID NO: 40933 - DNA, 909 bp, Listeria innocua Clip11262; identical to SEQ ID NO: 15018
  CDS (1)..(909): transl_table=11

SEQ ID NO: 40934 - protein, 302 aa, Listeria innocua Clip11262; identical to SEQ ID NO: 15019

SEQ ID NO: 40935 - DNA, 1179 bp, Nostoc sp. PCC 7120; identical to SEQ ID NO: 15020
  CDS (1)..(1179): transl_table=11

SEQ ID NO: 40936 - protein, 392 aa, Nostoc sp. PCC 7120; identical to SEQ ID NO: 15021

SEQ ID NO: 40937 - DNA, 1032 bp, Ralstonia solanacearum GMI1000; identical to SEQ ID NO: 15022
  CDS (1)..(1032): transl_table=11

SEQ ID NO: 40938 - protein, 343 aa, Ralstonia solanacearum GMI1000; identical to SEQ ID NO: 15023

SEQ ID NO: 40939 - DNA, 1062 bp, Ralstonia solanacearum GMI1000; identical to SEQ ID NO: 15024
  CDS (1)..(1062): transl_table=11

SEQ ID NO: 40940 - protein, 353 aa, Ralstonia solanacearum GMI1000; identical to SEQ ID NO: 15025

SEQ ID NO: 40941 - DNA, 1233 bp, Pyrobaculum aerophilum str. IM2; identical to SEQ ID NO: 15026
  CDS (1)..(1233): transl_table=11

SEQ ID NO: 40942 - protein, 410 aa, Pyrobaculum aerophilum str. IM2; identical to SEQ ID NO: 15027

SEQ ID NO: 40943 - DNA, 819 bp, Clostridium perfringens str. 13; identical to SEQ ID NO: 15028
  CDS (1)..(819): transl_table=11

SEQ ID NO: 40944 - protein, 272 aa, Clostridium perfringens str. 13; identical to SEQ ID NO: 15029

SEQ ID NO: 40945 - DNA, 1128 bp, Pyrococcus furiosus DSM 3638; identical to SEQ ID NO: 15030
  CDS (1)..(1128): transl_table=11

SEQ ID NO: 40946 - protein, 375 aa, Pyrococcus furiosus DSM 3638; identical to SEQ ID NO: 15031

SEQ ID NO: 40947 - DNA, 1128 bp, Corynebacterium glutamicum ATCC 13032; identical to SEQ ID NO: 15032
  CDS (1)..(1128): transl_table=11

SEQ ID NO: 40948 - protein, 375 aa, Corynebacterium glutamicum ATCC 13032; identical to SEQ ID NO: 15033

SEQ ID NO: 40949 - DNA, 990 bp, Methanopyrus kandleri AV19; identical to SEQ ID NO: 15034
  CDS (1)..(990): transl_table=11

SEQ ID NO: 40950 - protein, 329 aa, Methanopyrus kandleri AV19; identical to SEQ ID NO: 15035

SEQ ID NO: 40951 - DNA, 999 bp, Methanosarcina acetivorans C2A; identical to SEQ ID NO: 15036
  CDS (1)..(999): transl_table=11

SEQ ID NO: 40952 - protein, 332 aa, Methanosarcina acetivorans C2A; identical to SEQ ID NO: 15037

SEQ ID NO: 40953 - DNA, 1475 bp, Streptomyces coelicolor A3(2); identical to SEQ ID NO: 15038
  CDS (363)..(1475)

SEQ ID NO: 40954 - protein, 370 aa, Streptomyces coelicolor A3(2); identical to SEQ ID NO: 15039

SEQ ID NO: 40955 - DNA, 909 bp, Methanosarcina mazei Go1; identical to SEQ ID NO: 15040
  CDS (1)..(909): transl_table=11

SEQ ID NO: 40956 - protein, 302 aa, Methanosarcina mazei Go1; identical to SEQ ID NO: 15041

SEQ ID NO: 40957 - DNA, 1092 bp, Xanthomonas campestris pv. campestris str. ATCC 33913; identical to SEQ ID NO: 15042
  CDS (1)..(1092): transl_table=11

SEQ ID NO: 40958 - protein, 363 aa, Xanthomonas campestris pv. campestris str. ATCC 33913; identical to SEQ ID NO: 15043

SEQ ID NO: 40959 - DNA, 1092 bp, Xanthomonas axonopodis pv. citri str. 306; identical to SEQ ID NO: 15044
  CDS (1)..(1092): transl_table=11

SEQ ID NO: 40960 - protein, 363 aa, Xanthomonas axonopodis pv. citri str. 306; identical to SEQ ID NO: 15045

SEQ ID NO: 40961 - DNA, 1020 bp, Xanthomonas axonopodis pv. citri str. 306; identical to SEQ ID NO: 15046
  CDS (1)..(1020): transl_table=11

SEQ ID NO: 40962 - protein, 339 aa, Xanthomonas axonopodis pv. citri str. 306; identical to SEQ ID NO: 15047

SEQ ID NO: 40963 - DNA, 1041 bp, Yersinia pestis KIM; identical to SEQ ID NO: 15048
  CDS (1)..(1041): transl_table=11

SEQ ID NO: 40964 - protein, 346 aa, Yersinia pestis KIM; identical to SEQ ID NO: 15049

SEQ ID NO: 40965 - DNA, 1134 bp, Bifidobacterium longum NCC2705; identical to SEQ ID NO: 15050
  CDS (1)..(1134): transl_table=11

SEQ ID NO: 40966 - protein, 377 aa, Bifidobacterium longum NCC2705; identical to SEQ ID NO: 15051

SEQ ID NO: 40967 - DNA, 864 bp, Streptococcus mutans UA159; identical to SEQ ID NO: 15052
  CDS (1)..(864): transl_table=11

SEQ ID NO: 40968 - protein, 287 aa, Streptococcus mutans UA159; identical to SEQ ID NO: 15053

SEQ ID NO: 40969 - DNA, 1122 bp, Corynebacterium efficiens YS-314; identical to SEQ ID NO: 15054
  CDS (1)..(1122): transl_table=11

SEQ ID NO: 40970 - protein, 373 aa, Corynebacterium efficiens YS-314; identical to SEQ ID NO: 15055

SEQ ID NO: 40971 - DNA, 822 bp, Vibrio vulnificus CMCP6; identical to SEQ ID NO: 15056
  CDS (1)..(822): transl_table=11

SEQ ID NO: 40972 - protein, 273 aa, Vibrio vulnificus CMCP6; identical to SEQ ID NO: 15057

SEQ ID NO: 40973 - DNA, 1026 bp, Bradyrhizobium japonicum USDA 110; identical to SEQ ID NO: 15058
  CDS (1)..(1026)

SEQ ID NO: 40974 - protein, 341 aa, Bradyrhizobium japonicum USDA 110; identical to SEQ ID NO: 15059

SEQ ID NO: 40975 - DNA, 888 bp, Clostridium tetani E88; identical to SEQ ID NO: 15060
  CDS (1)..(888): transl_table=11

SEQ ID NO: 40976 - protein, 295 aa, Clostridium tetani E88; identical to SEQ ID NO: 15061

SEQ ID NO: 40977 - DNA, 876 bp, Lactobacillus plantarum WCFS1; identical to SEQ ID NO: 15062
  CDS (1)..(876): transl_table=11

SEQ ID NO: 40978 - protein, 291 aa, Lactobacillus plantarum WCFS1; identical to SEQ ID NO: 15063

SEQ ID NO: 40979 - DNA, 1071 bp, Tropheryma whipplei str. Twist; identical to SEQ ID NO: 15064
  CDS (1)..(1071): transl_table=11

SEQ ID NO: 40980 - protein, 356 aa, Tropheryma whipplei str. Twist; identical to SEQ ID NO: 15065

SEQ ID NO: 40981 - DNA, 1071 bp, Tropheryma whipplei TW08/27; identical to SEQ ID NO: 15066
  CDS (1)..(1071): transl_table=11

SEQ ID NO: 40982 - protein, 356 aa, Tropheryma whipplei TW08/27; identical to SEQ ID NO: 15067

SEQ ID NO: 40983 - DNA, 1026 bp, Pseudomonas syringae pv. tomato str. DC3000; identical to SEQ ID NO: 15068
  CDS (1)..(1026): transl_table=11

SEQ ID NO: 40984 - protein, 341 aa, Pseudomonas syringae pv. tomato str. DC3000; identical to SEQ ID NO: 15069

SEQ ID NO: 40985 - DNA, 828 bp, Vibrio parahaemolyticus RIMD 2210633; identical to SEQ ID NO: 15070
  CDS (1)..(828): transl_table=11

SEQ ID NO: 40986 - protein, 275 aa, Vibrio parahaemolyticus RIMD 2210633; identical to SEQ ID NO: 15071

SEQ ID NO: 40987 - DNA, 822 bp, Vibrio parahaemolyticus RIMD 2210633; identical to SEQ ID NO: 15072
  CDS (1)..(822): transl_table=11

SEQ ID NO: 40988 - protein, 273 aa, Vibrio parahaemolyticus RIMD 2210633; identical to SEQ ID NO: 15073

SEQ ID NO: 40989 - DNA, 1110 bp, Bacteroides thetaiotaomicron VPI-5482; identical to SEQ ID NO: 15074
  CDS (1)..(1110): transl_table=11

SEQ ID NO: 40990 - protein, 369 aa, Bacteroides thetaiotaomicron VPI-5482; identical to SEQ ID NO: 15075

SEQ ID NO: 40991 - DNA, 1107 bp, Streptomyces avermitilis MA-4680; identical to SEQ ID NO: 15076
  CDS (1)..(1107)

SEQ ID NO: 40992 - protein, 368 aa, Streptomyces avermitilis MA-4680; identical to SEQ ID NO: 15077

SEQ ID NO: 40993 - DNA, 1113 bp, Mycobacterium bovis AF2122/97; identical to SEQ ID NO: 15078
  CDS (1)..(1113): transl_table=11

SEQ ID NO: 40994 - protein, 370 aa, Mycobacterium bovis AF2122/97; identical to SEQ ID NO: 15079

SEQ ID NO: 40995 - DNA, 1125 bp, Mycobacterium bovis AF2122/97; identical to SEQ ID NO: 15080
  CDS (1)..(1125): transl_table=11

SEQ ID NO: 40996 - protein, 374 aa, Mycobacterium bovis AF2122/97; identical to SEQ ID NO: 15081

SEQ ID NO: 40997 - DNA, 993 bp, Prochlorococcus marinus subsp. marinus str. CCMP1375; identical to SEQ ID NO: 15082
  CDS (1)..(993): transl_table=11

SEQ ID NO: 40998 - protein, 330 aa, Prochlorococcus marinus subsp. marinus str. CCMP1375; identical to SEQ ID NO: 15083

SEQ ID NO: 40999 - DNA, 1041 bp, Bordetella pertussis Tohama I; identical to SEQ ID NO: 15084
  CDS (1)..(1041): transl_table=11

SEQ ID NO: 41000 - protein, 346 aa, Bordetella pertussis Tohama I; identical to SEQ ID NO: 15085

SEQ ID NO: 41001 - DNA, 1041 bp, Bordetella bronchiseptica RB50; identical to SEQ ID NO: 15086
  CDS (1)..(1041)

SEQ ID NO: 41002 - protein, 346 aa, Bordetella bronchiseptica RB50; identical to SEQ ID NO: 15087

SEQ ID NO: 41003 - DNA, 972 bp, Prochlorococcus marinus subsp. pastoris str. CCMP1986; identical to SEQ ID NO: 15088
  CDS (1)..(972): transl_table=11

SEQ ID NO: 41004 - protein, 323 aa, Prochlorococcus marinus subsp. pastoris str. CCMP1986; identical to SEQ ID NO: 15089

SEQ ID NO: 41005 - DNA, 1011 bp, Synechococcus sp. WH 8102; identical to SEQ ID NO: 15090
  CDS (1)..(1011): transl_table=11

SEQ ID NO: 41006 - protein, 336 aa, Synechococcus sp. WH 8102; identical to SEQ ID NO: 15091

SEQ ID NO: 41007 - DNA, 1038 bp, Chromobacterium violaceum ATCC 12472; identical to SEQ ID NO: 15092
  CDS (1)..(1038): transl_table=11

SEQ ID NO: 41008 - protein, 345 aa, Chromobacterium violaceum ATCC 12472; identical to SEQ ID NO: 15093

SEQ ID NO: 41009 - DNA, 840 bp, Wolinella succinogenes DSM 1740; identical to SEQ ID NO: 15094
  CDS (1)..(840): transl_table=11

SEQ ID NO: 41010 - protein, 279 aa, Wolinella succinogenes DSM 1740; identical to SEQ ID NO: 15095

SEQ ID NO: 41011 - DNA, 927 bp, Wolinella succinogenes DSM 1740; identical to SEQ ID NO: 15096
  CDS (1)..(927): transl_table=11

SEQ ID NO: 41012 - protein, 308 aa, Wolinella succinogenes DSM 1740; identical to SEQ ID NO: 15097

SEQ ID NO: 41013 - DNA, 1014 bp, Gloeobacter violaceus PCC 7421; identical to SEQ ID NO: 15098
  CDS (1)..(1014): transl_table=11

SEQ ID NO: 41014 - protein, 337 aa, Gloeobacter violaceus PCC 7421; identical to SEQ ID NO: 15099

SEQ ID NO: 41015 - DNA, 1017 bp, Gloeobacter violaceus PCC 7421; identical to SEQ ID NO: 15100
  CDS (1)..(1017): transl_table=11

SEQ ID NO: 41016 - protein, 338 aa, Gloeobacter violaceus PCC 7421; identical to SEQ ID NO: 15101

SEQ ID NO: 41017 - DNA, 1044 bp, Gloeobacter violaceus PCC 7421; identical to SEQ ID NO: 15102
  CDS (1)..(1044): transl_table=11

SEQ ID NO: 41018 - protein, 347 aa, Gloeobacter violaceus PCC 7421; identical to SEQ ID NO: 15103

SEQ ID NO: 41019 - DNA, 1050 bp, Gloeobacter violaceus PCC 7421; identical to SEQ ID NO: 15104
  CDS (1)..(1050): transl_table=11

SEQ ID NO: 41020 - protein, 349 aa, Gloeobacter violaceus PCC 7421; identical to SEQ ID NO: 15105

SEQ ID NO: 41021 - DNA, 1041 bp, Photorhabdus luminescens subsp. laumondii TTO1; identical to SEQ ID NO: 15106
  CDS (1)..(1041): transl_table=11

SEQ ID NO: 41022 - protein, 346 aa, Photorhabdus luminescens subsp. laumondii TTO1; identical to SEQ ID NO: 15107

SEQ ID NO: 41023 - DNA, 825 bp, Vibrio vulnificus YJ016; identical to SEQ ID NO: 15108
  CDS (1)..(825): transl_table=11

SEQ ID NO: 41024 - protein, 274 aa, Vibrio vulnificus YJ016; identical to SEQ ID NO: 15109

SEQ ID NO: 41025 - DNA, 1086 bp, Corynebacterium diphtheriae NCTC 13129; identical to SEQ ID NO: 15110
  CDS (1)..(1086): transl_table=11

SEQ ID NO: 41026 - protein, 361 aa, Corynebacterium diphtheriae NCTC 13129; identical to SEQ ID NO: 15111

SEQ ID NO: 41027 - DNA, 1005 bp, Rhodopseudomonas palustris CGA009; identical to SEQ ID NO: 15112
  CDS (1)..(1005): transl_table=11

SEQ ID NO: 41028 - protein, 334 aa, Rhodopseudomonas palustris CGA009; identical to SEQ ID NO: 15113

SEQ ID NO: 41029 - DNA, 1011 bp, Rhodopseudomonas palustris CGA009; identical to SEQ ID NO: 15114
  CDS (1)..(1011): transl_table=11

SEQ ID NO: 41030 - protein, 336 aa, Rhodopseudomonas palustris CGA009; identical to SEQ ID NO: 15115

SEQ ID NO: 41031 - DNA, 1029 bp, Geobacter sulfurreducens PCA; identical to SEQ ID NO: 15116
  CDS (1)..(1029): transl_table=11

SEQ ID NO: 41032 - protein, 342 aa, Geobacter sulfurreducens PCA; identical to SEQ ID NO: 15117

SEQ ID NO: 41033 - DNA, 1137 bp, Mycobacterium avium subsp. paratuberculosis str. k10; identical to SEQ ID NO: 15118
  CDS (1)..(1137): transl_table=11

SEQ ID NO: 41034 - protein, 378 aa, Mycobacterium avium subsp. paratuberculosis str. k10; identical to SEQ ID NO: 15119

SEQ ID NO: 41035 - DNA, 879 bp, Desulfovibrio vulgaris subsp. vulgaris str. Hildenborough; identical to SEQ ID NO: 15120
  CDS (1)..(879): transl_table=11

SEQ ID NO: 41036 - protein, 292 aa, Desulfovibrio vulgaris subsp. vulgaris str. Hildenborough; identical to SEQ ID NO: 15121

SEQ ID NO: 41037 - DNA, 1041 bp, Erwinia carotovora subsp. atroseptica SCRI1043; identical to SEQ ID NO: 15122
  CDS (1)..(1041)

SEQ ID NO: 41038 - protein, 346 aa, Erwinia carotovora subsp. atroseptica SCRI1043; identical to SEQ ID NO: 15123

SEQ ID NO: 41039 - DNA, 1152 bp, Propionibacterium acnes KPA171202; identical to SEQ ID NO: 15124
  CDS (1)..(1152): transl_table=11

SEQ ID NO: 41040 - protein, 383 aa, Propionibacterium acnes KPA171202; identical to SEQ ID NO: 15125

SEQ ID NO: 41041 - DNA, 867 bp, Streptococcus pyogenes MGAS10394; identical to SEQ ID NO: 15126
  CDS (1)..(867): transl_table=11

SEQ ID NO: 41042 - protein, 288 aa, Streptococcus pyogenes MGAS10394; identical to SEQ ID NO: 15127

SEQ ID NO: 41043 - DNA, 1095 bp, Leifsonia xyli subsp. xyli str. CTCB07; identical to SEQ ID NO: 15128
  CDS (1)..(1095): transl_table=11

SEQ ID NO: 41044 - protein, 364 aa, Leifsonia xyli subsp. xyli str. CTCB07; identical to SEQ ID NO: 15129

SEQ ID NO: 41045 - DNA, 855 bp, Symbiobacterium thermophilum IAM 14863; identical to SEQ ID NO: 15130
  CDS (1)..(855): transl_table=11

SEQ ID NO: 41046 - protein, 284 aa, Symbiobacterium thermophilum IAM 14863; identical to SEQ ID NO: 15131

SEQ ID NO: 41047 - DNA, 918 bp, Bacillus licheniformis ATCC 14580; identical to SEQ ID NO: 15132
  CDS (1)..(918): transl_table=11

SEQ ID NO: 41048 - protein, 305 aa, Bacillus licheniformis ATCC 14580; identical to SEQ ID NO: 15133

SEQ ID NO: 41049 - DNA, 1113 bp, Nocardia farcinica IFM 10152; identical to SEQ ID NO: 15134
  CDS (1)..(1113): transl_table=11

SEQ ID NO: 41050 - protein, 370 aa, Nocardia farcinica IFM 10152; identical to SEQ ID NO: 15135

SEQ ID NO: 41051 - DNA, 825 bp, Photobacterium profundum SS9; identical to SEQ ID NO: 15136
  CDS (1)..(825): transl_table=11

SEQ ID NO: 41052 - protein, 274 aa, Photobacterium profundum SS9; identical to SEQ ID NO: 15137

SEQ ID NO: 41053 - DNA, 858 bp, Photobacterium profundum SS9; identical to SEQ ID NO: 15138
  CDS (1)..(858): transl_table=11

SEQ ID NO: 41054 - protein, 285 aa, Photobacterium profundum SS9; identical to SEQ ID NO: 15139

SEQ ID NO: 41055 - DNA, 4956 bp, Acanthamoeba polyphaga mimivirus; identical to SEQ ID NO: 15140
  CDS (1)..(4956)

SEQ ID NO: 41056 - protein, 1651 aa, Acanthamoeba polyphaga mimivirus; identical to SEQ ID NO: 15141

SEQ ID NO: 41057 - DNA, 4974 bp, Acanthamoeba polyphaga mimivirus; identical to SEQ ID NO: 15142
  CDS (1)..(4974)

SEQ ID NO: 41058 - protein, 1657 aa, Acanthamoeba polyphaga mimivirus; identical to SEQ ID NO: 15143

SEQ ID NO: 41059 - DNA, 4875 bp, Acanthamoeba polyphaga mimivirus; identical to SEQ ID NO: 15144
  CDS (1)..(4875)

SEQ ID NO: 41060 - protein, 1624 aa, Acanthamoeba polyphaga mimivirus; identical to SEQ ID NO: 15145

SEQ ID NO: 41061 - DNA, 891 bp, Geobacillus kaustophilus HTA426; identical to SEQ ID NO: 15146
  CDS (1)..(891): transl_table=11

SEQ ID NO: 41062 - protein, 296 aa, Geobacillus kaustophilus HTA426; identical to SEQ ID NO: 15147

SEQ ID NO: 41063 - DNA, 1041 bp, Salmonella enterica subsp. enterica serovar Paratyphi A str. ATCC; identical to SEQ ID NO: 15148
  CDS (1)..(1041): transl_table=11

SEQ ID NO: 41064 - protein, 346 aa, Salmonella enterica subsp. enterica serovar Paratyphi A str. ATCC; identical to SEQ ID NO: 15149

SEQ ID NO: 41065 - DNA, 1041 bp, Zymomonas mobilis subsp. mobilis ZM4; identical to SEQ ID NO: 15150
  CDS (1)..(1041): transl_table=11

SEQ ID NO: 41066 - protein, 346 aa, Zymomonas mobilis subsp. mobilis ZM4; identical to SEQ ID NO: 15151

SEQ ID NO: 41067 - DNA, 921 bp, Bacillus clausii KSM-K16; identical to SEQ ID NO: 15152
  CDS (1)..(921): transl_table=11

SEQ ID NO: 41068 - protein, 306 aa, Bacillus clausii KSM-K16; identical to SEQ ID NO: 15153

SEQ ID NO: 41069 - DNA, 1152 bp, Thermococcus kodakarensis KOD1; identical to SEQ ID NO: 15154
  CDS (1)..(1152): transl_table=11

SEQ ID NO: 41070 - protein, 383 aa, Thermococcus kodakarensis KOD1; identical to SEQ ID NO: 15155

SEQ ID NO: 41071 - DNA, 984 bp, Staphylococcus aureus subsp. aureus COL; identical to SEQ ID NO: 15156
  CDS (1)..(984): transl_table=11

SEQ ID NO: 41072 - protein, 327 aa, Staphylococcus aureus subsp. aureus COL; identical to SEQ ID NO: 15157

SEQ ID NO: 41073 - DNA, 978 bp, Staphylococcus epidermidis RP62A; identical to SEQ ID NO: 15158
  CDS (1)..(978): transl_table=11

SEQ ID NO: 41074 - protein, 325 aa, Staphylococcus epidermidis RP62A; identical to SEQ ID NO: 15159

SEQ ID NO: 41075 - DNA, 990 bp, Gluconobacter oxydans 621H; identical to SEQ ID NO: 15160
  CDS (1)..(990): transl_table=11

SEQ ID NO: 41076 - protein, 329 aa, Gluconobacter oxydans 621H; identical to SEQ ID NO: 15161

SEQ ID NO: 41077 - DNA, 1029 bp, Gluconobacter oxydans 621H; identical to SEQ ID NO: 15162
  CDS (1)..(1029): transl_table=11

SEQ ID NO: 41078 - protein, 342 aa, Gluconobacter oxydans 621H; identical to SEQ ID NO: 15163

SEQ ID NO: 41079 - DNA, 1119 bp, Xanthomonas oryzae pv. oryzae KACC10331; identical to SEQ ID NO: 15164
  CDS (1)..(1119): transl_table=11

SEQ ID NO: 41080 - protein, 372 aa, Xanthomonas oryzae pv. oryzae KACC10331; identical to SEQ ID NO: 15165

SEQ ID NO: 41081 - DNA, 1137 bp, Xanthomonas oryzae pv. oryzae KACC10331; identical to SEQ ID NO: 15166
  CDS (1)..(1137): transl_table=11

SEQ ID NO: 41082 - protein, 378 aa, Xanthomonas oryzae pv. oryzae KACC10331; identical to SEQ ID NO: 15167

SEQ ID NO: 41083 - DNA, 813 bp, Vibrio fischeri ES114; identical to SEQ ID NO: 15168
  CDS (1)..(813): transl_table=11

SEQ ID NO: 41084 - protein, 270 aa, Vibrio fischeri ES114; identical to SEQ ID NO: 15169

SEQ ID NO: 41085 - DNA, 852 bp, Bacteroides fragilis NCTC 9343; identical to SEQ ID NO: 15170
  CDS (1)..(852): transl_table=11

SEQ ID NO: 41086 - protein, 283 aa, Bacteroides fragilis NCTC 9343; identical to SEQ ID NO: 15171

SEQ ID NO: 41087 - DNA, 966 bp, Cyanophage P-SSM4; identical to SEQ ID NO: 15172
  CDS (1)..(966): transl_table=11

SEQ ID NO: 41088 - protein, 321 aa, Cyanophage P-SSM4; identical to SEQ ID NO: 15173

SEQ ID NO: 41089 - DNA, 1041 bp, Salmonella enterica subsp. enterica serovar Choleraesuis str; identical to SEQ ID NO: 15174
  CDS (1)..(1041): transl_table=11

SEQ ID NO: 41090 - protein, 346 aa, Salmonella enterica subsp. enterica serovar Choleraesuis str; identical to SEQ ID NO: 15175

SEQ ID NO: 41091 - DNA, 747 bp, Leptospirillum ferrooxidans; identical to SEQ ID NO: 15176
  CDS (1)..(747): transl_table=11

SEQ ID NO: 41092 - protein, 248 aa, Leptospirillum ferrooxidans; identical to SEQ ID NO: 15177

SEQ ID NO: 41093 - DNA, 1104 bp, Corynebacterium jeikeium K411; identical to SEQ ID NO: 15178
  CDS (1)..(1104): transl_table=11

SEQ ID NO: 41094 - protein, 367 aa, Corynebacterium jeikeium K411; identical to SEQ ID NO: 15179

SEQ ID NO: 41095 - DNA, 1095 bp, Xylella fastidiosa Ann-1; identical to SEQ ID NO: 15180
  CDS (1)..(1095)

SEQ ID NO: 41096 - protein, 364 aa, Xylella fastidiosa Ann-1; identical to SEQ ID NO: 15181

SEQ ID NO: 41097 - DNA, 1044 bp, Nostoc punctiforme PCC 73102; identical to SEQ ID NO: 15182
  CDS (1)..(1044)

SEQ ID NO: 41098 - protein, 347 aa, Nostoc punctiforme PCC 73102; identical to SEQ ID NO: 15183

SEQ ID NO: 41099 - DNA, 801 bp, Bifidobacterium longum DJO10A; identical to SEQ ID NO: 15184
  misc_feature (686)..(735): n is a, c, g, or t
  CDS (1)..(801)

SEQ ID NO: 41100 - protein, 266 aa, Bifidobacterium longum DJO10A; identical to SEQ ID NO: 15185
  misc_feature (229)..(245): Xaa can be any naturally occuring amino acid

SEQ ID NO: 41101 - DNA, 996 bp, Pseudomonas syringae pv. syringae B728a; identical to SEQ ID NO: 15186
  CDS (1)..(996)

SEQ ID NO: 41102 - protein, 331 aa, Pseudomonas syringae pv. syringae B728a; identical to SEQ ID NO: 15187

SEQ ID NO: 41103 - DNA, 810 bp, Desulfovibrio desulfuricans G20; identical to SEQ ID NO: 15188
  CDS (1)..(810)

SEQ ID NO: 41104 - protein, 269 aa, Desulfovibrio desulfuricans G20; identical to SEQ ID NO: 15189

SEQ ID NO: 41105 - DNA, 1044 bp, Actinobacillus pleuropneumoniae serovar 1 str. 4074; identical to SEQ ID NO: 15190
  CDS (1)..(1044)

SEQ ID NO: 41106 - protein, 347 aa, Actinobacillus pleuropneumoniae serovar 1 str. 4074; identical to SEQ ID NO: 15191

SEQ ID NO: 41107 - DNA, 1179 bp, Pseudomonas aeruginosa UCBPP-PA14; identical to SEQ ID NO: 15192
  CDS (1)..(1179)

SEQ ID NO: 41108 - protein, 392 aa, Pseudomonas aeruginosa UCBPP-PA14; identical to SEQ ID NO: 15193

SEQ ID NO: 41109 - DNA, 1155 bp, Psychrobacter sp. 273-4; identical to SEQ ID NO: 15194
  CDS (1)..(1155)

SEQ ID NO: 41110 - protein, 384 aa, Psychrobacter sp. 273-4; identical to SEQ ID NO: 15195

SEQ ID NO: 41111 - DNA, 975 bp, Dechloromonas aromatica RCB; identical to SEQ ID NO: 15196
  CDS (1)..(975)

SEQ ID NO: 41112 - protein, 324 aa, Dechloromonas aromatica RCB; identical to SEQ ID NO: 15197

SEQ ID NO: 41113 - DNA, 1014 bp, Haemophilus influenzae R2846; identical to SEQ ID NO: 15198
  CDS (1)..(1014)

SEQ ID NO: 41114 - protein, 337 aa, Haemophilus influenzae R2846; identical to SEQ ID NO: 15199

SEQ ID NO: 41115 - DNA, 1182 bp, Anabaena variabilis ATCC 29413; identical to SEQ ID NO: 15200
  CDS (1)..(1182)

SEQ ID NO: 41116 - protein, 393 aa, Anabaena variabilis ATCC 29413; identical to SEQ ID NO: 15201

SEQ ID NO: 41117 - DNA, 1044 bp, Anabaena variabilis ATCC 29413; identical to SEQ ID NO: 15202
  CDS (1)..(1044)

SEQ ID NO: 41118 - protein, 347 aa, Anabaena variabilis ATCC 29413; identical to SEQ ID NO: 15203

SEQ ID NO: 41119 - DNA, 1032 bp, Ralstonia eutropha JMP134; identical to SEQ ID NO: 15204
  CDS (1)..(1032)

SEQ ID NO: 41120 - protein, 343 aa, Ralstonia eutropha JMP134; identical to SEQ ID NO: 15205

SEQ ID NO: 41121 - DNA, 1026 bp, Burkholderia cepacia R18194; identical to SEQ ID NO: 15206
  CDS (1)..(1026)

SEQ ID NO: 41122 - protein, 341 aa, Burkholderia cepacia R18194; identical to SEQ ID NO: 15207

SEQ ID NO: 41123 - DNA, 915 bp, Burkholderia cepacia R18194; identical to SEQ ID NO: 15208
  CDS (1)..(915)

SEQ ID NO: 41124 - protein, 304 aa, Burkholderia cepacia R18194; identical to SEQ ID NO: 15209

SEQ ID NO: 41125 - DNA, 1041 bp, Rubrivivax gelatinosus PM1; identical to SEQ ID NO: 15210
  CDS (1)..(1041)

SEQ ID NO: 41126 - protein, 346 aa, Rubrivivax gelatinosus PM1; identical to SEQ ID NO: 15211

SEQ ID NO: 41127 - DNA, 1110 bp, Pseudomonas fluorescens PfO-1; identical to SEQ ID NO: 15212
  CDS (1)..(1110)

SEQ ID NO: 41128 - protein, 369 aa, Pseudomonas fluorescens PfO-1; identical to SEQ ID NO: 15213

SEQ ID NO: 41129 - DNA, 1014 bp, Burkholderia fungorum LB400; identical to SEQ ID NO: 15214
  CDS (1)..(1014)

SEQ ID NO: 41130 - protein, 337 aa, Burkholderia fungorum LB400; identical to SEQ ID NO: 15215

SEQ ID NO: 41131 - DNA, 1026 bp, Burkholderia fungorum LB400; identical to SEQ ID NO: 15216
  CDS (1)..(1026)

SEQ ID NO: 41132 - protein, 341 aa, Burkholderia fungorum LB400; identical to SEQ ID NO: 15217

SEQ ID NO: 41133 - DNA, 1032 bp, Burkholderia fungorum LB400; identical to SEQ ID NO: 15218
  CDS (1)..(1032)

SEQ ID NO: 41134 - protein, 343 aa, Burkholderia fungorum LB400; identical to SEQ ID NO: 15219

SEQ ID NO: 41135 - DNA, 1119 bp, Thermobifida fusca; identical to SEQ ID NO: 15220
  CDS (1)..(1119)

SEQ ID NO: 41136 - protein, 372 aa, Thermobifida fusca; identical to SEQ ID NO: 15221

SEQ ID NO: 41137 - DNA, 1056 bp, Thermobifida fusca; identical to SEQ ID NO: 15222
  CDS (1)..(1056)

SEQ ID NO: 41138 - protein, 351 aa, Thermobifida fusca; identical to SEQ ID NO: 15223

SEQ ID NO: 41139 - DNA, 867 bp, Oenococcus oeni PSU-1; identical to SEQ ID NO: 15224
  CDS (1)..(867)

SEQ ID NO: 41140 - protein, 288 aa, Oenococcus oeni PSU-1; identical to SEQ ID NO: 15225

SEQ ID NO: 41141 - DNA, 1077 bp, Trichodesmium erythraeum IMS101; identical to SEQ ID NO: 15226
  CDS (1)..(1077)

SEQ ID NO: 41142 - protein, 358 aa, Trichodesmium erythraeum IMS101; identical to SEQ ID NO: 15227

SEQ ID NO: 41143 - DNA, 1086 bp, Trichodesmium erythraeum IMS101; identical to SEQ ID NO: 15228
  CDS (1)..(1086)

SEQ ID NO: 41144 - protein, 361 aa, Trichodesmium erythraeum IMS101; identical to SEQ ID NO: 15229

SEQ ID NO: 41145 - DNA, 870 bp, Streptococcus suis 89/1591; identical to SEQ ID NO: 15230
  CDS (1)..(870)

SEQ ID NO: 41146 - protein, 289 aa, Streptococcus suis 89/1591; identical to SEQ ID NO: 15231

SEQ ID NO: 41147 - DNA, 1026 bp, Thiobacillus denitrificans ATCC 25259; identical to SEQ ID NO: 15232
  CDS (1)..(1026)

SEQ ID NO: 41148 - protein, 341 aa, Thiobacillus denitrificans ATCC 25259; identical to SEQ ID NO: 15233

SEQ ID NO: 41149 - DNA, 1131 bp, Brevibacterium linens BL2; identical to SEQ ID NO: 15234
  CDS (1)..(1131)

SEQ ID NO: 41150 - protein, 376 aa, Brevibacterium linens BL2; identical to SEQ ID NO: 15235

SEQ ID NO: 41151 - DNA, 1023 bp, Deinococcus geothermalis DSM 11300; identical to SEQ ID NO: 15236
  CDS (1)..(1023): transl_table=11

SEQ ID NO: 41152 - protein, 340 aa, Deinococcus geothermalis DSM 11300; identical to SEQ ID NO: 15237

SEQ ID NO: 41153 - DNA, 819 bp, Anaeromyxobacter dehalogenans 2CP-C; identical to SEQ ID NO: 15238
  CDS (1)..(819): transl_table=11

SEQ ID NO: 41154 - protein, 272 aa, Anaeromyxobacter dehalogenans 2CP-C; identical to SEQ ID NO: 15239

SEQ ID NO: 41155 - DNA, 1122 bp, Arthrobacter sp. FB24; identical to SEQ ID NO: 15240
  CDS (1)..(1122): transl_table=11

SEQ ID NO: 41156 - protein, 373 aa, Arthrobacter sp. FB24; identical to SEQ ID NO: 15241

SEQ ID NO: 41157 - DNA, 1026 bp, Burkholderia vietnamiensis G4; identical to SEQ ID NO: 15242
  CDS (1)..(1026): transl_table=11

SEQ ID NO: 41158 - protein, 341 aa, Burkholderia vietnamiensis G4; identical to SEQ ID NO: 15243

SEQ ID NO: 41159 - DNA, 1335 bp, Burkholderia vietnamiensis G4; identical to SEQ ID NO: 15244
  CDS (1)..(1335): transl_table=11

SEQ ID NO: 41160 - protein, 444 aa, Burkholderia vietnamiensis G4; identical to SEQ ID NO: 15245

SEQ ID NO: 41161 - DNA, 1026 bp, Burkholderia cenocepacia AU 1054; identical to SEQ ID NO: 15246
  CDS (1)..(1026): transl_table=11

SEQ ID NO: 41162 - protein, 341 aa, Burkholderia cenocepacia AU 1054; identical to SEQ ID NO: 15247

SEQ ID NO: 41163 - DNA, 1044 bp, Polaromonas sp. JS666; identical to SEQ ID NO: 15248
  CDS (1)..(1044): transl_table=11

SEQ ID NO: 41164 - protein, 347 aa, Polaromonas sp. JS666; identical to SEQ ID NO: 15249

SEQ ID NO: 41165 - DNA, 1080 bp, Polaromonas sp. JS666; identical to SEQ ID NO: 15250
  CDS (1)..(1080): transl_table=11

SEQ ID NO: 41166 - protein, 359 aa, Polaromonas sp. JS666; identical to SEQ ID NO: 15251

SEQ ID NO: 41167 - DNA, 1149 bp, Crocosphaera watsonii WH 8501; identical to SEQ ID NO: 15252
  CDS (1)..(1149): transl_table=11

SEQ ID NO: 41168 - protein, 382 aa, Crocosphaera watsonii WH 8501; identical to SEQ ID NO: 15253

SEQ ID NO: 41169 - DNA, 1029 bp, Geobacter metallireducens GS-15; identical to SEQ ID NO: 15254
  CDS (1)..(1029): transl_table=11

SEQ ID NO: 41170 - protein, 342 aa, Geobacter metallireducens GS-15; identical to SEQ ID NO: 15255

SEQ ID NO: 41171 - DNA, 930 bp, Moorella thermoacetica ATCC 39073; identical to SEQ ID NO: 15256
  CDS (1)..(930): transl_table=11

SEQ ID NO: 41172 - protein, 309 aa, Moorella thermoacetica ATCC 39073; identical to SEQ ID NO: 15257

SEQ ID NO: 41173 - DNA, 873 bp, Pelodictyon phaeoclathratiforme BU-1; identical to SEQ ID NO: 15258
  CDS (1)..(873): transl_table=11

SEQ ID NO: 41174 - protein, 290 aa, Pelodictyon phaeoclathratiforme BU-1; identical to SEQ ID NO: 15259

SEQ ID NO: 41175 - DNA, 819 bp, Prosthecochloris aestuarii DSM 271; identical to SEQ ID NO: 15260
  CDS (1)..(819): transl_table=11

SEQ ID NO: 41176 - protein, 272 aa, Prosthecochloris aestuarii DSM 271; identical to SEQ ID NO: 15261

SEQ ID NO: 41177 - DNA, 1002 bp, Ralstonia metallidurans CH34; identical to SEQ ID NO: 15262
  CDS (1)..(1002): transl_table=11

SEQ ID NO: 41178 - protein, 333 aa, Ralstonia metallidurans CH34; identical to SEQ ID NO: 15263

SEQ ID NO: 41179 - DNA, 1032 bp, Ralstonia metallidurans CH34; identical to SEQ ID NO: 15264
  CDS (1)..(1032): transl_table=11

SEQ ID NO: 41180 - protein, 343 aa, Ralstonia metallidurans CH34; identical to SEQ ID NO: 15265

SEQ ID NO: 41181 - DNA, 1113 bp, Rubrobacter xylanophilus DSM 9941; identical to SEQ ID NO: 15266
  CDS (1)..(1113): transl_table=11

SEQ ID NO: 41182 - protein, 370 aa, Rubrobacter xylanophilus DSM 9941; identical to SEQ ID NO: 15267

SEQ ID NO: 41183 - DNA, 891 bp, Enterococcus faecium DO; identical to SEQ ID NO: 15268
  CDS (1)..(891): transl_table=11

SEQ ID NO: 41184 - protein, 296 aa, Enterococcus faecium DO; identical to SEQ ID NO: 15269

SEQ ID NO: 41185 - DNA, 1113 bp, Kineococcus radiotolerans SRS30216; identical to SEQ ID NO: 15270
  CDS (1)..(1113): transl_table=11

SEQ ID NO: 41186 - protein, 370 aa, Kineococcus radiotolerans SRS30216; identical to SEQ ID NO: 15271

SEQ ID NO: 41187 - DNA, 1026 bp, Nitrobacter hamburgensis X14; identical to SEQ ID NO: 15272
  CDS (1)..(1026): transl_table=11

SEQ ID NO: 41188 - protein, 341 aa, Nitrobacter hamburgensis X14; identical to SEQ ID NO: 15273

SEQ ID NO: 41189 - DNA, 873 bp, Burkholderia mallei FMH; identical to SEQ ID NO: 15274
  CDS (1)..(873)

SEQ ID NO: 41190 - protein, 290 aa, Burkholderia mallei FMH; identical to SEQ ID NO: 15275

SEQ ID NO: 41191 - DNA, 879 bp, Burkholderia mallei JHU; identical to SEQ ID NO: 15276
  CDS (1)..(879)

SEQ ID NO: 41192 - protein, 292 aa, Burkholderia mallei JHU; identical to SEQ ID NO: 15277

SEQ ID NO: 41193 - DNA, 1041 bp, Enterobacter cloacae; identical to SEQ ID NO: 15278
  CDS (1)..(1041): transl_table=11

SEQ ID NO: 41194 - protein, 346 aa, Enterobacter cloacae; identical to SEQ ID NO: 15279

SEQ ID NO: 41195 - DNA, 540 bp, Pectobacterium carotovorum; identical to SEQ ID NO: 15280
  CDS (1)..(540): transl_table=11

SEQ ID NO: 41196 - protein, 179 aa, Pectobacterium carotovorum; identical to SEQ ID NO: 15281

SEQ ID NO: 41197 - DNA, 996 bp, Prochlorococcus marinus; identical to SEQ ID NO: 15282
  CDS (1)..(996): transl_table=11

SEQ ID NO: 41198 - protein, 331 aa, Prochlorococcus marinus; identical to SEQ ID NO: 15283

SEQ ID NO: 41199 - DNA, 981 bp, Synechococcus sp; identical to SEQ ID NO: 15284
  CDS (1)..(981): transl_table=11

SEQ ID NO: 41200 - protein, 326 aa, Synechococcus sp; identical to SEQ ID NO: 15285

SEQ ID NO: 41201 - DNA, 1125 bp, Mycobacterium intracellulare; identical to SEQ ID NO: 15286
  CDS (1)..(1125): transl_table=11

SEQ ID NO: 41202 - protein, 374 aa, Mycobacterium intracellulare; identical to SEQ ID NO: 15287

SEQ ID NO: 41203 - DNA, 873 bp, Lactobacillus reuteri; identical to SEQ ID NO: 15288
  CDS (1)..(873): transl_table=11

SEQ ID NO: 41204 - protein, 290 aa, Lactobacillus reuteri; identical to SEQ ID NO: 15289

SEQ ID NO: 41205 - DNA, 1041 bp, Erwinia amylovora; identical to SEQ ID NO: 15290
  CDS (1)..(1041): transl_table=11

SEQ ID NO: 41206 - protein, 346 aa, Erwinia amylovora; identical to SEQ ID NO: 15291

SEQ ID NO: 41207 - DNA, 987 bp, Mycobacterium leprae; identical to SEQ ID NO: 15292
  CDS (1)..(987): transl_table=11

SEQ ID NO: 41208 - protein, 328 aa, Mycobacterium leprae; identical to SEQ ID NO: 15293

SEQ ID NO: 41209 - DNA, 765 bp, Escherichia coli; identical to SEQ ID NO: 15294
  CDS (1)..(765): transl_table=11

SEQ ID NO: 41210 - protein, 254 aa, Escherichia coli; identical to SEQ ID NO: 15295

SEQ ID NO: 41211 - DNA, 1020 bp, Xanthomonas oryzae; identical to SEQ ID NO: 15296
  CDS (1)..(1020): transl_table=11

SEQ ID NO: 41212 - protein, 339 aa, Xanthomonas oryzae; identical to SEQ ID NO: 15297

SEQ ID NO: 41213 - DNA, 1122 bp, Mycobacterium smegmatis; identical to SEQ ID NO: 15298
  CDS (1)..(1122): transl_table=11

SEQ ID NO: 41214 - protein, 373 aa, Mycobacterium smegmatis; identical to SEQ ID NO: 15299

SEQ ID NO: 41215 - DNA, 1113 bp, Mycobacterium tuberculosis; identical to SEQ ID NO: 15300
  CDS (1)..(1113): transl_table=11

SEQ ID NO: 41216 - protein, 370 aa, Mycobacterium tuberculosis; identical to SEQ ID NO: 15301

SEQ ID NO: 41217 - DNA, 1041 bp, Edwardsiella tarda; identical to SEQ ID NO: 15302
  CDS (1)..(1041): transl_table=11

SEQ ID NO: 41218 - protein, 346 aa, Edwardsiella tarda; identical to SEQ ID NO: 15303

SEQ ID NO: 41219 - DNA, 636 bp, Edwardsiella tarda; identical to SEQ ID NO: 15304
  CDS (1)..(636): transl_table=11

SEQ ID NO: 41220 - protein, 211 aa, Edwardsiella tarda; identical to SEQ ID NO: 15305

SEQ ID NO: 41221 - DNA, 945 bp, Edwardsiella tarda; identical to SEQ ID NO: 15306
  CDS (1)..(945): transl_table=11

SEQ ID NO: 41222 - protein, 314 aa, Edwardsiella tarda; identical to SEQ ID NO: 15307

SEQ ID NO: 41223 - DNA, 1137 bp, Streptomyces griseus subsp; identical to SEQ ID NO: 15308
  CDS (1)..(1137): transl_table=11

SEQ ID NO: 41224 - protein, 378 aa, Streptomyces griseus subsp; identical to SEQ ID NO: 15309

SEQ ID NO: 41225 - DNA, 1017 bp, Burkholderia sp; identical to SEQ ID NO: 15310
  CDS (1)..(1017): transl_table=11

SEQ ID NO: 41226 - protein, 338 aa, Burkholderia sp; identical to SEQ ID NO: 15311

SEQ ID NO: 41227 - DNA, 1107 bp, Pseudomonas aeruginosa; identical to SEQ ID NO: 15312
  CDS (1)..(1107): transl_table=11

SEQ ID NO: 41228 - protein, 368 aa, Pseudomonas aeruginosa; identical to SEQ ID NO: 15313

SEQ ID NO: 41229 - DNA, 1125 bp, Mycobacterium tuberculosis; identical to SEQ ID NO: 15314
  CDS (1)..(1125): transl_table=11

SEQ ID NO: 41230 - protein, 374 aa, Mycobacterium tuberculosis; identical to SEQ ID NO: 15315

SEQ ID NO: 41231 - DNA, 1113 bp, Mycobacterium tuberculosis; identical to SEQ ID NO: 15316
  CDS (1)..(1113): transl_table=11

SEQ ID NO: 41232 - protein, 370 aa, Mycobacterium tuberculosis; identical to SEQ ID NO: 15317

SEQ ID NO: 41233 - DNA, 1110 bp, Mycobacterium avium; identical to SEQ ID NO: 15318
  CDS (1)..(1110): transl_table=11

SEQ ID NO: 41234 - protein, 369 aa, Mycobacterium avium; identical to SEQ ID NO: 15319

SEQ ID NO: 41235 - DNA, 1113 bp, Mycobacterium bovis; identical to SEQ ID NO: 15320
  CDS (1)..(1113): transl_table=11

SEQ ID NO: 41236 - protein, 370 aa, Mycobacterium bovis; identical to SEQ ID NO: 15321

SEQ ID NO: 41237 - DNA, 1110 bp, Mycobacterium leprae; identical to SEQ ID NO: 15322
  CDS (1)..(1110): transl_table=11

SEQ ID NO: 41238 - protein, 369 aa, Mycobacterium leprae; identical to SEQ ID NO: 15323

SEQ ID NO: 41239 - DNA, 1170 bp, Methanococcus jannaschii; identical to SEQ ID NO: 15324
  CDS (1)..(1170): transl_table=11

SEQ ID NO: 41240 - protein, 389 aa, Methanococcus jannaschii; identical to SEQ ID NO: 15325

SEQ ID NO: 41241 - DNA, 1035 bp, Pasteurella multocida; identical to SEQ ID NO: 15326
  CDS (1)..(1035)

SEQ ID NO: 41242 - protein, 344 aa, Pasteurella multocida; identical to SEQ ID NO: 15327

SEQ ID NO: 41243 - DNA, 1056 bp, Rhizobium loti; identical to SEQ ID NO: 15328
  CDS (1)..(1056): transl_table=11

SEQ ID NO: 41244 - protein, 351 aa, Rhizobium loti; identical to SEQ ID NO: 15329

SEQ ID NO: 41245 - DNA, 1095 bp, Xylella fastidiosa; identical to SEQ ID NO: 15330
  CDS (1)..(1095): transl_table=11

SEQ ID NO: 41246 - protein, 364 aa, Xylella fastidiosa; identical to SEQ ID NO: 15331

SEQ ID NO: 41247 - DNA, 1095 bp, Xylella fastidiosa; identical to SEQ ID NO: 15332
  CDS (1)..(1095): transl_table=11

SEQ ID NO: 41248 - protein, 364 aa, Xylella fastidiosa; identical to SEQ ID NO: 15333

SEQ ID NO: 41249 - DNA, 903 bp, Bacillus subtilis; identical to SEQ ID NO: 15334
  CDS (1)..(903): transl_table=11

SEQ ID NO: 41250 - protein, 300 aa, Bacillus subtilis; identical to SEQ ID NO: 15335

SEQ ID NO: 41251 - DNA, 24 bp, Artificial sequence
  Primer sequence
atgaaagttatgcgtaccaccgtc

SEQ ID NO: 41252 - DNA, 23 bp, Artificial sequence
  Primer sequence
ttagtacagcggcttaccgctac

SEQ ID NO: 41253 - protein, 548 aa, Artificial sequence; identical to SEQ ID NO: 15338
  Consensus
  Variant (2)..(4): Xaa in position 2 to 4 is any amino acid
  Variant (18)..(18): Xaa in position 18 is any amino acid
  Variant (25)..(25): Xaa in position 25 is any amino acid
  Variant (28)..(28): Xaa in position 28 is any amino acid
  Variant (34)..(34): Xaa in position 34 is any amino acid
  Variant (38)..(38): Xaa in position 38 is any amino acid
  Variant (58)..(58): Xaa in position 58 is any amino acid
  Variant (78)..(78): Xaa in position 78 is any amino acid
  Variant (80)..(80): Xaa in position 80 is any amino acid
  Variant (90)..(90): Xaa in position 90 is any or no amino acid
  Variant (92)..(137): Xaa in position 92 to 137 is any or no amino acid
  Variant (153)..(153): Xaa in position 153 is any amino acid
  Variant (158)..(161): Xaa in position 158 to 161 is any amino acid
  Variant (162)..(163): Xaa in position 162 to 163 is any or no amino acid
  Variant (165)..(173): Xaa in position 165 to 173 is any or no amino acid
  Variant (176)..(176): Xaa in position 176 is any amino acid
  Variant (191)..(192): Xaa in position 191 to 192 is any amino acid
  Variant (197)..(197): Xaa in position 197 is any amino acid
  Variant (201)..(207): Xaa in position 201 to 207 is any or no amino acid
  Variant (210)..(213): Xaa in position 210 to 213 is any amino acid
  Variant (222)..(222): Xaa in position 222 is any amino acid
  Variant (226)..(227): Xaa in position 226 to 227 is any amino acid
  Variant (229)..(229): Xaa in position 229 is any amino acid
  Variant (231)..(231): Xaa in position 231 is any amino acid
  Variant (238)..(238): Xaa in position 238 is any amino acid
  Variant (245)..(245): Xaa in position 245 is any amino acid
  Variant (260)..(260): Xaa in position 260 is any amino acid
  Variant (262)..(262): Xaa in position 262 is any amino acid
  Variant (288)..(288): Xaa in position 288 is any amino acid
  Variant (291)..(291): Xaa in position 291 is any amino acid
  Variant (294)..(294): Xaa in position 294 is any amino acid
  Variant (299)..(299): Xaa in position 299 is any amino acid
  Variant (334)..(351): Xaa in position 334 to 351 is any or no amino acid
  Variant (355)..(357): Xaa in position 355 to 357 is any or no amino acid
  Variant (359)..(361): Xaa in position 359 to 361 is any amino acid
  Variant (364)..(364): Xaa in position 364 is any amino acid
  Variant (368)..(368): Xaa in position 368 is any amino acid
  Variant (386)..(386): Xaa in position 386 is any amino acid
  Variant (390)..(391): Xaa in position 390 to 391 is any amino acid
  Variant (395)..(395): Xaa in position 395 is any amino acid
  Variant (399)..(399): Xaa in position 399 is any amino acid
  Variant (402)..(402): Xaa in position 402 is any amino acid
  Variant (407)..(407): Xaa in position 407 is any amino acid
  Variant (409)..(409): Xaa in position 409 is any amino acid
  Variant (415)..(415): Xaa in position 415 is any or no amino acid
  Variant (418)..(418): Xaa in position 418 is any amino acid
  Variant (420)..(420): Xaa in position 420 is any or no amino acid
  Variant (430)..(430): Xaa in position 430 is any amino acid
  Variant (435)..(443): Xaa in position 435 to 443 is any or no amino acid
  Variant (447)..(447): Xaa in position 447 is any amino acid
  Variant (457)..(457): Xaa in position 457 is any amino acid
  Variant (480)..(480): Xaa in position 480 is any or no amino acid
  Variant (485)..(489): Xaa in position 485 to 489 is any or no amino acid
  Variant (504)..(504): Xaa in position 504 is any amino acid
  Variant (508)..(508): Xaa in position 508 is any amino acid
  Variant (515)..(515): Xaa in position 515 is any amino acid
  Variant (517)..(519): Xaa in position 517 to 519 is any amino acid
  Variant (522)..(522): Xaa in position 522 is any amino acid
  Variant (525)..(525): Xaa in position 525 is any or no amino acid
  Variant (528)..(528): Xaa in position 528 is any amino acid
  Variant (530)..(530): Xaa in position 530 is any amino acid
  Variant (534)..(534): Xaa in position 534 is any amino acid
  Variant (535)..(536): Xaa in position 535 to 536 is any or no amino acid
  Variant (547)..(547): Xaa in position 547 is any amino acid

SEQ ID NO: 41254 - protein, 51 aa, Artificial sequence; identical to SEQ ID NO: 15339
  Consensus
  Variant (2)..(30): Xaa in position 2 to 30 is any amino acid
  Variant (31)..(31): Xaa in position 31 is any or no amino acid
  Variant (34)..(35): Xaa in position 34 to 35 is any or no amino acid
  Variant (37)..(38): Xaa in position 37 to 38 is any amino acid
  Variant (39)..(39): Xaa in position 39 is Ala, Glu, Asn, Gln or Ser
  Variant (40)..(46): Xaa in position 40 to 46 is any amino acid
  Variant (47)..(47): Xaa in position 47 is Phe, Ile, Leu or Val
  Variant (48)..(48): Xaa in position 48 is Ala or Gly
  Variant (49)..(49): Xaa in position 49 is any amino acid
  Variant (50)..(50): Xaa in position 50 is Ala, Ser or Thr
  Variant (51)..(51): Xaa in position 51 is Asp, Glu, Gly or Ser

SEQ ID NO: 41255 - protein, 28 aa, Artificial sequence
  Consensus
  Variant (2)..(10): Xaa in position 2 to 10 is any amino acid
  Variant (11)..(12): Xaa in position 11 to 12 is any or no amino acid
  Variant (14)..(17): Xaa in position 14 to 17 is any amino acid
  Variant (19)..(21): Xaa in position 19 to 21 is any amino acid
  Variant (24)..(24): Xaa in position 24 is Ser or Thr
  Variant (25)..(27): Xaa in position 25 to 27 is any amino acid
  Variant (28)..(28): Xaa in position 28 is Phe or Trp
NXXXXXXXXXXXIXXXXRXXXSGXXXXX

SEQ ID NO: 41256 - DNA, 1113 bp, Saccharomyces cerevisiae; identical to SEQ ID NO: 1363
  CDS (1)..(1113)

SEQ ID NO: 41257 - protein, 370 aa, Saccharomyces cerevisiae; identical to SEQ ID NO: 1364

SEQ ID NO: 41258 - DNA, 1086 bp, Deinococcus radiodurans; identical to SEQ ID NO: 1327
  CDS (1)..(1086)

SEQ ID NO: 41259 - protein, 361 aa, Deinococcus radiodurans; identical to SEQ ID NO: 1328

SEQ ID NO: 41260 - DNA, 1071 bp, Salmonella enterica subsp. enterica serovar Typhi; identical to SEQ ID NO: 2245
  CDS (1)..(1071)

SEQ ID NO: 41261 - protein, 356 aa, Salmonella enterica subsp. enterica serovar Typhi; identical to SEQ ID NO: 2246

SEQ ID NO: 41262 - DNA, 1071 bp, Yersinia pestis; identical to SEQ ID NO: 2247
  CDS (1)..(1071)

SEQ ID NO: 41263 - protein, 356 aa, Yersinia pestis; identical to SEQ ID NO: 2248

SEQ ID NO: 41264 - DNA, 1047 bp, Yersinia pestis; identical to SEQ ID NO: 1331
  CDS (1)..(1047)

SEQ ID NO: 41265 - protein, 348 aa, Yersinia pestis; identical to SEQ ID NO: 1332

SEQ ID NO: 41266 - DNA, 1053 bp, Escherichia coli; identical to SEQ ID NO: 2251
  CDS (1)..(1053)

SEQ ID NO: 41267 - protein, 350 aa, Escherichia coli; identical to SEQ ID NO: 1580

SEQ ID NO: 41268 - DNA, 1071 bp, Escherichia coli; identical to SEQ ID NO: 1333
  CDS (1)..(1071)

SEQ ID NO: 41269 - protein, 356 aa, Escherichia coli; identical to SEQ ID NO: 1334

SEQ ID NO: 41270 - DNA, 1131 bp, Nostoc sp. PCC 7120; identical to SEQ ID NO: 1335
  CDS (1)..(1131)

SEQ ID NO: 41271 - protein, 376 aa, Nostoc sp. PCC 7120; identical to SEQ ID NO: 1336

SEQ ID NO: 41272 - DNA, 1053 bp, Salmonella enterica subsp. enterica serovar Typhi; identical to SEQ ID NO: 1337
  CDS (1)..(1053)

SEQ ID NO: 41273 - protein, 350 aa, Salmonella enterica subsp. enterica serovar Typhi; identical to SEQ ID NO: 1338

SEQ ID NO: 41274 - DNA, 1077 bp, Pseudomonas aeruginosa; identical to SEQ ID NO: 1339
  CDS (1)..(1077)

SEQ ID NO: 41275 - protein, 358 aa, Pseudomonas aeruginosa; identical to SEQ ID NO: 1340

SEQ ID NO: 41276 - DNA, 1074 bp, Vibrio cholerae; identical to SEQ ID NO: 1343
  CDS (1)..(1074)

SEQ ID NO: 41277 - protein, 357 aa, Vibrio cholerae; identical to SEQ ID NO: 1344

SEQ ID NO: 41278 - DNA, 1038 bp, Lactococcus lactis subsp. lactis; identical to SEQ ID NO: 1345
  CDS (1)..(1038)

SEQ ID NO: 41279 - protein, 345 aa, Lactococcus lactis subsp. lactis; identical to SEQ ID NO: 1346

SEQ ID NO: 41280 - DNA, 1023 bp, Lactococcus lactis subsp. lactis; identical to SEQ ID NO: 1347
  CDS (1)..(1023)

SEQ ID NO: 41281 - protein, 340 aa, Lactococcus lactis subsp. lactis; identical to SEQ ID NO: 1348

SEQ ID NO: 41282 - DNA, 1032 bp, Streptococcus pneumoniae; identical to SEQ ID NO: 1349
  CDS (1)..(1032)

SEQ ID NO: 41283 - protein, 343 aa, Streptococcus pneumoniae; identical to SEQ ID NO: 1350

SEQ ID NO: 41284 - DNA, 1056 bp, Neisseria meningitidis; identical to SEQ ID NO: 2269
  CDS (1)..(1056)

SEQ ID NO: 41285 - protein, 351 aa, Neisseria meningitidis; identical to SEQ ID NO: 2270

SEQ ID NO: 41286 - DNA, 1095 bp, Pseudomonas aeruginosa; identical to SEQ ID NO: 1351
  CDS (1)..(1095)

SEQ ID NO: 41287 - protein, 364 aa, Pseudomonas aeruginosa; identical to SEQ ID NO: 1352

SEQ ID NO: 41288 - DNA, 1032 bp, Streptococcus pneumoniae; identical to SEQ ID NO: 1355
  CDS (1)..(1032)

SEQ ID NO: 41289 - protein, 343 aa, Streptococcus pneumoniae; identical to SEQ ID NO: 1356

SEQ ID NO: 41290 - DNA, 1143 bp, Xylella fastidiosa; identical to SEQ ID NO: 1603
  CDS (1)..(1143)

SEQ ID NO: 41291 - protein, 380 aa, Xylella fastidiosa; identical to SEQ ID NO: 1604

SEQ ID NO: 41292 - DNA, 1047 bp, Buchnera aphidicola; identical to SEQ ID NO: 1357
  CDS (1)..(1047)

SEQ ID NO: 41293 - protein, 348 aa, Buchnera aphidicola; identical to SEQ ID NO: 1358

SEQ ID NO: 41294 - DNA, 1104 bp, Corynebacterium glutamicum; identical to SEQ ID NO: 2279
  CDS (1)..(1104)

SEQ ID NO: 41295 - protein, 367 aa, Corynebacterium glutamicum; identical to SEQ ID NO: 2280

SEQ ID NO: 41296 - DNA, 1089 bp, Haemophilus influenzae; identical to SEQ ID NO: 1359
  CDS (1)..(1089)

SEQ ID NO: 41297 - protein, 362 aa, Haemophilus influenzae; identical to SEQ ID NO: 1360

SEQ ID NO: 41298 - DNA, 1502 bp, Candida albicans; identical to SEQ ID NO: 1361
  CDS (336)..(1442)

SEQ ID NO: 41299 - protein, 368 aa, Candida albicans; identical to SEQ ID NO: 1362

SEQ ID NO: 41300 - DNA, 2048 bp, Saccharomyces cerevisiae; identical to SEQ ID NO: 1365
  CDS (619)..(1731)

SEQ ID NO: 41301 - protein, 370 aa, Saccharomyces cerevisiae; identical to SEQ ID NO: 1366

SEQ ID NO: 41302 - DNA, 1107 bp, Schizosaccharomyces pombe; identical to SEQ ID NO: 1367
  CDS (1)..(1107)

SEQ ID NO: 41303 - protein, 368 aa, Schizosaccharomyces pombe; identical to SEQ ID NO: 1368

SEQ ID NO: 41304 - DNA, 1089 bp, Amycolatopsis orientalis; identical to SEQ ID NO: 1369
  CDS (1)..(1089)

SEQ ID NO: 41305 - protein, 362 aa, Amycolatopsis orientalis; identical to SEQ ID NO: 1370

SEQ ID NO: 41306 - DNA, 1119 bp, Schizosaccharomyces pombe; identical to SEQ ID NO: 1371
  CDS (1)..(1119)

SEQ ID NO: 41307 - protein, 372 aa, Schizosaccharomyces pombe; identical to SEQ ID NO: 1372

SEQ ID NO: 41308 - DNA, 1083 bp, Methylophilus methylotrophus; identical to SEQ ID NO: 1375
  CDS (1)..(1083)

SEQ ID NO: 41309 - protein, 360 aa, Methylophilus methylotrophus; identical to SEQ ID NO: 1376

SEQ ID NO: 41310 - DNA, 1770 bp, Debaryomyces hansenii; identical to SEQ ID NO: 2295
  CDS (1)..(1770)

SEQ ID NO: 41311 - protein, 589 aa, Debaryomyces hansenii; identical to SEQ ID NO: 2296

SEQ ID NO: 41312 - DNA, 1107 bp, Debaryomyces hansenii; identical to SEQ ID NO: 1377
  CDS (1)..(1107)

SEQ ID NO: 41313 - protein, 368 aa, Debaryomyces hansenii; identical to SEQ ID NO: 1378

SEQ ID NO: 41314 - DNA, 1074 bp, Yarrowia lipolytica; identical to SEQ ID NO: 1379
  CDS (1)..(1074)

SEQ ID NO: 41315 - protein, 357 aa, Yarrowia lipolytica; identical to SEQ ID NO: 1380

SEQ ID NO: 41316 - DNA, 1089 bp, Yarrowia lipolytica; identical to SEQ ID NO: 1381
  CDS (1)..(1089)

SEQ ID NO: 41317 - protein, 362 aa, Yarrowia lipolytica; identical to SEQ ID NO: 1382

SEQ ID NO: 41318 - DNA, 1119 bp, Kluyveromyces lactis; identical to SEQ ID NO: 1383
  CDS (1)..(1119)

SEQ ID NO: 41319 - protein, 372 aa, Kluyveromyces lactis; identical to SEQ ID NO: 1384

SEQ ID NO: 41320 - DNA, 1095 bp, Kluyveromyces lactis; identical to SEQ ID NO: 1385
  CDS (1)..(1095)

SEQ ID NO: 41321 - protein, 364 aa, Kluyveromyces lactis; identical to SEQ ID NO: 1386

SEQ ID NO: 41322 - DNA, 1074 bp, Erwinia carotovora subsp; identical to SEQ ID NO: 1387
  CDS (1)..(1074)

SEQ ID NO: 41323 - protein, 357 aa, Erwinia carotovora subsp; identical to SEQ ID NO: 1388

SEQ ID NO: 41324 - DNA, 1047 bp, Erwinia carotovora subsp; identical to SEQ ID NO: 1389
  CDS (1)..(1047)

SEQ ID NO: 41325 - protein, 348 aa, Erwinia carotovora subsp; identical to SEQ ID NO: 1390

SEQ ID NO: 41326 - DNA, 1056 bp, Erwinia carotovora subsp; identical to SEQ ID NO: 1391
  CDS (1)..(1056)

SEQ ID NO: 41327 - protein, 351 aa, Erwinia carotovora subsp; identical to SEQ ID NO: 1392

SEQ ID NO: 41328 - DNA, 1113 bp, Acinetobacter sp; identical to SEQ ID NO: 1393
  CDS (1)..(1113)

SEQ ID NO: 41329 - protein, 370 aa, Acinetobacter sp; identical to SEQ ID NO: 1394

SEQ ID NO: 41330 - DNA, 1056 bp, Acinetobacter sp; identical to SEQ ID NO: 1395
  CDS (1)..(1056)

SEQ ID NO: 41331 - protein, 351 aa, Acinetobacter sp; identical to SEQ ID NO: 1396

SEQ ID NO: 41332 - DNA, 1119 bp, Candida glabrata; identical to SEQ ID NO: 1397
  CDS (1)..(1119)

SEQ ID NO: 41333 - protein, 372 aa, Candida glabrata; identical to SEQ ID NO: 1398

SEQ ID NO: 41334 - DNA, 1071 bp, Candida glabrata; identical to SEQ ID NO: 1399
  CDS (1)..(1071)

SEQ ID NO: 41335 - protein, 356 aa, Candida glabrata; identical to SEQ ID NO: 1400

SEQ ID NO: 41336 - DNA, 1083 bp, Photobacterium profundum; identical to SEQ ID NO: 1401
  CDS (1)..(1083)

SEQ ID NO: 41337 - protein, 360 aa, Photobacterium profundum; identical to SEQ ID NO: 1402

SEQ ID NO: 41338 - DNA, 1053 bp, Photobacterium profundum; identical to SEQ ID NO: 1403
  CDS (1)..(1053)

SEQ ID NO: 41339 - protein, 350 aa, Photobacterium profundum; identical to SEQ ID NO: 1404

SEQ ID NO: 41340 - DNA, 1113 bp, Photobacterium profundum; identical to SEQ ID NO: 1405
  CDS (1)..(1113)

SEQ ID NO: 41341 - protein, 370 aa, Photobacterium profundum; identical to SEQ ID NO: 1406

SEQ ID NO: 41342 - DNA, 1056 bp, Photobacterium profundum; identical to SEQ ID NO: 1407
  CDS (1)..(1056)

SEQ ID NO: 41343 - protein, 351 aa, Photobacterium profundum; identical to SEQ ID NO: 1408

SEQ ID NO: 41344 - DNA, 1092 bp, Parachlamydia sp; identical to SEQ ID NO: 1409
  CDS (1)..(1092)

SEQ ID NO: 41345 - protein, 363 aa, Parachlamydia sp; identical to SEQ ID NO: 1410

SEQ ID NO: 41346 - DNA, 1095 bp, Rhodopseudomonas palustris; identical to SEQ ID NO: 1411
  CDS (1)..(1095)

SEQ ID NO: 41347 - protein, 364 aa, Rhodopseudomonas palustris; identical to SEQ ID NO: 1412

SEQ ID NO: 41348 - DNA, 1100 bp, Amycolatopsis methanolica; identical to SEQ ID NO: 1413
  CDS (1)..(1086)

SEQ ID NO: 41349 - protein, 361 aa, Amycolatopsis methanolica; identical to SEQ ID NO: 1414

SEQ ID NO: 41350 - DNA, 1071 bp, Treponema denticola; identical to SEQ ID NO: 1415
  CDS (1)..(1071)

SEQ ID NO: 41351 - protein, 356 aa, Treponema denticola; identical to SEQ ID NO: 1416

SEQ ID NO: 41352 - DNA, 1068 bp, Geobacter sulfurreducens; identical to SEQ ID NO: 1417
  CDS (1)..(1068)

SEQ ID NO: 41353 - protein, 355 aa, Geobacter sulfurreducens; identical to SEQ ID NO: 1418

SEQ ID NO: 41354 - DNA, 1095 bp, Ashbya gossypii; identical to SEQ ID NO: 1419
  CDS (1)..(1095)

SEQ ID NO: 41355 - protein, 364 aa, Ashbya gossypii; identical to SEQ ID NO: 1420

SEQ ID NO: 41356 - DNA, 1122 bp, Ashbya gossypii; identical to SEQ ID NO: 1421
  CDS (1)..(1122)

SEQ ID NO: 41357 - protein, 373 aa, Ashbya gossypii; identical to SEQ ID NO: 1422

SEQ ID NO: 41358 - DNA, 1098 bp, Amycolatopsis balhimycina; identical to SEQ ID NO: 1423
  CDS (1)..(1098)

SEQ ID NO: 41359 - protein, 365 aa, Amycolatopsis balhimycina; identical to SEQ ID NO: 1424

SEQ ID NO: 41360 - DNA, 1053 bp, Vibrio vulnificus; identical to SEQ ID NO: 2345
  CDS (1)..(1053)

SEQ ID NO: 41361 - protein, 350 aa, Vibrio vulnificus; identical to SEQ ID NO: 2346

SEQ ID NO: 41362 - DNA, 1047 bp, Photorhabdus luminescens; identical to SEQ ID NO: 1427
  CDS (1)..(1047)

SEQ ID NO: 41363 - protein, 348 aa, Photorhabdus luminescens; identical to SEQ ID NO: 1428

SEQ ID NO: 41364 - DNA, 1053 bp, Photorhabdus luminescens; identical to SEQ ID NO: 1429
  CDS (1)..(1053)

SEQ ID NO: 41365 - protein, 350 aa, Photorhabdus luminescens; identical to SEQ ID NO: 1430

SEQ ID NO: 41366 - DNA, 1095 bp, Photorhabdus luminescens; identical to SEQ ID NO: 1431
  CDS (1)..(1095)

SEQ ID NO: 41367 - protein, 364 aa, Photorhabdus luminescens; identical to SEQ ID NO: 1432

SEQ ID NO: 41368 - DNA, 1119 bp, Gloeobacter violaceus; identical to SEQ ID NO: 1433
  CDS (1)..(1119)

SEQ ID NO: 41369 - protein, 372 aa, Gloeobacter violaceus; identical to SEQ ID NO: 1434

SEQ ID NO: 41370 - DNA, 1107 bp, Chromobacterium violaceum; identical to SEQ ID NO: 1435
  CDS (1)..(1107)

SEQ ID NO: 41371 - protein, 368 aa, Chromobacterium violaceum; identical to SEQ ID NO: 1436

SEQ ID NO: 41372 - DNA, 1059 bp, Chromobacterium violaceum; identical to SEQ ID NO: 1437
  CDS (1)..(1059)

SEQ ID NO: 41373 - protein, 352 aa, Chromobacterium violaceum; identical to SEQ ID NO: 1438

SEQ ID NO: 41374 - DNA, 1140 bp, Neurospora crassa; identical to SEQ ID NO: 1439
  CDS (1)..(1140)

SEQ ID NO: 41375 - protein, 379 aa, Neurospora crassa; identical to SEQ ID NO: 1440

SEQ ID NO: 41376 - DNA, 1092 bp, Neurospora crassa; identical to SEQ ID NO: 1441
  CDS (1)..(1092)

SEQ ID NO: 41377 - protein, 363 aa, Neurospora crassa; identical to SEQ ID NO: 1442

SEQ ID NO: 41378 - DNA, 1068 bp, Synechococcus sp; identical to SEQ ID NO: 1443
  CDS (1)..(1068)

SEQ ID NO: 41379 - protein, 355 aa, Synechococcus sp; identical to SEQ ID NO: 1444

SEQ ID NO: 41380 - DNA, 1053 bp, Rhodopirellula baltica; identical to SEQ ID NO: 1445
  CDS (1)..(1053)

SEQ ID NO: 41381 - protein, 350 aa, Rhodopirellula baltica; identical to SEQ ID NO: 1446

SEQ ID NO: 41382 - DNA, 1068 bp, Prochlorococcus marinus subsp; identical to SEQ ID NO: 1447
  CDS (1)..(1068)

SEQ ID NO: 41383 - protein, 355 aa, Prochlorococcus marinus subsp; identical to SEQ ID NO: 1448

SEQ ID NO: 41384 - DNA, 1083 bp, Prochlorococcus marinus; identical to SEQ ID NO: 1449
  CDS (1)..(1083)

SEQ ID NO: 41385 - protein, 360 aa, Prochlorococcus marinus; identical to SEQ ID NO: 1450

SEQ ID NO: 41386 - DNA, 1074 bp, Prochlorococcus marinus; identical to SEQ ID NO: 1451
  CDS (1)..(1074)

SEQ ID NO: 41387 - protein, 357 aa, Prochlorococcus marinus; identical to SEQ ID NO: 1452

SEQ ID NO: 41388 - DNA, 1113 bp, Haemophilus ducreyi; identical to SEQ ID NO: 1453
  CDS (1)..(1113)

SEQ ID NO: 41389 - protein, 370 aa, Haemophilus ducreyi; identical to SEQ ID NO: 1454

SEQ ID NO: 41390 - DNA, 1080 bp, Haemophilus ducreyi; identical to SEQ ID NO: 1455
  CDS (1)..(1080)

SEQ ID NO: 41391 - protein, 359 aa, Haemophilus ducreyi; identical to SEQ ID NO: 1456

SEQ ID NO: 41392 - DNA, 1086 bp, Candidatus Blochmannia floridanus; identical to SEQ ID NO: 1457
  CDS (1)..(1086)

SEQ ID NO: 41393 - protein, 361 aa, Candidatus Blochmannia floridanus; identical to SEQ ID NO: 1458

SEQ ID NO: 41394 - DNA, 1074 bp, Bordetella pertussis; identical to SEQ ID NO: 2379
  CDS (1)..(1074)

SEQ ID NO: 41395 - protein, 357 aa, Bordetella pertussis; identical to SEQ ID NO: 1460

SEQ ID NO: 41396 - DNA, 1119 bp, Bordetella bronchiseptica; identical to SEQ ID NO: 1461
  CDS (1)..(1119)

SEQ ID NO: 41397 - protein, 372 aa, Bordetella bronchiseptica; identical to SEQ ID NO: 1462

SEQ ID NO: 41398 - DNA, 1179 bp, Nitrosomonas europaea; identical to SEQ ID NO: 1463
  CDS (1)..(1179)

SEQ ID NO: 41399 - protein, 392 aa, Nitrosomonas europaea; identical to SEQ ID NO: 1464

SEQ ID NO: 41400 - DNA, 1083 bp, Coxiella burnetii; identical to SEQ ID NO: 1465
  CDS (1)..(1083)

SEQ ID NO: 41401 - protein, 360 aa, Coxiella burnetii; identical to SEQ ID NO: 1466

SEQ ID NO: 41402 - DNA, 1053 bp, Vibrio parahaemolyticus; identical to SEQ ID NO: 1471
  CDS (1)..(1053)

SEQ ID NO: 41403 - protein, 350 aa, Vibrio parahaemolyticus; identical to SEQ ID NO: 1472

SEQ ID NO: 41404 - DNA, 1053 bp, Vibrio parahaemolyticus; identical to SEQ ID NO: 1473
  CDS (1)..(1053)

SEQ ID NO: 41405 - protein, 350 aa, Vibrio parahaemolyticus; identical to SEQ ID NO: 1474

SEQ ID NO: 41406 - DNA, 1074 bp, Vibrio parahaemolyticus; identical to SEQ ID NO: 1475
  CDS (1)..(1074)

SEQ ID NO: 41407 - protein, 357 aa, Vibrio parahaemolyticus; identical to SEQ ID NO: 1476

SEQ ID NO: 41408 - DNA, 1083 bp, Pseudomonas syringae; identical to SEQ ID NO: 1477
  CDS (1)..(1083)

SEQ ID NO: 41409 - protein, 360 aa, Pseudomonas syringae; identical to SEQ ID NO: 1478

SEQ ID NO: 41410 - DNA, 1077 bp, Pseudomonas syringae; identical to SEQ ID NO: 1479
  CDS (1)..(1077)

SEQ ID NO: 41411 - protein, 358 aa, Pseudomonas syringae; identical to SEQ ID NO: 1480

SEQ ID NO: 41412 - DNA, 1062 bp, Pseudomonas putida; identical to SEQ ID NO: 1481
  CDS (1)..(1062)

SEQ ID NO: 41413 - protein, 353 aa, Pseudomonas putida; identical to SEQ ID NO: 1482

SEQ ID NO: 41414 - DNA, 1113 bp, Pseudomonas putida; identical to SEQ ID NO: 1483
  CDS (1)..(1113)

SEQ ID NO: 41415 - protein, 370 aa, Pseudomonas putida; identical to SEQ ID NO: 1484

SEQ ID NO: 41416 - DNA, 1086 bp, Bradyrhizobium japonicum; identical to SEQ ID NO: 1485
  CDS (1)..(1086)

SEQ ID NO: 41417 - protein, 361 aa, Bradyrhizobium japonicum; identical to SEQ ID NO: 1486

SEQ ID NO: 41418 - DNA, 1053 bp, Yersinia pestis; identical to SEQ ID NO: 1487
  CDS (1)..(1053)

SEQ ID NO: 41419 - protein, 350 aa, Yersinia pestis; identical to SEQ ID NO: 1488

SEQ ID NO: 41420 - DNA, 1038 bp, Wigglesworthia glossinidia brevipalpis; identical to SEQ ID NO: 1491
  CDS (1)..(1038)

SEQ ID NO: 41421 - protein, 345 aa, Wigglesworthia glossinidia brevipalpis; identical to SEQ ID NO: 1492

SEQ ID NO: 41422 - DNA, 1071 bp, Vibrio vulnificus; identical to SEQ ID NO: 1739
  CDS (1)..(1071)

SEQ ID NO: 41423 - protein, 356 aa, Vibrio vulnificus; identical to SEQ ID NO: 1740

SEQ ID NO: 41424 - DNA, 1053 bp, Vibrio vulnificus; identical to SEQ ID NO: 1493
  CDS (1)..(1053)

SEQ ID NO: 41425 - protein, 350 aa, Vibrio vulnificus; identical to SEQ ID NO: 1494

SEQ ID NO: 41426 - DNA, 1071 bp, Vibrio vulnificus; identical to SEQ ID NO: 1497
  CDS (1)..(1071)

SEQ ID NO: 41427 - protein, 356 aa, Vibrio vulnificus; identical to SEQ ID NO: 1498

SEQ ID NO: 41428 - DNA, 1062 bp, Synechococcus elongatus; identical to SEQ ID NO: 1499
  CDS (1)..(1062)

SEQ ID NO: 41429 - protein, 353 aa, Synechococcus elongatus; identical to SEQ ID NO: 1500

SEQ ID NO: 41430 - DNA, 1032 bp, Streptococcus mutans; identical to SEQ ID NO: 1501
  CDS (1)..(1032)

SEQ ID NO: 41431 - protein, 343 aa, Streptococcus mutans; identical to SEQ ID NO: 1502

SEQ ID NO: 41432 - DNA, 1035 bp, Streptococcus mutans; identical to SEQ ID NO: 1503
  CDS (1)..(1035)

SEQ ID NO: 41433 - protein, 344 aa, Streptococcus mutans; identical to SEQ ID NO: 1504

SEQ ID NO: 41434 - DNA, 1008 bp, Streptococcus agalactiae; identical to SEQ ID NO: 1505
  CDS (1)..(1008)

SEQ ID NO: 41435 - protein, 335 aa, Streptococcus agalactiae; identical to SEQ ID NO: 1506

SEQ ID NO: 41436 - DNA, 1065 bp, Shewanella oneidensis; identical to SEQ ID NO: 1507
  CDS (1)..(1065)

SEQ ID NO: 41437 - protein, 354 aa, Shewanella oneidensis; identical to SEQ ID NO: 1508

SEQ ID NO: 41438 - DNA, 1092 bp, Shewanella oneidensis; identical to SEQ ID NO: 1509
  CDS (1)..(1092)

SEQ ID NO: 41439 - protein, 363 aa, Shewanella oneidensis; identical to SEQ ID NO: 1510

SEQ ID NO: 41440 - DNA, 1059 bp, Shewanella oneidensis; identical to SEQ ID NO: 1511
  CDS (1)..(1059)

SEQ ID NO: 41441 - protein, 352 aa, Shewanella oneidensis; identical to SEQ ID NO: 1512

SEQ ID NO: 41442 - DNA, 1170 bp, Corynebacterium efficiens; identical to SEQ ID NO: 1515
  CDS (1)..(1170)

SEQ ID NO: 41443 - protein, 389 aa, Corynebacterium efficiens; identical to SEQ ID NO: 1516

SEQ ID NO: 41444 - DNA, 1134 bp, Bifidobacterium longum; identical to SEQ ID NO: 1517
  CDS (1)..(1134)

SEQ ID NO: 41445 - protein, 377 aa, Bifidobacterium longum; identical to SEQ ID NO: 1518

SEQ ID NO: 41446 - DNA, 1233 bp, Bifidobacterium longum; identical to SEQ ID NO: 1519
  CDS (1)..(1233)

SEQ ID NO: 41447 - protein, 410 aa, Bifidobacterium longum; identical to SEQ ID NO: 1520

SEQ ID NO: 41448 - DNA, 1221 bp, Phytophthora infestans; identical to SEQ ID NO: 1521
  CDS (20)..(1153)

SEQ ID NO: 41449 - protein, 377 aa, Phytophthora infestans; identical to SEQ ID NO: 1522

SEQ ID NO: 41450 - DNA, 1062 bp, Chlorobium tepidum; identical to SEQ ID NO: 1523
  CDS (1)..(1062)

SEQ ID NO: 41451 - protein, 353 aa, Chlorobium tepidum; identical to SEQ ID NO: 1524

SEQ ID NO: 41452 - DNA, 1074 bp, Xanthomonas campestris; identical to SEQ ID NO: 1525
  CDS (1)..(1074)

SEQ ID NO: 41453 - protein, 357 aa, Xanthomonas campestris; identical to SEQ ID NO: 1526

SEQ ID NO: 41454 - DNA, 1074 bp, Xanthomonas axonopodis; identical to SEQ ID NO: 1527
  CDS (1)..(1074)

SEQ ID NO: 41455 - protein, 357 aa, Xanthomonas axonopodis; identical to SEQ ID NO: 1528

SEQ ID NO: 41456 - DNA, 1080 bp, Ralstonia solanacearum; identical to SEQ ID NO: 1529
  CDS (1)..(1080)

SEQ ID NO: 41457 - protein, 359 aa, Ralstonia solanacearum; identical to SEQ ID NO: 1530

SEQ ID NO: 41458 - DNA, 1179 bp, Ralstonia solanacearum; identical to SEQ ID NO: 1531
  CDS (1)..(1179)

SEQ ID NO: 41459 - protein, 392 aa, Ralstonia solanacearum; identical to SEQ ID NO: 1532

SEQ ID NO: 41460 - DNA, 1065 bp, Synechococcus sp; identical to SEQ ID NO: 1533
  CDS (1)..(1065)

SEQ ID NO: 41461 - protein, 354 aa, Synechococcus sp; identical to SEQ ID NO: 1534

SEQ ID NO: 41462 - DNA, 1035 bp, Escherichia coli; identical to SEQ ID NO: 1535
  CDS (1)..(1035)

SEQ ID NO: 41463 - protein, 344 aa, Escherichia coli; identical to SEQ ID NO: 1536

SEQ ID NO: 41464 - DNA, 1200 bp, Stigmatella aurantiaca; identical to SEQ ID NO: 1537
  CDS (62)..(1147)

SEQ ID NO: 41465 - protein, 361 aa, Stigmatella aurantiaca; identical to SEQ ID NO: 1538

SEQ ID NO: 41466 - DNA, 1083 bp, Amycolatopsis mediterranei; identical to SEQ ID NO: 1541
  CDS (1)..(1083)

SEQ ID NO: 41467 - protein, 360 aa, Amycolatopsis mediterranei; identical to SEQ ID NO: 1542

SEQ ID NO: 41468 - DNA, 1053 bp, Pasteurella multocida; identical to SEQ ID NO: 1543
  CDS (1)..(1053)

SEQ ID NO: 41469 - protein, 350 aa, Pasteurella multocida; identical to SEQ ID NO: 1544

SEQ ID NO: 41470 - DNA, 1086 bp, Pasteurella multocida; identical to SEQ ID NO: 1545
  CDS (1)..(1086)

SEQ ID NO: 41471 - protein, 361 aa, Pasteurella multocida; identical to SEQ ID NO: 1546

SEQ ID NO: 41472 - DNA, 1125 bp, Emericella nidulans; identical to SEQ ID NO: 1547
  CDS (1)..(1125)

SEQ ID NO: 41473 - protein, 374 aa, Emericella nidulans; identical to SEQ ID NO: 1548

SEQ ID NO: 41474 - DNA, 1089 bp, Emericella nidulans; identical to SEQ ID NO: 1549
  CDS (1)..(1089)

SEQ ID NO: 41475 - protein, 362 aa, Emericella nidulans; identical to SEQ ID NO: 1550

SEQ ID NO: 41476 - DNA, 1239 bp, Vibrio cholerae; identical to SEQ ID NO: 1551
  CDS (114)..(1175)

SEQ ID NO: 41477 - protein, 353 aa, Vibrio cholerae; identical to SEQ ID NO: 1552

SEQ ID NO: 41478 - DNA, 2184 bp, Candida albicans; identical to SEQ ID NO: 1553
  CDS (461)..(1573)

SEQ ID NO: 41479 - protein, 370 aa, Candida albicans; identical to SEQ ID NO: 1554

SEQ ID NO: 41480 - DNA, 1047 bp, Buchnera aphidicola; identical to SEQ ID NO: 1555
  CDS (1)..(1047)

SEQ ID NO: 41481 - protein, 348 aa, Buchnera aphidicola; identical to SEQ ID NO: 1556

SEQ ID NO: 41482 - DNA, 1047 bp, Buchnera aphidicola; identical to SEQ ID NO: 1557
  CDS (1)..(1047)

SEQ ID NO: 41483 - protein, 348 aa, Buchnera aphidicola; identical to SEQ ID NO: 1558

SEQ ID NO: 41484 - DNA, 1047 bp, Erwinia herbicola; identical to SEQ ID NO: 1559
  CDS (1)..(1047)

SEQ ID NO: 41485 - protein, 348 aa, Erwinia herbicola; identical to SEQ ID NO: 1560

SEQ ID NO: 41486 - DNA, 1047 bp, Salmonella typhimurium; identical to SEQ ID NO: 1561
  CDS (1)..(1047)

SEQ ID NO: 41487 - protein, 348 aa, Salmonella typhimurium; identical to SEQ ID NO: 1562

SEQ ID NO: 41488 - DNA, 1047 bp, Shigella flexneri; identical to SEQ ID NO: 2473
  CDS (1)..(1047)

SEQ ID NO: 41489 - protein, 348 aa, Shigella flexneri; identical to SEQ ID NO: 2474

SEQ ID NO: 41490 - DNA, 25 bp, Artificial sequence
  Primer sequence
atgttcattaaaaacgatcacgccg

SEQ ID NO: 41491 - DNA, 25 bp, Artificial sequence
  Primer sequence
ctattttttcaaggcctttcttctg

SEQ ID NO: 41492 - protein, 353 aa, Artificial sequence; identical to SEQ ID NO: 24922
  Consensus
  Variant (2)..(3): Xaa in position 2 to 3 is any amino acid
  Variant (5)..(11): Xaa in position 5 to 11 is any amino acid
  Variant (13)..(24): Xaa in position 13 to 24 is any amino acid
  Variant (26)..(30): Xaa in position 26 to 30 is any amino acid
  Variant (32)..(33): Xaa in position 32 to 33 is any amino acid
  Variant (35)..(35): Xaa in position 35 is any amino acid
  Variant (37)..(37): Xaa in position 37 is any amino acid
  Variant (39)..(46): Xaa in position 39 to 46 is any amino acid
  Variant (51)..(51): Xaa in position 51 is any amino acid
  Variant (54)..(56): Xaa in position 54 to 56 is any amino acid
  Variant (58)..(59): Xaa in position 58 to 59 is any amino acid
  Variant (62)..(63): Xaa in position 62 to 63 is any amino acid
  Variant (65)..(76): Xaa in position 65 to 76 is any amino acid
  Variant (78)..(80): Xaa in position 78 to 80 is any amino acid
  Variant (83)..(83): Xaa in position 83 is any amino acid
  Variant (85)..(85): Xaa in position 85 is any amino acid
  Variant (91)..(93): Xaa in position 91 to 93 is any amino acid
  Variant (100)..(100): Xaa in position 100 is any amino acid
  Variant (103)..(112): Xaa in position 103 to 112 is any amino acid
  Variant (115)..(117): Xaa in position 115 to 117 is any amino acid
  Variant (119)..(119): Xaa in position 119 is any amino acid
  Variant (121)..(130): Xaa in position 121 to 130 is any amino acid
  Variant (132)..(132): Xaa in position 132 is any amino acid
  Variant (134)..(134): Xaa in position 134 is any amino acid
  Variant (136)..(136): Xaa in position 136 is any amino acid
  Variant (139)..(142): Xaa in position 139 to 142 is any amino acid
  Variant (144)..(146): Xaa in position 144 to 146 is any amino acid
  Variant (148)..(152): Xaa in position 148 to 152 is any amino acid
  Variant (163)..(163): Xaa in position 163 is any amino acid
  Variant (166)..(168): Xaa in position 166 to 168 is any amino acid
  Variant (171)..(171): Xaa in position 171 is any amino acid
  Variant (174)..(174): Xaa in position 174 is any amino acid
  Variant (176)..(176): Xaa in position 176 is any amino acid
  Variant (181)..(181): Xaa in position 181 is any amino acid
  Variant (183)..(183): Xaa in position 183 is any amino acid
  Variant (185)..(188): Xaa in position 185 to 188 is any amino acid
  Variant (190)..(191): Xaa in position 190 to 191 is any amino acid
  Variant (193)..(195): Xaa in position 193 to 195 is any amino acid
  Variant (197)..(199): Xaa in position 197 to 199 is any amino acid
  Variant (201)..(201): Xaa in position 201 is any amino acid
  Variant (203)..(208): Xaa in position 203 to 208 is any amino acid
  Variant (210)..(215): Xaa in position 210 to 215 is any amino acid
  Variant (217)..(217): Xaa in position 217 is any amino acid
  Variant (220)..(222): Xaa in position 220 to 222 is any amino acid
  Variant (224)..(225): Xaa in position 224 to 225 is any amino acid
  Variant (230)..(238): Xaa in position 230 to 238 is any amino acid
  Variant (241)..(269): Xaa in position 241 to 269 is any amino acid
  Variant (271)..(271): Xaa in position 271 is any amino acid
  Variant (274)..(274): Xaa in position 274 is any amino acid
  Variant (277)..(277): Xaa in position 277 is any amino acid
  Variant (279)..(282): Xaa in position 279 to 282 is any amino acid
  Variant (284)..(285): Xaa in position 284 to 285 is any amino acid
  Variant (287)..(292): Xaa in position 287 to 292 is any amino acid
  Variant (294)..(296): Xaa in position 294 to 296 is any amino acid
  Variant (298)..(305): Xaa in position 298 to 305 is any amino acid
  Variant (307)..(307): Xaa in position 307 is any amino acid
  Variant (309)..(309): Xaa in position 309 is any amino acid
  Variant (312)..(315): Xaa in position 312 to 315 is any amino acid
  Variant (317)..(317): Xaa in position 317 is any amino acid
  Variant (319)..(334): Xaa in position 319 to 334 is any amino acid
  Variant (337)..(337): Xaa in position 337 is any amino acid
  Variant (339)..(339): Xaa in position 339 is any amino acid
  Variant (342)..(342): Xaa in position 342 is any amino acid
  Variant (344)..(345): Xaa in position 344 to 345 is any amino acid
  Variant (347)..(348): Xaa in position 347 to 348 is any amino acid
  Variant (350)..(352): Xaa in position 350 to 352 is any amino acid

SEQ ID NO: 41493 - protein, 72 aa, Artificial sequence; identical to SEQ ID NO: 2906
  Consensus
  Variant (5)..(5): Xaa in position 5 is Ile, Val, Ser or Leu
  Variant (6)..(6): Xaa in position 6 is His or Asp
  Variant (7)..(7): Xaa in position 7 is Asp or Asn
  Variant (8)..(10): Xaa in position 8 to 10 is any amino acid
  Variant (11)..(11): Xaa in position 11 is Ala, Val or Gly
  Variant (12)..(12): Xaa in position 12 is any amino acid
  Variant (13)..(13): Xaa in position 13 is Glu, Asp, Ala or Gln
  Variant (15)..(15): Xaa in position 15 is Ala, Gly or Cys
  Variant (16)..(17): Xaa in position 16 to 17 is any amino acid
  Variant (18)..(18): Xaa in position 18 is Leu, Ile or Phe
  Variant (19)..(28): Xaa in position 19 to 28 is any amino acid
  Variant (29)..(30): Xaa in position 29 to 30 is any or no amino acid
  Variant (31)..(31): Xaa in position 31 is Leu, Ile, Phe or Met
  Variant (32)..(32): Xaa in position 32 is any amino acid
  Variant (33)..(33): Xaa in position 33 is Ile, Val, Leu or Met
  Variant (34)..(34): Xaa in position 34 is Val, Ile or Leu
  Variant (37)..(37): Xaa in position 37 is Val, Ala or Thr
  Variant (39)..(39): Xaa in position 39 is Phe, Leu, Thr or Val
  Variant (40)..(40): Xaa in position 40 is Glu or Ala
  Variant (45)..(46): Xaa in position 45 to 46 is any amino acid
  Variant (47)..(47): Xaa in position 47 is any or no amino acid
  Variant (49)..(49): Xaa in position 49 is Trp or Tyr
  Variant (50)..(50): Xaa in position 50 is Lys or Arg
  Variant (52)..(52): Xaa in position 52 is Leu, Phe, Met or Tyr
  Variant (53)..(53): Xaa in position 53 is Ile, Val, Ala or Leu
  Variant (54)..(54): Xaa in position 54 is any amino acid
  Variant (55)..(55): Xaa in position 55 is Asp, Glu or Gln
  Variant (57)..(57): Xaa in position 57 is any amino acid
  Variant (58)..(58): Xaa in position 58 is Leu, Met, Ile, Val, Ala or Thr
  Variant (59)..(59): Xaa in position 59 is Asp, Asn or Ser
  Variant (60)..(63): Xaa in position 60 to 63 is any amino acid
  Variant (64)..(64): Xaa in position 64 is Ile, Val, Leu or Met
  Variant (65)..(66): Xaa in position 65 to 66 is any amino acid
  Variant (68)..(68): Xaa in position 68 is Leu, Ile, Met or Val
  Variant (69)..(70): Xaa in position 69 to 70 is any amino acid
  Variant (71)..(71): Xaa in position 71 is Ala, Ser, Gly, Val or Thr

SEQ ID NO: 41494 - protein, 76 aa, Artificial sequence; identical to SEQ ID NO: 2907
  Consensus
  Variant (1)..(1): Xaa in position 1 is Ala or Ser
  Variant (2)..(2): Xaa in position 2 is Ile or Val
  Variant (6)..(6): Xaa in position 6 is Thr, Ser or Asn
  Variant (7)..(7): Xaa in position 7 is Thr, Val, Ala, Ser or Ile
  Variant (8)..(8): Xaa in position 8 is Glu or Ala
  Variant (9)..(9): Xaa in position 9 is Ser, Asp or Asn
  Variant (11)..(11): Xaa in position 11 is any amino acid
  Variant (14)..(14): Xaa in position 14 is Glu, Gln, Phe or Met
  Variant (15)..(15): Xaa in position 15 is Leu, Met, Val, Phe or Ile
  Variant (16)..(16): Xaa in position 16 is Ala, Ser, Thr, Cys or Val
  Variant (18)..(18): Xaa in position 18 is Gly, Ala or Asn
  Variant (19)..(21): Xaa in position 19 to 21 is any amino acid
  Variant (22)..(22): Xaa in position 22 is Pro or Ala
  Variant (23)..(23): Xaa in position 23 is Val, Ile, Thr or Leu
  Variant (25)..(25): Xaa in position 25 is Phe, Met, Tyr or Ile
  Variant (28)..(28): Xaa in position 28 is any amino acid
  Variant (29)..(29): Xaa in position 29 is Thr, Ser or Arg
  Variant (30)..(30): Xaa in position 30 is any amino acid
  Variant (32)..(35): Xaa in position 32 to 35 is any amino acid
  Variant (36)..(36): Xaa in position 36 is Ala or Met
  Variant (37)..(37): Xaa in position 37 is any amino acid
  Variant (38)..(38): Xaa in position 38 is Asp, Asn or Glu
  Variant (39)..(39): Xaa in position 39 is Ala or Gly
  Variant (40)..(41): Xaa in position 40 to 41 is any amino acid
  Variant (42)..(42): Xaa in position 42 is Ala or Ser
  Variant (43)..(43): Xaa in position 43 is Ala, Ser, Val or Thr
  Variant (44)..(46): Xaa in position 44 to 46 is any amino acid
  Variant (47)..(47): Xaa in position 47 is His or Gln
  Variant (48)..(48): Xaa in position 48 is any amino acid
  Variant (49)..(49): Xaa in position 49 is Phe, Tyr, His or Val
  Variant (50)..(51): Xaa in position 50 to 51 is any amino acid
  Variant (52)..(55): Xaa in position 52 to 55 is any or no amino acid
  Variant (57)..(60): Xaa in position 57 to 60 is any amino acid
  Variant (61)..(62): Xaa in position 61 to 62 is any or no amino acid
  Variant (63)..(63): Xaa in position 63 is Thr or Ser
  Variant (64)..(64): Xaa in position 64 is any amino acid
  Variant (67)..(69): Xaa in position 67 to 69 is any amino acid
  Variant (70)..(70): Xaa in position 70 is His or Phe
  Variant (71)..(71): Xaa in position 71 is Val, Ile, Leu or Ala
  Variant (72)..(72): Xaa in position 72 is Ile or Val
  Variant (73)..(73): Xaa in position 73 is Leu or Met
  Variant (76)..(76): Xaa in position 76 is Gly, Ala or Ser

SEQ ID NO: 41495 - protein, 83 aa, Artificial sequence; identical to SEQ ID NO: 2908
  Consensus
  Variant (1)..(1): Xaa in position 1 is Leu, Ile or Val
  Variant (2)..(2): Xaa in position 2 is Met, Val, Ile or Leu
  Variant (3)..(3): Xaa in position 3 is Ile or Val
  Variant (5)..(5): Xaa in position 5 is Cys, Phe, Ala, Thr or Tyr
  Variant (6)..(6): Xaa in position 6 is Ser, Asn or Ala
  Variant (8)..(8): Xaa in position 8 is Gly, Ala or Asp
  Variant (10)..(10): Xaa in position 10 is Ser or Cys
  Variant (11)..(11): Xaa in position 11 is any amino acid
  Variant (13)..(15): Xaa in position 13 to 15 is any amino acid
  Variant (16)..(16): Xaa in position 16 is Arg, Asn, Lys, Leu or Glu
  Variant (18)..(19): Xaa in position 18 to 19 is any amino acid
  Variant (20)..(20): Xaa in position 20 is Val or Ile
  Variant (21)..(26): Xaa in position 21 to 26 is any amino acid
  Variant (27)..(27): Xaa in position 27 is Gln, Asn or Arg
  Variant (28)..(28): Xaa in position 28 is Ile, Leu, Val, Arg or Met
  Variant (29)..(30): Xaa in position 29 to 30 is any amino acid
  Variant (31)..(31): Xaa in position 31 is Gly, Asn or Asp
  Variant (32)..(32): Xaa in position 32 is any amino acid
  Variant (33)..(37): Xaa in position 33 to 37 is any or no amino acid
  Variant (38)..(38): Xaa in position 38 is Ile, Val or Leu
  Variant (39)..(39): Xaa in position 39 is any amino acid
  Variant (41)..(41): Xaa in position 41 is any amino acid
  Variant (43)..(43): Xaa in position 43 is Ile, Leu, Val, Ala or Met
  Variant (46)..(46): Xaa in position 46 is His, Phe, Asn or Tyr
  Variant (47)..(47): Xaa in position 47 is Leu or Ile
  Variant (48)..(49): Xaa in position 48 to 49 is any amino acid
  Variant (51)..(51): Xaa in position 51 is any amino acid
  Variant (53)..(57): Xaa in position 53 to 57 is any amino acid
  Variant (58)..(69): Xaa in position 58 to 69 is any or no amino acid
  Variant (71)..(71): Xaa in position 71 is any amino acid
  Variant (73)..(73): Xaa in position 73 is Ile or Val
  Variant (76)..(76): Xaa in position 76 is any amino acid
  Variant (78)..(78): Xaa in position 78 is Ile, Leu or Val
  Variant (79)..(79): Xaa in position 79 is any amino acid
  Variant (80)..(80): Xaa in position 80 is Trp, Ile, Leu or Phe
  Variant (81)..(82): Xaa in position 81 to 82 is any amino acid
  Variant (83)..(83): Xaa in position 83 is Thr or Ser

SEQ ID NO: 41496 - DNA, 621 bp, Saccharomyces cerevisiae
  CDS (1)..(621)
atgaaggagtcagtccaagagatcatccagcaactcatccacagtgtcgatttacagtcttccaagttccagctggccattgtgtgcacgatgttcaatcctatcttttggaacatcgttgcaagaatggaataccacaagcattctctcaccaagatgtgtggtggggccagaaagggctgttacatgttggcggcgaccatattttcgctaggtatcgtcagagacatggtgtacgagtctgcattgcgtgaacagcctacgtgttctctgatcacgggcgagaactggaccaagctgggtgtggctctctttggtttggggcaagtgcttgttttgagttccatgtacaagctgggtatcacagggacgtacttgggtgactatttcggcatcctgatggatgagagagtcaccggcttccccttcaacgtttccaacaaccccatgtaccagggttccactttgtccttcttgggcatagccctttacaaaggaaagcctgcggggctggttgtttctgccgtagtttacttcatgtacaagatcgctcttcgttgggaagaaccttttactgccatgatctacgctaaccgtgataaggccaaaaagaatatgtaa

SEQ ID NO: 41497 - protein, 206 aa, Saccharomyces cerevisiae
MKESVQEIIQQLIHSVDLQSSKFQLAIVCTMFNPIFWNIVARMEYHKHSLTKMCGGARKGCYMLAATIFSLGIVRDMVYESALREQPTCSLITGENWTKLGVALFGLGQVLVLSSMYKLGITGTYLGDYFGILMDERVTGFPFNVSNNPMYQGSTLSFLGIALYKGKPAGLVVSAVVYFMYKIALRWEEPFTAMIYANRDKAKKNM

SEQ ID NO: 41498 - DNA, 600 bp, Rattus norvegicus
  CDS (1)..(600)
atgagctggctgctgggttacgtggaccccacagagcccagctttgtggcggctgtgctcaccattgtgttcaatccactcttctggaatgtggtagcaaggtgggagcagagaactcgcaagctgagcagagccttcgggtccccttacctagcctgctattccctgggcagcatcatcctgcttctgaacatcctccgctcccactgcttcacacaggccatgatgagccagcccaagatggagggcctggatagccacaccatctacttcctgggccttgcactcctgggctggggactcgtgtttgtgctctccagcttctatgcactggggttcactgggacctttctaggtgactactttgggatcctcaaggagtccagagtgaccacatttcccttcagcgtgctggacaaccccatgtactggggaagtacagccaactacctaggctgggcacttatgcacgccagccctacaggcctgctgttgacggtgctggtggcactcgtctacgtggttgctctcctgtttgaagagcccttcactgcggagatctaccggcggaaagccaccaggttgcacaaaaggagctga

SEQ ID NO: 41499 - protein, 199 aa, Rattus norvegicus
MSWLLGYVDPTEPSFVAAVLTIVFNPLFWNVVARWEQRTRKLSRAFGSPYLACYSLGSIILLLNILRSHCFTQAMMSQPKMEGLDSHTIYFLGLALLGWGLVFVLSSFYALGFTGTFLGDYFGILKESRVTTFPFSVLDNPMYWGSTANYLGWALMHASPTGLLLTVLVALVYVVALLFEEPFTAEIYRRKATRLHKRS

SEQ ID NO: 41500 - DNA, 711 bp, Homo sapiens
  CDS (1)..(711)
atgaagagatctgggaacccgggagccgaggtaacgaacagctcggtggcagggcctgactgctgcggaggcctcggcaatattgattttagacaggcagacttctgcgttatgacccggctgctgggctacgtggaccccctggatcccagctttgtggctgccgtcatcaccatcaccttcaatccgctctactggaatgtggttgcacgatgggaacacaagacccgcaagctgagcagggccttcggatccccctacctggcctgctactctctaagcgtcaccatcctgctcctgaacttcctgcgctcgcactgcttcacgcaggccatgctgagccagcccaggatggagagcctggacacccccgcggcctacagcctgggcctcgcgctcctgggactgggcgtcgtgctcgtgctctccagcttctttgcactggggttcgctggaactttcctaggtgattacttcgggatcctcaaggaggcgagagtgaccgtgttccccttcaacatcctggacaaccccatgtactggggaagcacagccaactacctgggctgggccatcatgcacgccagccccacgggcctgctcctgacggtgctggtggccctcacctacatagtggctctcctatacgaagagcccttcaccgctgagatctaccggcagaaagcctccgggtcccacaagaggagctga

SEQ ID NO: 41501 - protein, 236 aa, Homo sapiens
MKRSGNPGAEVTNSSVAGPDCCGGLGNIDFRQADFCVMTRLLGYVDPLDPSFVAAVITITFNPLYWNVVARWEHKTRKLSRAFGSPYLACYSLSVTILLLNFLRSHCFTQAMLSQPRMESLDTPAAYSLGLALLGLGVVLVLSSFFALGFAGTFLGDYFGILKEARVTVFPFNILDNPMYWGSTANYLGWAIMHASPTGLLLTVLVALTYIVALLYEEPFTAEIYRQKASGSHKRS

SEQ ID NO: 41502 - DNA, 600 bp, Bos taurus
  CDS (1)..(600)
atgacccggctgcttggctacgtggacctctcggaaccccactttgtggctgctgtccttgccattgtcttcaatccgctcttctggaatgtggttgcgagatgggaacacaagacccgaaagctgagcaaggcctttgggtccccccgcctggcctgttacaccctgggtggggccatcctgctcttgaacgtcctgcgctcccactgcttcacgcaggccatgctgagccagccccggatgcagagcctggacaaccccgcggtctaccacgtgggcctggcactcctgggagtgggtggcgtgttcgtcctttccagtttcctggcgctgggcttcaccgggaccttcctaggcgactacttcgggatcctcaaggaggccagagtgaccatgttcccgttcagcgtcctggacaaccccatgtactggggcagcacagccatctacctgggctgggccattgtgcacgccagccccaccggcctgctgctgaccgcgctggtggcgctcatctacatggtcgccatcgtgtatgaagagcccttcactgccgaaatctatcagcagaaagcctcccaggcctacaagaggagctga

SEQ ID NO: 41503 - protein, 199 aa, Bos taurus
MTRLLGYVDLSEPHFVAAVLAIVFNPLFWNVVARWEHKTRKLSKAFGSPRLACYTLGGAILLLNVLRSHCFTQAMLSQPRMQSLDNPAVYHVGLALLGVGGVFVLSSFLALGFTGTFLGDYFGILKEARVTMFPFSVLDNPMYWGSTAIYLGWAIVHASPTGLLLTALVALIYMVAIVYEEPFTAEIYQQKASQAYKRS

SEQ ID NO: 41504 - DNA, 690 bp, Danio rerio
  CDS (1)..(690)
atgagcggagagtcgctgctggacagaaaacccgcaccggactgttgtggaggattcaataacctggagttcagtcagatggacgtgtctgtgctttgggagctgtggagcctcgttgacctgacggagcccaggttttgtgtggccgttattgccattatcttcaatccgttcttctggaatgtggttgcccgatgggagcacaggactcgtggtctgacccgtctgtttggtgggccatatgtggcctgttattcgctggccgtcctaatcctgctgctcaatgtttaccggagccacagcgtgacggtggccatgaagggtcaatctcgctgggatctgctggaaaacctgcaggtttattatgccggagcggctctgatggccgtcggttctctgttggtcatcagcagttttctggccctcggcgtcacaggaacatttctgggggattatttcggcattctgatggatcagaaggtgactggtttcccttttaatgtgatggacaatcccatgtactggggcagcactgcaaactacctgggcctggcattaatgaacgccagtcctatcgggatcgtcctgactgcagtggtggctttgtcttacaaagtagcgatcgcatatgagggaccgttcacacaggagatctacaggcagaggagtcaacgctgcaaacacaaatga

SEQ ID NO: 41505 - protein, 229 aa, Danio rerio
MSGESLLDRKPAPDCCGGFNNLEFSQMDVSVLWELWSLVDLTEPRFCVAVIAIIFNPFFWNVVARWEHRTRGLTRLFGGPYVACYSLAVLILLLNVYRSHSVTVAMKGQSRWDLLENLQVYYAGAALMAVGSLLVISSFLALGVTGTFLGDYFGILMDQKVTGFPFNVMDNPMYWGSTANYLGLALMNASPIGIVLTAVVALSYKVAIAYEGPFTQEIYRQRSQRCKHK

SEQ ID NO: 41506 - DNA, 636 bp, Eremothecium gossypii
  CDS (1)..(636)
atgggtatcaaggatctcaagctcaatgacatgctgctggacgcagtcgcggacatcaatggcgacgatcgcgacttccgcatggcggtgttcttcattgtgttcaacccgttgttctggaacatcgtggcgcaggtcgagtacaagacgcacttcttgacgcggctggccggcggcgcgcggcgcgggtgctacgcgctggcgtttgtgatcttctcgctcgggctggtacgcgactactacttcagtcgcgcgctgaaaaaccaggtcaccacggcgtggctcgaccaggacgcagtgcgctacgcgggcgcggggctgttcgtgttcgggcaggtgctggtcctgtcgtccatgtggcggctgggcgtgacgggcacgtacctgggcgactacttcgggatcttgatggaggaccgcgtgacgtcgttccccttcaatgtctccgacaaccccatgtaccagggctccacgctgacgtttctcgggacgtcgctgtactacggaaaggccgccggcgtgtttgccgcgctgctggtcaacctgatgtataccatggccctgaagctggaggaaccgttcacggccatgatttacgccaagcgcgacgaggagcgcgcccagaaggccaaatag

SEQ ID NO: 41507 - protein, 211 aa, Eremothecium gossypii
MGIKDLKLNDMLLDAVADINGDDRDFRMAVFFIVFNPLFWNIVAQVEYKTHFLTRLAGGARRGCYALAFVIFSLGLVRDYYFSRALKNQVTTAWLDQDAVRYAGAGLFVFGQVLVLSSMWRLGVTGTYLGDYFGILMEDRVTSFPFNVSDNPMYQGSTLTFLGTSLYYGKAAGVFAALLVNLMYTMALKLEEPFTAMIYAKRDEERAQKAK

SEQ ID NO: 41508 - DNA, 600 bp, Sus scrofa
  CDS (1)..(600)
atgaccaggttgctgggctacgtggacccctctgatgcccgcttcgtggctgcggttctcaccatcgctttcaatccactcttctggaatgtggtcgccagatgggaacacaagacccgcaagctgagcagggccttcgggtcaccccgcctggcctgctacaccctgggcggcgccatcctgctcctcaacttactgcgctcccactgcttcacgcaggccatgctgagccagccccagatggagagcctgggcggccccacgggctaccgcctgggcctggcgctcctgggcgtgggcagcgtcttcgtactttccagtttcctggcgctgggcttcaccgggaccttcctaggcgactacttcgggatcctcatggaggcgagagtgacccggttcccgttcagcgtcctggacaaccccatgtactggggcagcacggccgtctacctgggctgggccctcatgcacgccagccccaccggcctgctgctgacgctggtggtggctgccatctacaagctcgccatcctgttcgaggagcccttcaccgccgagatctaccggcagagaggctcccaggcccgcaagagaagctga

SEQ ID NO: 41509 - protein, 199 aa, Sus scrofa
MTRLLGYVDPSDARFVAAVLTIAFNPLFWNVVARWEHKTRKLSRAFGSPRLACYTLGGAILLLNLLRSHCFTQAMLSQPQMESLGGPTGYRLGLALLGVGSVFVLSSFLALGFTGTFLGDYFGILMEARVTRFPFSVLDNPMYWGSTAVYLGWALMHASPTGLLLTLVVAAIYKLAILFEEPFTAEIYRQRGSQARKRS

SEQ ID NO: 41510 - DNA, 645 bp, Neurospora crassa
  CDS (1)..(645)
atgcctctcgtcgccctaggtgtcgccgacctgttcaactttgttgactacagcaagacaagcctcgccatctctgctgctgccattgccttcaaccctaccttctggaacatcgttgcccgcagagaataccgcaccaagttcctcacgcgcgctttcggcggcaatgcccaggtagcctgctacttcctggccgtcaccatcttcggcctcggtcttgtccgcgacttcctctacgaacgcgctctccgtgaccagccctcccacccgctcctcgagggcacctatgtcaaatacgccgcctatgccctccttgccctcggcaaccttctcgtcatcacctctacaatgcgtctgggtatcacgggaaccttccttggtgactactttggcattctgatggatggcattgtcaccggcttccccttcaacgttaccagcgctcccatgtactacggctccaccatgagcttcctcggcaccgctcttctctacggcaagcccgctggtctccttttgactgcctgggttctctttgtgtacataatcgctatccaattcgagaaccccttcactgccgaaatctatgccaagcgcgaccgcgagagggccaaggctgccggtaccagcaagaaggagctttaa

SEQ ID NO: 41511 - protein, 214 aa, Neurospora crassa
MPLVALGVADLFNFVDYSKTSLAISAAAIAFNPTFWNIVARREYRTKFLTRAFGGNAQVACYFLAVTIFGLGLVRDFLYERALRDQPSHPLLEGTYVKYAAYALLALGNLLVITSTMRLGITGTFLGDYFGILMDGIVTGFPFNVTSAPMYYGSTMSFLGTALLYGKPAGLLLTAWVLFVYIIAIQFENPFTAEIYAKRDRERAKAAGTSKKEL

SEQ ID NO: 41512 - DNA, 672 bp, Gibberella zeae PH-1
  CDS (1)..(672)
atgggtatcatggctcttggtccacaagatttcctcgactatgtcaactatgacaagcagagcttgtacatctcagctgcatccattgcctttaacccgctgttctggaatatcgtcgctcgtcaagaataccacaataagcttctgacaaagctctttggtggaaactcccaagttgcctgctatgccctcgccttcaccatcttttctctgggtatggttcgcgacttagttttcaagaatgccatctctgaacaacctacgcatcccgcccttgtcaacgactacatgcgggctgctgctgccactctctttgctgtcggcaatatcttggtcgtctcctcgacttggcgacttggcattactggtacattcctcggtgactactttggctttcttatggatgagatggtgactggctttcccttcaacgtgactggctctcccatgtacactggctctacctgcagtttccttgctacctctctgtggtatggcaagcctgctggtgttctgctcaccatctgggtcgacattgtctacaagctcgccctgagatacgaggatcccttcacttctgagatctacgctaagcgtgagcgtgagcgtgctgcgggctggcacgggaaagctacgcctttcaacaggccgggtgcctctcaacaggcttaa

SEQ ID NO: 41513 - protein, 223 aa, Gibberella zeae PH-1
MGIMALGPQDFLDYVNYDKQSLYISAASIAFNPLFWNIVARQEYHNKLLTKLFGGNSQVACYALAFTIFSLGMVRDLVFKNAISEQPTHPALVNDYMRAAAATLFAVGNILVVSSTWRLGITGTFLGDYFGFLMDEMVTGFPFNVTGSPMYTGSTCSFLATSLWYGKPAGVLLTIWVDIVYKLALRYEDPFTSEIYAKRERERAAGWHGKATPFNRPGASQQA

SEQ ID NO: 41514 - DNA, 714 bp, Ustilago maydis 521
  CDS (1)..(714)
atgtcggccctttttcacaagtcgagcgcatatgtggtgtccaacgtggttgatctgacgcaaccttcgttgtggatcgctgttggaagcatctgctttaacccgctctactggaacattgtggcacagaacgagtaccacaacaagacgatcaccaagttgctcggcggacgacgctacctcggatgctacctgctcgccgtctccattttttcgcttggcattctgcgtgaccatctgtacaacctcgcactcaaggatcagccgacgcatgccttgttgcaacaggcgtgggtcaagcctgtcgctgctctgctctttgcttcgggtaacatctttgtgctttcgtccatgtgggcgctcggtgtcacgggcacctacttgggtgactactttggtatccttatggacagcatcgtcacgggctttcctttcaacgtgatggccaaccccatgtactggggtagctcgatgagcttcaccgcggttgcgctgtggtttggcaaacctgctggactgctgctcagtgtcctggtggtgatcgtctatgcgctcgctctgcgcttcgaggaaccgtttaccgccaacatctacaagcaggccgagaagaagaggagggctgaagccgaaaagcaagcgttgatcgagagtcaaggtcctgcctctggcacgcgcaaccgaagcaaaaggacgccatccaagcccaacgcctaa

SEQ ID NO: 41515 - protein, 237 aa, Ustilago maydis 521
MSALFHKSSAYVVSNVVDLTQPSLWIAVGSICFNPLYWNIVAQNEYHNKTITKLLGGRRYLGCYLLAVSIFSLGILRDHLYNLALKDQPTHALLQQAWVKPVAALLFASGNIFVLSSMWALGVTGTYLGDYFGILMDSIVTGFPFNVMANPMYWGSSMSFTAVALWFGKPAGLLLSVLVVIVYALALRFEEPFTANIYKQAEKKRRAEAEKQALIESQGPASGTRNRSKRTPSKPNA

SEQ ID NO: 41516 - DNA, 654 bp, Candida glabrata CBS138
  CDS (1)..(654)
atgtttggtgctgactttgtagaggataaagttatccagtttgagaatttcgttgaagggctaatgtactctgtggattacgatgctccatacttctactctgcgttacttttcattatatttaacccattgttttggaatatagtggcaaggctggaataccacacacatttcctaaccaagattgctggttcgccaaagagaggctgttatttccttgcagccaccatattttctctaggtattgctagagatttgacatttgaaaaggcattgagacatcaagaagtctccccattgttagacaccccaaaaatcacaaatatcgggtacgcgtttttaattgtgggccaaatactagtgatttcctcaatgtaccagttgggtatcacgggtacttacttgggtgactatttcggtattttaatgaatgacagagtaacagcttttccatttaatgtttccaataacccaatgtaccaaggttctacattttctttcatcggtacttcgctaattgctggtaaaccagcaggattgattttggcattctttgtacatgccatgtactacatggctctaaagtttgaggaaccatttacagctgaaatctatgcaaagcgtgatgaggagaaaaagtctaagaaacaataa

SEQ ID NO: 41517 - protein, 217 aa, Candida glabrata CBS138
MFGADFVEDKVIQFENFVEGLMYSVDYDAPYFYSALLFIIFNPLFWNIVARLEYHTHFLTKIAGSPKRGCYFLAATIFSLGIARDLTFEKALRHQEVSPLLDTPKITNIGYAFLIVGQILVISSMYQLGITGTYLGDYFGILMNDRVTAFPFNVSNNPMYQGSTFSFIGTSLIAGKPAGLILAFFVHAMYYMALKFEEPFTAEIYAKRDEEKKSKKQ

SEQ ID NO: 41518 - DNA, 657 bp, Kluyveromyces lactis NRRL Y-1140
  CDS (1)..(657)
atggatatcgaaacttatattaccaatcagttttctcttttcaagagattctgtgatgaaatcgtcacactaaccaatttcgaatctagagagtatacaatcgctctaggtttgattgcgttcaacccaatcttctggaacgtcgttgccagattggaacacagcacccatttcttgactaagatcgctggttccgctaagagaggatgttatttcctagcagctacaattttctccttgggtatcatcagagactatttctatgaatctgcattgcgccaacaaccagtcagtgccatgatgactggtgacaaatttacctatgtcggtatcgcatatatcgcatttggtcaattgctggttttaagctctatgtaccagttggggatcaccggtacttatctaggtgattatttcggtattctaatggaccaccgtgtgaccagcttcccattcaactatttcgataatccaatgtaccaaggttctactttcactttccttggttacgcattgtacaacggtaaacctgctggtttgattgccactttggttgttcacgtgatgtacaacatcgcattaagattcgaagagccattcactgccaagatttatgccaagcgtgcagctgaagatgctaacaagaagggcaattga

SEQ ID NO: 41519 - protein, 218 aa, Kluyveromyces lactis NRRL Y-1140
MDIETYITNQFSLFKRFCDEIVTLTNFESREYTIALGLIAFNPIFWNVVARLEHSTHFLTKIAGSAKRGCYFLAATIFSLGIIRDYFYESALRQQPVSAMMTGDKFTYVGIAYIAFGQLLVLSSMYQLGITGTYLGDYFGILMDHRVTSFPFNYFDNPMYQGSTFTFLGYALYNGKPAGLIATLVVHVMYNIALRFEEPFTAKIYAKRAAEDANKKGN

SEQ ID NO: 41520 - DNA, 627 bp, Debaryomyces hansenii CBS767
  CDS (1)..(627)
atgaattttagtgacgtacaacacttagttggaaattttagtgattacattgtggtcaattgtgaaattaagtacgcaattgcatgcattgcctttaatcctattttctggaacattgttgcaagaaccgaatataaaacacatttccttaccaaaataactggatctgctaaagtcggatgctatttgttggcattgaccattttcagtttagggatttacagggataatgtataccatcaagcattgctcaatcaaccaacttacggccctctcttgaagtccaaccttgtcaaggccttagccataggtactttcggctttggaaatgtcttggtcttatcatctatgtatgtgttgggtgttacaggtacataccttggggattactttgggatcttgatggacgatcgtgttacaggattcccatttaacattaacgacaatcctatgtacaatggatccacattatgtttcttgggtactgctttatggtacggtaaaccaaccggtattgctattgctggatttgtatatgtcatgtacaaaatagccttattttttgaagagccatttactgcaaagatttacgccaacagagacaagcaatccaagaaagtacaatag

SEQ ID NO: 41521 - protein, 208 aa, Debaryomyces hansenii CBS767
MNFSDVQHLVGNFSDYIVVNCEIKYAIACIAFNPIFWNIVARTEYKTHFLTKITGSAKVGCYLLALTIFSLGIYRDNVYHQALLNQPTYGPLLKSNLVKALAIGTFGFGNVLVLSSMYVLGVTGTYLGDYFGILMDDRVTGFPFNINDNPMYNGSTLCFLGTALWYGKPTGIAIAGFVYVMYKIALFFEEPFTAKIYANRDKQSKKVQ

SEQ ID NO: 41522 - DNA, 630 bp, Yarrowia lipolytica CLIB99
  CDS (1)..(630)
tcccctagccaccgatctagcaccccacgccagggccacaaccctcccttaaacataactaacacagtcgtcctgggctccatcgccttcaaccccatcttttggaacattgttgctcgagccgagtacaacacccactttctgactaagctggctggaggagccaagaccggatgctatctgctggccatcaccattttctcgctcggtatcttccgagactacctttaccaccaggctcttgagcagcagcccacctccattctgctgtcggtcacttacgttgacattgtcaagcctctggccattgtgctgtttgctgttggcaacgtgctggtccttacctccatgtacgccctgggcgtcaccggaacctacctcggcgactactttggcattctcatgaacgagcgagtcaccggcttccccttcaatgtgtccaacaaccccatgtaccacggctccactctgtgtttcctggcttccgctctgtggtacgccaagcccgcaggcctgctcatcaccgcctttgtgtcgctcatgtactccattgctctcaagttcgaggaacccttcaccggtgagatctacgctaagcgagaccgggagctcgctgccaagcagaagtaa

SEQ ID NO: 41523 - protein, 209 aa, Yarrowia lipolytica CLIB99
SPSHRSSTPRQGHNPPLNITNTVVLGSIAFNPIFWNIVARAEYNTHFLTKLAGGAKTGCYLLAITIFSLGIFRDYLYHQALEQQPTSILLSVTYVDIVKPLAIVLFAVGNVLVLTSMYALGVTGTYLGDYFGILMNERVTGFPFNVSNNPMYHGSTLCFLASALWYAKPAGLLITAFVSLMYSIALKFEEPFTGEIYAKRDRELAAKQK

SEQ ID NO: 41524 - DNA, 732 bp, Gallus gallus
  CDS (1)..(732)
atggcggggaggcccaggccgggaggcgagcgggggcaggcaggaggccggcggggagcggggttgcggtggtggccgcgggattgctgcagcgggctgggcggcctggattacagcgaggtggatgtgacagccatggcgcggctcttcagctatgtggatatgactgattctggcttcattgcagccgtcctctctatcgccttcaacccattcttctggaatgtggtagcaagatgggagcacaaaacgcgggcactcagccgaggcttcggctctccacacaccgcctgctactgcctgggcgctgttatcctgctgctcaactgcgtgtgcagccactgcttcacagaagccatgaagagccagccgaagctggagggcttggacagccactgggcctattactcaggcttggccatcatggctgtagggaccttgtttgtcatctccagcttcttagcactgggattcaccgggaccttcctaggggattactttggcatcctgatggaggcgaaagtgacctgtttccccttcagcatcctggataaccccatgtactggggcagcacggccgtctacctgggctggtccctcatgcatgcgagcccagctggccttttgctgacagctgtagtggcaatttcctacacaattgcagtgctgtacgaggggcctttcacagaggaaatctaccgtcagaaacagaagggagcaaagagcaattag

SEQ ID NO: 41525 - protein, 243 aa, Gallus gallus
MAGRPRPGGERGQAGGRRGAGLRWWPRDCCSGLGGLDYSEVDVTAMARLFSYVDMTDSGFIAAVLSIAFNPFFWNVVARWEHKTRALSRGFGSPHTACYCLGAVILLLNCVCSHCFTEAMKSQPKLEGLDSHWAYYSGLAIMAVGTLFVISSFLALGFTGTFLGDYFGILMEAKVTCFPFSILDNPMYWGSTAVYLGWSLMHASPAGLLLTAVVAISYTIAVLYEGPFTEEIYRQKQKGAKSN

SEQ ID NO: 41526 - DNA, 612 bp, Xenopus laevis
  CDS (1)..(612)
atggcagacgtgctgcagtacgtggtgctgacggacttccattttcttgttgctttgctctgtatagtcttcaatcctttgttctggaatgtggttgcaagatgggagtaccggactcacaccatcactaggctgtttgggtctccgtacattgggtgctacagtttgggtgtagtcattattttccttgccgtcctacggagtcactgttttacagaagccatgaagaatcagtcccatctaggggcgctggagaacactggcgtttattacctgagctggatgttgattggcgcaggcggagtgctggtggtttccagtttcctggcactgggttttgtcggaacctatttgggagactactttgggattttaatggaaaagaaggtgaccggcttcccttttaacatcatggaaaatccgatgtactggggcagcactgccaactacctgggactggccctcttgaactccagtcccgccggcctcgtcctcacagcggtggtggctctgtgctacaaggtggccattttgtatgaggggccttttacagtggaaatctaccgcaagaaagattctgcaaagaagaaaaaaccagggaaactgcaatga

SEQ ID NO: 41527 - protein, 203 aa, Xenopus laevis
MADVLQYVVLTDFHFLVALLCIVFNPLFWNVVARWEYRTHTITRLFGSPYIGCYSLGVVIIFLAVLRSHCFTEAMKNQSHLGALENTGVYYLSWMLIGAGGVLVVSSFLALGFVGTYLGDYFGILMEKKVTGFPFNIMENPMYWGSTANYLGLALLNSSPAGLVLTAVVALCYKVAILYEGPFTVEIYRKKDSAKKKKPGKLQ

SEQ ID NO: 41528 - DNA, 597 bp, Xenopus tropicalis
  CDS (1)..(597)
atggcagaactgttggagtacgtggtgctgacggacacccgttttctcattgctttactctgtatagtcttcaatcctttgttctggaatttggttgccagatgggagtatcggacccacaccatcactaggctatttggctctccgtacattgggtgctacagtctgggcgtagtcattatttccttagccgtcctacggagtcactgttttacagaagccatgaagactcagccccacataggggcgctggagagcactggtgtctattacctgagctggatgttgattggtgctggaggggtgttggtggtttccagttttctggcgctgggttttgttggaacctatttgggagactattttggaattttaatggaaaagaaggtgaccggcttcccatttaacgtcatggagaatccgatgtactggggcagcactgcaaactacctgggattggccctcttgaacgccagtcctgccggcctcctcctcacagccctggtggctctgtgttacaaggtggccattttgtatgagggaccttttaccgaggaaatctaccgcaagaaagagacagcaaagaagcgaaaatga

SEQ ID NO: 41529 - protein, 198 aa, Xenopus tropicalis
MAELLEYVVLTDTRFLIALLCIVFNPLFWNLVARWEYRTHTITRLFGSPYIGCYSLGVVIISLAVLRSHCFTEAMKTQPHIGALESTGVYYLSWMLIGAGGVLVVSSFLALGFVGTYLGDYFGILMEKKVTGFPFNVMENPMYWGSTANYLGLALLNASPAGLLLTALVALCYKVAILYEGPFTEEIYRKKETAKKRK

SEQ ID NO: 41530 - DNA, 600 bp, Homo sapiens
  CDS (1)..(600)
atgacccggctgctgggctacgtggaccccctggatcccagctttgtggctgccgtcatcaccatcaccttcaatccgctctactggaatgtggttgcacgatgggaacacaagacccgcaagctgagcagggccttcggatccccctacctggcctgctactctctaagcgtcaccatcctgctcctgaacttcctgcgctcgcactgcttcacgcaggccatgctgagccagcccaggatggagagcctggacacccccgcggcctacagcctgggcctcgcgctcctgggactgggcgtcgtgctcgtgctctccagcttctttgcactggggttcgctggaactttcctaggtgattacttcgggatcctcaaggaggcgagagtgaccgtgttccccttcaacatcctggacaaccccatgtactggggaagcacagccaactacctgggctgggccatcatgcacgccacgcccacgggcctgctcctgacggtgctgatggccctcacctacatagtggctctcctatacgaagagcccttcaccgctgagatctaccggcagaaagcctccgggtcccacaagaggagctga

SEQ ID NO: 41531 - protein, 199 aa, Homo sapiens [sequence omitted]

SEQ ID NO: 41532 - DNA, 612 bp, Mus musculus
  CDS (1)..(612)
atgagctggctgctgggttacatggaccccacagagcccagctttgtggcggctgtgatcaccattgtgttcaacccactcttctggaatgtggtagcgagatgggagcagagaactcggaagctgagcagagccttcggctccccccacctagcctgctattccctgggcatctgcatcctgcttttgaacatcctccgctcccactgcttcacacaggctatgatgagccagcccaagatggagggcctggacaaccacaccacctacttcctgggccttgcattcctaggttggggattcgtgtttgtgctgtccagcttctatgcactggggttcactgggacctttctaggtgactactttgggatcctcaaggagtccagagtgaccacatttcccttcagcgtgctggataaccccatgtactggggcagtacagccaactacctaggctgggcactcatgcatgctagtcccacaggcctgctgttgacggtgctggtggcaattgtctacgtggttgctctcctatatgaagagcccttcactgctgagatctaccgacagaaagctaccaggtttgcacaaaagaagctgacagggccatga

SEQ ID NO: 41533 - protein, 203 aa, Mus musculus
MSWLLGYMDPTEPSFVAAVITIVFNPLFWNVVARWEQRTRKLSRAFGSPHLACYSLGICILLLNILRSHCFTQAMMSQPKMEGLDNHTTYFLGLAFLGWGFVFVLSSFYALGFTGTFLGDYFGILKESRVTTFPFSVLDNPMYWGSTANYLGWALMHASPTGLLLTVLVAIVYVVALLYEEPFTAEIYRQKATRFAQKKLTGP

SEQ ID NO: 41534 - DNA, 711 bp, Homo sapiens
  CDS (1)..(711)
atgaagagatctgggaacccgggagccgaggtaacgaacagctcggtggcagggcctgactgctgcggaggcctcggcaatattgattttagacaggcagacttctgcgttatgacccggctgctgggctacgtggaccccctggatcccagctttgtggctgccgtcatcaccatcaccttcaatccgctctactggaatgtggttgcacgatgggaacacaagacccgcaagctgagcagggccttcggatccccctacctggcctgctactctctaagcatcaccatcctgctcctgaacttcctgcgctcgcactgcttcacgcaggccatgctgagccagcccaggatggagagcctggacacccccgcggcctacagcctgggcctcgcgctcctgggactgggcgtcgtgctcgtgctctccagcttctttgcactggggttcgctggaactttcctaggtgattacttcgggatcctcaaggaggcgagagtgaccgtgttccccttcaacatcctggacaaccccatgtactggggaagcacagccaactacctgggctgggccatcatgcacgccagccccacgggcctgctcctgacggtgctggtggccctcacctacataatggctctcctatacgaagagcccttcaccgctgagatctaccggcagaaagcctccgggtcccacaagaggagctga

SEQ ID NO: 41535 - protein, 236 aa, Homo sapiens [sequence omitted]

SEQ ID NO: 41536 - DNA, 666 bp, Schizosaccharomyces pombe
  CDS (1)..(666)
atgagcttgattctttaccccaaaccaacttcgtatttatatcaaccttttataaaagcatatttttcgctaaacatggccatttttgaaatcaataattcttttttaatttgtgctgtatctattgctttgaaccctctgctatggaatattgctgcacgttcagaatacaatcataagactttgaccaaattggcaaatggcgactctaagaaggcctgttacatgctagcagcttgtatttttgttgccggaatagttcgtgacttaatttatcagaatgctttaaaacaacaacctacgctaggtatcttcatgaaccctcttgtgcagggtatagctaagctcattttttgttttggcagcgtccttgtcttatcgagtatgtataagctaggacttgttggtacatatcttggtgattactttggatttctgcttccagagcgtgtttctggtttcccatttaatgtcaacgataacccaatgtacaacggttctactctttgtttcctttctacagctctgcgttatggaaaagttgctggcctccttttaactttggaagtctttttcgtttatagaatagctttgaaatttgaagaaccttttactgctaaaatttacgctgctcgtgatagcaagcaagctaaaaaatccgagtga

SEQ ID NO: 41537 - protein, 221 aa, Schizosaccharomyces pombe
MSLILYPKPTSYLYQPFIKAYFSLNMAIFEINNSFLICAVSIALNPLLWNIAARSEYNHKTLTKLANGDSKKACYMLAACIFVAGIVRDLIYQNALKQQPTLGIFMNPLVQGIAKLIFCFGSVLVLSSMYKLGLVGTYLGDYFGFLLPERVSGFPFNVNDNPMYNGSTLCFLSTALRYGKVAGLLLTLEVFFVYRIALKFEEPFTAKIYAARDSKQAKKSE

SEQ ID NO: 41538 - DNA, 24 bp, Artificial sequence
  Primer sequence
atgaaggagtcagtccaagagatc

SEQ ID NO: 41539 - DNA, 26 bp, Artificial sequence
  Primer sequence
ttacatattctttttggccttatcac

SEQ ID NO: 41540 - protein, 192 aa, Artificial sequence
  Consensus
  Variant (2)..(4): Xaa in position 2 to 4 is any amino acid
  Variant (6)..(14): Xaa in position 6 to 14 is any amino acid
  Variant (17)..(18): Xaa in position 17 to 18 is any amino acid
  Variant (20)..(20): Xaa in position 20 is any amino acid
  Variant (32)..(32): Xaa in position 32 is any amino acid
  Variant (35)..(35): Xaa in position 35 is any amino acid
  Variant (37)..(38): Xaa in position 37 to 38 is any amino acid
  Variant (42)..(43): Xaa in position 42 to 43 is any amino acid
  Variant (45)..(48): Xaa in position 45 to 48 is any amino acid
  Variant (49)..(49): Xaa in position 49 is any or no amino acid
  Variant (53)..(53): Xaa in position 53 is any amino acid
  Variant (56)..(57): Xaa in position 56 to 57 is any amino acid
  Variant (59)..(60): Xaa in position 59 to 60 is any amino acid
  Variant (62)..(62): Xaa in position 62 is any amino acid
  Variant (66)..(68): Xaa in position 66 to 68 is any amino acid
  Variant (70)..(71): Xaa in position 70 to 71 is any amino acid
  Variant (74)..(75): Xaa in position 74 to 75 is any amino acid
  Variant (78)..(81): Xaa in position 78 to 81 is any amino acid
  Variant (82)..(84): Xaa in position 82 to 84 is any or no amino acid
  Variant (86)..(93): Xaa in position 86 to 93 is any amino acid
  Variant (95)..(96): Xaa in position 95 to 96 is any amino acid
  Variant (98)..(98): Xaa in position 98 is any amino acid
  Variant (100)..(100): Xaa in position 100 is any amino acid
  Variant (102)..(102): Xaa in position 102 is any amino acid
  Variant (104)..(104): Xaa in position 104 is any amino acid
  Variant (109)..(111): Xaa in position 109 to 111 is any amino acid
  Variant (114)..(115): Xaa in position 114 to 115 is any amino acid
  Variant (127)..(127): Xaa in position 127 is any amino acid
  Variant (129)..(129): Xaa in position 129 is any amino acid
  Variant (133)..(133): Xaa in position 133 is any amino acid
  Variant (137)..(137): Xaa in position 137 is any amino acid
  Variant (139)..(140): Xaa in position 139 to 140 is any amino acid
  Variant (145)..(145): Xaa in position 145 is any amino acid
  Variant (149)..(150): Xaa in position 149 to 150 is any amino acid
  Variant (154)..(154): Xaa in position 154 is any amino acid
  Variant (157)..(158): Xaa in position 157 to 158 is any amino acid
  Variant (160)..(160): Xaa in position 160 is any amino acid
  Variant (162)..(162): Xaa in position 162 is any amino acid
  Variant (168)..(169): Xaa in position 168 to 169 is any amino acid
  Variant (171)..(173): Xaa in position 171 to 173 is any amino acid
  Variant (175)..(175): Xaa in position 175 is any amino acid
  Variant (179)..(179): Xaa in position 179 is any amino acid
  Variant (182)..(182): Xaa in position 182 is any amino acid
  Variant (186)..(187): Xaa in position 186 to 187 is any amino acid
  Variant (190)..(191): Xaa in position 190 to 191 is any amino acid
LXXXVXXXXXXXXXAVXXIXFNPLFWNVVARXEYXTXXLTRXXGXXXXXACYXLAXXIXXLXILRXXXFXXAMXXQPXXXXXXXLXXXXXXXXGXXLXGXGXVXVLSSXXXLGXXGTFLGDYFGILXEXRVTXFPFXVXXNPMYXGSTXXYLGXALXXAXPXGLLLTXXVXXXYXVALXYEXPFTXXIYXXR

SEQ ID NO: 41541 - protein, 21 aa, Artificial sequence
  Consensus
  Variant (2)..(2): Xaa in position 2 is any amino acid
  Variant (6)..(6): Xaa in position 6 is any amino acid
  Variant (7)..(7): Xaa in position 7 is Phe or Tyr
  Variant (10)..(10): Xaa in position 10 is Ile, Leu or Val
  Variant (14)..(14): Xaa in position 14 is any amino acid
  Variant (16)..(17): Xaa in position 16 to 17 is any amino acid
  Variant (18)..(18): Xaa in position 18 is Asn or Thr
  Variant (19)..(19): Xaa in position 19 is His, Lys or Arg
  Variant (20)..(20): Xaa in position 20 is any amino acid
  Variant (21)..(21): Xaa in position 21 is Ile or Leu
IXFNPXXWNXVARXEXXXXXX

SEQ ID NO: 41542 - protein, 26 aa, Artificial sequence
  Consensus
  Variant (3)..(3): Xaa in position 3 is any amino acid
  Variant (5)..(5): Xaa in position 5 is Ala, Gly or Ser
  Variant (6)..(6): Xaa in position 6 is any amino acid
  Variant (7)..(7): Xaa in position 7 is Ala, Cys, Ser, Thr or Val
  Variant (9)..(9): Xaa in position 9 is Phe, Ile or Leu
  Variant (10)..(10): Xaa in position 10 is any amino acid
  Variant (12)..(12): Xaa in position 12 is Ala, Gly or Asn
  Variant (13)..(13): Xaa in position 13 is Phe, Ile, Leu, Met or Val
  Variant (14)..(14): Xaa in position 14 is any amino acid
  Variant (16)..(16): Xaa in position 16 is Asp or Ser
  Variant (17)..(18): Xaa in position 17 to 18 is any amino acid
  Variant (19)..(19): Xaa in position 19 is Phe or Tyr
  Variant (20)..(21): Xaa in position 20 to 21 is any amino acid
  Variant (23)..(23): Xaa in position 23 is Ile, Leu or Met
  Variant (24)..(25): Xaa in position 24 to 25 is any amino acid
CYXLXXXIXXLXXXRXXXXXXAXXXQ

SEQ ID NO: 41543 - protein, 47 aa, Artificial sequence
  Consensus
  Variant (2)..(4): Xaa in position 2 to 4 is any amino acid
  Variant (6)..(6): Xaa in position 6 is Ile, Leu or Val
  Variant (9)..(9): Xaa in position 9 is Phe or Met
  Variant (10)..(11): Xaa in position 10 to 11 is any amino acid
  Variant (14)..(14): Xaa in position 14 is Phe, Ile or Val
  Variant (15)..(15): Xaa in position 15 is Ala, Thr or Val
  Variant (18)..(18): Xaa in position 18 is Phe or Tyr
  Variant (27)..(27): Xaa in position 27 is any amino acid
  Variant (28)..(28): Xaa in position 28 is Asp, Glu or Asn
  Variant (29)..(30): Xaa in position 29 to 30 is any amino acid
  Variant (33)..(33): Xaa in position 33 is any amino acid
  Variant (37)..(37): Xaa in position 37 is Asn or Ser
  Variant (38)..(39): Xaa in position 38 to 39 is any amino acid
  Variant (40)..(40): Xaa in position 40 is Ala, Asp, Glu or Asn
  Variant (45)..(45): Xaa in position 45 is any amino acid
GXXXVXSSXXXLGXXGTXLGDYFGILXXXXVTXFPFXXXXNPMYXGS

SEQ ID NO: 41544 - protein, 29 aa, Artificial sequence
  Consensus
  Variant (3)..(5): Xaa in position 3 to 5 is any amino acid
  Variant (6)..(7): Xaa in position 6 to 7 is any or no amino acid
  Variant (9)..(11): Xaa in position 9 to 11 is any amino acid
  Variant (12)..(13): Xaa in position 12 to 13 is any or no amino acid
  Variant (15)..(15): Xaa in position 15 is any amino acid
  Variant (16)..(16): Xaa in position 16 is Ile, Leu, Met or Val
  Variant (18)..(18): Xaa in position 18 is Ile, Leu or Val
  Variant (19)..(19): Xaa in position 19 is any amino acid
  Variant (20)..(20): Xaa in position 20 is Phe, Trp or Tyr
  Variant (22)..(22): Xaa in position 22 is Glu, Gly or Asn
  Variant (26)..(27): Xaa in position 26 to 27 is any amino acid
GLXXXXXVXXXXXYXXAXXXEXPFTXXIY

SEQ ID NO: 41545 - DNA, 1518 bp, Saccharomyces cerevisiae; identical to SEQ ID NO: 2533
  CDS (1)..(1518)

SEQ ID NO: 41546 - protein, 505 aa, Saccharomyces cerevisiae; identical to SEQ ID NO: 2534

SEQ ID NO: 41547 - DNA, 1548 bp, Mus musculus (house mouse); identical to SEQ ID NO: 2535
  CDS (1)..(1548)

SEQ ID NO: 41548 - protein, 515 aa, Mus musculus (house mouse); identical to SEQ ID NO: 2536

SEQ ID NO: 41549 - DNA, 1593 bp, Fugu rubripes (Japanese pufferfish); identical to SEQ ID NO: 2537
  CDS (1)..(1593)

SEQ ID NO: 41550 - protein, 530 aa, Fugu rubripes (Japanese pufferfish); identical to SEQ ID NO: 2538

SEQ ID NO: 41551 - DNA, 1506 bp, Vibrio cholerae; identical to SEQ ID NO: 2539
  CDS (1)..(1506)

SEQ ID NO: 41552 - protein, 501 aa, Vibrio cholerae; identical to SEQ ID NO: 2540

SEQ ID NO: 41553 - DNA, 1470 bp, Pseudomonas aeruginosa; identical to SEQ ID NO: 2541
  CDS (1)..(1470)

SEQ ID NO: 41554 - protein, 489 aa, Pseudomonas aeruginosa; identical to SEQ ID NO: 2542

SEQ ID NO: 41555 - DNA, 1485 bp, Staphylococcus aureus; identical to SEQ ID NO: 2543
  CDS (1)..(1485)

SEQ ID NO: 41556 - protein, 494 aa, Staphylococcus aureus; identical to SEQ ID NO: 2544

SEQ ID NO: 41557 - DNA, 1488 bp, Streptococcus pneumoniae; identical to SEQ ID NO: 2545
  CDS (1)..(1488)

SEQ ID NO: 41558 - protein, 495 aa, Streptococcus pneumoniae; identical to SEQ ID NO: 2546

SEQ ID NO: 41559 - DNA, 1476 bp, Salmonella enterica subsp. enterica serovar Typhi; identical to SEQ ID NO: 2547
  CDS (1)..(1476)

SEQ ID NO: 41560 - protein, 491 aa, Salmonella enterica subsp. enterica serovar Typhi; identical to SEQ ID NO: 2548

SEQ ID NO: 41561 - DNA, 1476 bp, Agrobacterium tumefaciens; identical to SEQ ID NO: 2549
  CDS (1)..(1476)

SEQ ID NO: 41562 - protein, 491 aa, Agrobacterium tumefaciens; identical to SEQ ID NO: 2550

SEQ ID NO: 41563 - DNA, 1530 bp, Nostoc sp. PCC 7120; identical to SEQ ID NO: 2551
  CDS (1)..(1530)

SEQ ID NO: 41564 - protein, 509 aa, Nostoc sp. PCC 7120; identical to SEQ ID NO: 2552

SEQ ID NO: 41565 - DNA, 1386 bp, Agrobacterium tumefaciens; identical to SEQ ID NO: 2553
  CDS (1)..(1386)

SEQ ID NO: 41566 - protein, 461 aa, Agrobacterium tumefaciens; identical to SEQ ID NO: 2554

SEQ ID NO: 41567 - DNA, 1476 bp, Brucella melitensis; identical to SEQ ID NO: 2555
  CDS (1)..(1476)

SEQ ID NO: 41568 - protein, 491 aa, Brucella melitensis; identical to SEQ ID NO: 2556

SEQ ID NO: 41569 - DNA, 1458 bp, Zymomonas mobilis; identical to SEQ ID NO: 2557
  CDS (1)..(1458)

SEQ ID NO: 41570 - protein, 485 aa, Zymomonas mobilis; identical to SEQ ID NO: 2558

SEQ ID NO: 41571 - DNA, 1470 bp, Bacillus subtilis; identical to SEQ ID NO: 2559
  CDS (1)..(1470)

SEQ ID NO: 41572 - protein, 489 aa, Bacillus subtilis; identical to SEQ ID NO: 2560

SEQ ID NO: 41573 - DNA, 1401 bp, Mycobacterium tuberculosis; identical to SEQ ID NO: 2561
  CDS (1)..(1401)

SEQ ID NO: 41574 - protein, 466 aa, Mycobacterium tuberculosis; identical to SEQ ID NO: 2562

SEQ ID NO: 41575 - DNA, 1545 bp, Mycobacterium tuberculosis; identical to SEQ ID NO: 2563
  CDS (1)..(1545)

SEQ ID NO: 41576 - protein, 514 aa, Mycobacterium tuberculosis; identical to SEQ ID NO: 2564

SEQ ID NO: 41577 - DNA, 1320 bp, Chlamydia trachomatis; identical to SEQ ID NO: 2565
  CDS (1)..(1320)

SEQ ID NO: 41578 - protein, 439 aa, Chlamydia trachomatis; identical to SEQ ID NO: 2566

SEQ ID NO: 41579 - DNA, 1773 bp, Deinococcus radiodurans; identical to SEQ ID NO: 2567
  CDS (1)..(1773)

SEQ ID NO: 41580 - protein, 590 aa, Deinococcus radiodurans; identical to SEQ ID NO: 2568

SEQ ID NO: 41581 - DNA, 1467 bp, Pseudomonas aeruginosa; identical to SEQ ID NO: 2569
  CDS (1)..(1467)

SEQ ID NO: 41582 - protein, 488 aa, Pseudomonas aeruginosa; identical to SEQ ID NO: 2570

SEQ ID NO: 41583 - DNA, 1422 bp, Caulobacter crescentus; identical to SEQ ID NO: 2571
  CDS (1)..(1422)

SEQ ID NO: 41584 - protein, 473 aa, Caulobacter crescentus; identical to SEQ ID NO: 2572

SEQ ID NO: 41585 - DNA, 1437 bp, Borrelia burgdorferi (Lyme disease spirochete); identical to SEQ ID NO: 2573
  CDS (1)..(1437)

SEQ ID NO: 41586 - protein, 478 aa, Borrelia burgdorferi (Lyme disease spirochete); identical to SEQ ID NO: 2574

SEQ ID NO: 41587 - DNA, 1539 bp, Chlamydophila pneumoniae, Chlamydia pneumoniae; identical to SEQ ID NO: 2575
  CDS (1)..(1539)

SEQ ID NO: 41588 - protein, 512 aa, Chlamydophila pneumoniae, Chlamydia pneumoniae; identical to SEQ ID NO: 2576

SEQ ID NO: 41589 - DNA, 1476 bp, Escherichia coli; identical to SEQ ID NO: 2577
  CDS (1)..(1476)

SEQ ID NO: 41590 - protein, 491 aa, Escherichia coli; identical to SEQ ID NO: 2578

SEQ ID NO: 41591 - DNA, 1548 bp, Treponema pallidum subsp. pallidum (syphilis spirochete); identical to SEQ ID NO: 2579
  CDS (1)..(1548)

SEQ ID NO: 41592 - protein, 515 aa, Treponema pallidum subsp. pallidum (syphilis spirochete); identical to SEQ ID NO: 2580

SEQ ID NO: 41593 - DNA, 1476 bp, Buchnera sp; identical to SEQ ID NO: 2581
  CDS (1)..(1476)

SEQ ID NO: 41594 - protein, 491 aa, Buchnera sp; identical to SEQ ID NO: 2582

SEQ ID NO: 41595 - DNA, 1512 bp, Lactococcus lactis subsp. lactis; identical to SEQ ID NO: 2583
  CDS (1)..(1512)

SEQ ID NO: 41596 - protein, 503 aa, Lactococcus lactis subsp. lactis; identical to SEQ ID NO: 2584

SEQ ID NO: 41597 - DNA, 1572 bp, Drosophila melanogaster; identical to SEQ ID NO: 2585
  CDS (1)..(1572)

SEQ ID NO: 41598 - protein, 523 aa, Drosophila melanogaster; identical to SEQ ID NO: 2586

SEQ ID NO: 41599 - DNA, 1575 bp, Synechococcus sp; identical to SEQ ID NO: 2587
  CDS (1)..(1575)

SEQ ID NO: 41600 - protein, 524 aa, Synechococcus sp; identical to SEQ ID NO: 2588

SEQ ID NO: 41601 - DNA, 1485 bp, Haemophilus influenzae; identical to SEQ ID NO: 2589
  CDS (1)..(1485)

SEQ ID NO: 41602 - protein, 494 aa, Haemophilus influenzae; identical to SEQ ID NO: 2590

SEQ ID NO: 41603 - DNA, 1446 bp, Neisseria meningitidis; identical to SEQ ID NO: 2591
  CDS (1)..(1446)

SEQ ID NO: 41604 - protein, 481 aa, Neisseria meningitidis; identical to SEQ ID NO: 2592

SEQ ID NO: 41605 - DNA, 1278 bp, Helicobacter pylori; identical to SEQ ID NO: 2593
  CDS (1)..(1278)

SEQ ID NO: 41606 - protein, 425 aa, Helicobacter pylori; identical to SEQ ID NO: 2594

SEQ ID NO: 41607 - DNA, 1434 bp, Xylella fastidiosa; identical to SEQ ID NO: 2595
  CDS (1)..(1434)

SEQ ID NO: 41608 - protein, 477 aa, Xylella fastidiosa; identical to SEQ ID NO: 2596

SEQ ID NO: 41609 - DNA, 1296 bp, Aquifex aeolicus; identical to SEQ ID NO: 2597
  CDS (1)..(1296)

SEQ ID NO: 41610 - protein, 431 aa, Aquifex aeolicus; identical to SEQ ID NO: 2598

SEQ ID NO: 41611 - DNA, 1491 bp, Thermotoga maritima; identical to SEQ ID NO: 2599
  CDS (1)..(1491)

SEQ ID NO: 41612 - protein, 496 aa, Thermotoga maritima; identical to SEQ ID NO: 2600

SEQ ID NO: 41613 - DNA, 1494 bp, Kluyveromyces marxianus var. lactis, Candida sphaerica; identical to SEQ ID NO: 2601
  CDS (1)..(1494)

SEQ ID NO: 41614 - protein, 497 aa, Kluyveromyces marxianus var. lactis, Candida sphaerica; identical to SEQ ID NO: 2602

SEQ ID NO: 41615 - DNA, 2813 bp, Erwinia chrysanthemi; identical to SEQ ID NO: 2603
  CDS (322)..(1797)

SEQ ID NO: 41616 - protein, 491 aa, Erwinia chrysanthemi; identical to SEQ ID NO: 2604

SEQ ID NO: 41617 - DNA, 3244 bp, Plasmodium falciparum; identical to SEQ ID NO: 2605
  CDS (184)..(2916)

SEQ ID NO: 41618 - protein, 910 aa, Plasmodium falciparum; identical to SEQ ID NO: 2606

SEQ ID NO: 41619 - DNA, 1785 bp, Medicago sativa (alfalfa); identical to SEQ ID NO: 2607
  CDS (38)..(1585)

SEQ ID NO: 41620 - protein, 515 aa, Medicago sativa (alfalfa); identical to SEQ ID NO: 2608

SEQ ID NO: 41621 - DNA, 1689 bp, Solanum tuberosum (potato); identical to SEQ ID NO: 2609
  CDS (46)..(1581)

SEQ ID NO: 41622 - protein, 511 aa, Solanum tuberosum (potato); identical to SEQ ID NO: 2610

SEQ ID NO: 41623 - DNA, 1530 bp, Synechocystis sp; identical to SEQ ID NO: 2611
  CDS (1)..(1530)

SEQ ID NO: 41624 - protein, 509 aa, Synechocystis sp; identical to SEQ ID NO: 2612

SEQ ID NO: 41625 - DNA, 1953 bp, Nicotiana tabacum (common tobacco); identical to SEQ ID NO: 2613
  CDS (43)..(1824)

SEQ ID NO: 41626 - protein, 593 aa, Nicotiana tabacum (common tobacco); identical to SEQ ID NO: 2614

SEQ ID NO: 41627 - DNA, 1869 bp, Nicotiana tabacum (common tobacco); identical to SEQ ID NO: 2615
  CDS (22)..(1788)

SEQ ID NO: 41628 - protein, 588 aa, Nicotiana tabacum (common tobacco); identical to SEQ ID NO: 2616

SEQ ID NO: 41629 - DNA, 2058 bp, Solanum tuberosum (potato); identical to SEQ ID NO: 2617
  CDS (41)..(1774)

SEQ ID NO: 41630 - protein, 577 aa, Solanum tuberosum (potato); identical to SEQ ID NO: 2618

SEQ ID NO: 41631 - DNA, 2049 bp, Spinacia oleracea (spinach); identical to SEQ ID NO: 2619
  CDS (147)..(1871)

SEQ ID NO: 41632 - protein, 574 aa, Spinacia oleracea (spinach); identical to SEQ ID NO: 2620

SEQ ID NO: 41633 - DNA, 2359 bp, Petroselinum crispum (parsley); identical to SEQ ID NO: 2621
  CDS (172)..(1986)

SEQ ID NO: 41634 - protein, 604 aa, Petroselinum crispum (parsley); identical to SEQ ID NO: 2622

SEQ ID NO: 41635 - DNA, 1848 bp, Petroselinum crispum (parsley); identical to SEQ ID NO: 2623
  CDS (41)..(1528)

SEQ ID NO: 41636 - protein, 495 aa, Petroselinum crispum (parsley); identical to SEQ ID NO: 2624

SEQ ID NO: 41637 - DNA, 1957 bp, Petroselinum crispum (parsley); identical to SEQ ID NO: 2625
  CDS (74)..(1678)

SEQ ID NO: 41638 - protein, 534 aa, Petroselinum crispum (parsley); identical to SEQ ID NO: 2626

SEQ ID NO: 41639 - DNA, 1569 bp, Caenorhabditis elegans; identical to SEQ ID NO: 2627
  CDS (1)..(1569)

SEQ ID NO: 41640 - protein, 522 aa, Caenorhabditis elegans; identical to SEQ ID NO: 2628

SEQ ID NO: 41641 - DNA, 1779 bp, Streptomyces coelicolor; identical to SEQ ID NO: 2629
  CDS (1)..(1779)

SEQ ID NO: 41642 - protein, 592 aa, Streptomyces coelicolor; identical to SEQ ID NO: 2630

SEQ ID NO: 41643 - DNA, 1524 bp, Streptomyces coelicolor; identical to SEQ ID NO: 2631
  CDS (1)..(1524)

SEQ ID NO: 41644 - protein, 507 aa, Streptomyces coelicolor; identical to SEQ ID NO: 2632

SEQ ID NO: 41645 - DNA, 1422 bp, Schizosaccharomyces pombe; identical to SEQ ID NO: 2633
  CDS (1)..(1422)

SEQ ID NO: 41646 - protein, 473 aa, Schizosaccharomyces pombe; identical to SEQ ID NO: 2634

SEQ ID NO: 41647 - DNA, 1503 bp, Schizosaccharomyces pombe; identical to SEQ ID NO: 2635
  CDS (1)..(1503)

SEQ ID NO: 41648 - protein, 500 aa, Schizosaccharomyces pombe; identical to SEQ ID NO: 2636

SEQ ID NO: 41649 - DNA, 1428 bp, Schizosaccharomyces pombe; identical to SEQ ID NO: 2637
  CDS (1)..(1428)

SEQ ID NO: 41650 - protein, 475 aa, Schizosaccharomyces pombe; identical to SEQ ID NO: 2638

SEQ ID NO: 41651 - DNA, 1461 bp, Leuconostoc mesenteroides; identical to SEQ ID NO: 2639
  CDS (1)..(1461)

SEQ ID NO: 41652 - protein, 486 aa, Leuconostoc mesenteroides; identical to SEQ ID NO: 2640

SEQ ID NO: 41653 - DNA, 3038 bp, Corynebacterium glutamicum; identical to SEQ ID NO: 2641
  CDS (115)..(1659)

SEQ ID NO: 41654 - protein, 514 aa, Corynebacterium glutamicum; identical to SEQ ID NO: 2642

SEQ ID NO: 41655 - DNA, 1852 bp, Nicotiana tabacum; identical to SEQ ID NO: 2643
  CDS (102)..(1634)

SEQ ID NO: 41656 - protein, 510 aa, Nicotiana tabacum; identical to SEQ ID NO: 2644

SEQ ID NO: 41657 - DNA, 1821 bp, Nicotiana tabacum; identical to SEQ ID NO: 2645
  CDS (88)..(1623)

SEQ ID NO: 41658 - protein, 511 aa, Nicotiana tabacum; identical to SEQ ID NO: 2646

SEQ ID NO: 41659 - DNA, 1808 bp, Chlamydia trachomatis; identical to SEQ ID NO: 2647
  CDS (105)..(1643)

SEQ ID NO: 41660 - protein, 512 aa, Chlamydia trachomatis; identical to SEQ ID NO: 2648

SEQ ID NO: 41661 - DNA, 2750 bp, Plasmodium falciparum; identical to SEQ ID NO: 2649
  CDS (48)..(2258)

SEQ ID NO: 41662 - protein, 736 aa, Plasmodium falciparum; identical to SEQ ID NO: 2650

SEQ ID NO: 41663 - DNA, 1509 bp, Debaryomyces hansenii; identical to SEQ ID NO: 2651
  CDS (1)..(1509)

SEQ ID NO: 41664 - protein, 502 aa, Debaryomyces hansenii; identical to SEQ ID NO: 2652

SEQ ID NO: 41665 - DNA, 1503 bp, Candida glabrata; identical to SEQ ID NO: 2653
  CDS (1)..(1503)

SEQ ID NO: 41666 - protein, 500 aa, Candida glabrata; identical to SEQ ID NO: 2654

SEQ ID NO: 41667 - DNA, 1485 bp, Bacillus thuringiensis serovar konkukian str; identical to SEQ ID NO: 2655
  CDS (1)..(1485)

SEQ ID NO: 41668 - protein, 494 aa, Bacillus thuringiensis serovar konkukian str; identical to SEQ ID NO: 2656

SEQ ID NO: 41669 - DNA, 1554 bp, Oryza sativa; identical to SEQ ID NO: 2657
  CDS (1)..(1554)

SEQ ID NO: 41670 - protein, 517 aa, Oryza sativa; identical to SEQ ID NO: 2658

SEQ ID NO: 41671 - DNA, 1500 bp, Photobacterium profundum; identical to SEQ ID NO: 2659
  CDS (1)..(1500)

SEQ ID NO: 41672 - protein, 499 aa, Photobacterium profundum; identical to SEQ ID NO: 2660

SEQ ID NO: 41673 - DNA, 1551 bp, Parachlamydia sp; identical to SEQ ID NO: 2661
  CDS (1)..(1551)

SEQ ID NO: 41674 - protein, 516 aa, Parachlamydia sp; identical to SEQ ID NO: 2662

SEQ ID NO: 41675 - DNA, 1515 bp, Rhodopseudomonas palustris; identical to SEQ ID NO: 2663
  CDS (1)..(1515)

SEQ ID NO: 41676 - protein, 504 aa, Rhodopseudomonas palustris; identical to SEQ ID NO: 2664

SEQ ID NO: 41677 - DNA, 1650 bp, Corynebacterium diphtheriae; identical to SEQ ID NO: 2665
  CDS (1)..(1650)

SEQ ID NO: 41678 - protein, 549 aa, Corynebacterium diphtheriae; identical to SEQ ID NO: 2666

SEQ ID NO: 41679 - DNA, 1446 bp, uncultured bacterium 581; identical to SEQ ID NO: 2667
  CDS (1)..(1446)

SEQ ID NO: 41680 - protein, 481 aa, uncultured bacterium 581; identical to SEQ ID NO: 2668

SEQ ID NO: 41681 - DNA, 1602 bp, Nonomuraea sp; identical to SEQ ID NO: 2669
  CDS (1)..(1602)

SEQ ID NO: 41682 - protein, 533 aa, Nonomuraea sp; identical to SEQ ID NO: 2670

SEQ ID NO: 41683 - DNA, 1476 bp, Listeria monocytogenes; identical to SEQ ID NO: 2671
  CDS (1)..(1476)

SEQ ID NO: 41684 - protein, 491 aa, Listeria monocytogenes; identical to SEQ ID NO: 2672

SEQ ID NO: 41685 - DNA, 1485 bp, Bacillus cereus; identical to SEQ ID NO: 2673
  CDS (1)..(1485)

SEQ ID NO: 41686 - protein, 494 aa, Bacillus cereus; identical to SEQ ID NO: 2674

SEQ ID NO: 41687 - DNA, 1410 bp, Mycobacterium paratuberculosis; identical to SEQ ID NO: 2675
  CDS (1)..(1410)

SEQ ID NO: 41688 - protein, 469 aa, Mycobacterium paratuberculosis; identical to SEQ ID NO: 2676

SEQ ID NO: 41689 - DNA, 2454 bp, Mycobacterium paratuberculosis; identical to SEQ ID NO: 2677
  CDS (1)..(2454)

SEQ ID NO: 41690 - protein, 817 aa, Mycobacterium paratuberculosis; identical to SEQ ID NO: 2678

SEQ ID NO: 41691 - DNA, 1545 bp, Mycobacterium paratuberculosis; identical to SEQ ID NO: 2679
  CDS (1)..(1545)

SEQ ID NO: 41692 - protein, 514 aa, Mycobacterium paratuberculosis; identical to SEQ ID NO: 2680

SEQ ID NO: 41693 - DNA, 1449 bp, Lactobacillus johnsonii; identical to SEQ ID NO: 2681
  CDS (1)..(1449)

SEQ ID NO: 41694 - protein, 482 aa, Lactobacillus johnsonii; identical to SEQ ID NO: 2682

SEQ ID NO: 41695 - DNA, 1539 bp, Ashbya gossypii; identical to SEQ ID NO: 2683
  CDS (1)..(1539)

SEQ ID NO: 41696 - protein, 512 aa, Ashbya gossypii; identical to SEQ ID NO: 2684

SEQ ID NO: 41697 - DNA, 1734 bp, Oryza sativa; identical to SEQ ID NO: 2685
  CDS (1)..(1734)

SEQ ID NO: 41698 - protein, 577 aa, Oryza sativa; identical to SEQ ID NO: 2686

SEQ ID NO: 41699 - DNA, 1467 bp, Gluconobacter oxydans; identical to SEQ ID NO: 2687
  CDS (1)..(1467)

SEQ ID NO: 41700 - protein, 488 aa, Gluconobacter oxydans; identical to SEQ ID NO: 2688

SEQ ID NO: 41701 - DNA, 1581 bp, Vibrio vulnificus; identical to SEQ ID NO: 2689
  CDS (1)..(1581)

SEQ ID NO: 41702 - protein, 526 aa, Vibrio vulnificus; identical to SEQ ID NO: 2690

SEQ ID NO: 41703 - DNA, 1476 bp, Photorhabdus luminescens; identical to SEQ ID NO: 2691
  CDS (1)..(1476)

SEQ ID NO: 41704 - protein, 491 aa, Photorhabdus luminescens; identical to SEQ ID NO: 2692

SEQ ID NO: 41705 - DNA, 1539 bp, Gloeobacter violaceus; identical to SEQ ID NO: 2693
  CDS (1)..(1539)

SEQ ID NO: 41706 - protein, 512 aa, Gloeobacter violaceus; identical to SEQ ID NO: 2694

SEQ ID NO: 41707 - DNA, 1539 bp, Gloeobacter violaceus; identical to SEQ ID NO: 2695
  CDS (1)..(1539)

SEQ ID NO: 41708 - protein, 512 aa, Gloeobacter violaceus; identical to SEQ ID NO: 2696

SEQ ID NO: 41709 - DNA, 1479 bp, Chromobacterium violaceum; identical to SEQ ID NO: 2697
  CDS (1)..(1479)

SEQ ID NO: 41710 - protein, 492 aa, Chromobacterium violaceum; identical to SEQ ID NO: 2698

SEQ ID NO: 41711 - DNA, 2229 bp, Giardia lamblia ATCC 50803; identical to SEQ ID NO: 2699
  CDS (1)..(2229)

SEQ ID NO: 41712 - protein, 742 aa, Giardia lamblia ATCC 50803; identical to SEQ ID NO: 2700

SEQ ID NO: 41713 - DNA, 2850 bp, Plasmodium yoelii yoelii; identical to SEQ ID NO: 2701
  CDS (1)..(2850)

SEQ ID NO: 41714 - protein, 949 aa, Plasmodium yoelii yoelii; identical to SEQ ID NO: 2702

SEQ ID NO: 41715 - DNA, 1476 bp, Neurospora crassa; identical to SEQ ID NO: 2703
  CDS (1)..(1476)

SEQ ID NO: 41716 - protein, 491 aa, Neurospora crassa; identical to SEQ ID NO: 2704

SEQ ID NO: 41717 - DNA, 1524 bp, Synechococcus sp; identical to SEQ ID NO: 2705
  CDS (1)..(1524)

SEQ ID NO: 41718 - protein, 507 aa, Synechococcus sp; identical to SEQ ID NO: 2706

SEQ ID NO: 41719 - DNA, 1455 bp, Rhodopirellula baltica; identical to SEQ ID NO: 2707
  CDS (1)..(1455)

SEQ ID NO: 41720 - protein, 484 aa, Rhodopirellula baltica; identical to SEQ ID NO: 2708

SEQ ID NO: 41721 - DNA, 1524 bp, Prochlorococcus marinus subsp; identical to SEQ ID NO: 2709
  CDS (1)..(1524)

SEQ ID NO: 41722 - protein, 507 aa, Prochlorococcus marinus subsp; identical to SEQ ID NO: 2710

SEQ ID NO: 41723 - DNA, 1524 bp, Prochlorococcus marinus; identical to SEQ ID NO: 2711
  CDS (1)..(1524)

SEQ ID NO: 41724 - protein, 507 aa, Prochlorococcus marinus; identical to SEQ ID NO: 2712

SEQ ID NO: 41725 - DNA, 1521 bp, Prochlorococcus marinus; identical to SEQ ID NO: 2713
  CDS (1)..(1521)

SEQ ID NO: 41726 - protein, 506 aa, Prochlorococcus marinus; identical to SEQ ID NO: 2714

SEQ ID NO: 41727 - DNA, 1488 bp, Haemophilus ducreyi; identical to SEQ ID NO: 2715
  CDS (1)..(1488)

SEQ ID NO: 41728 - protein, 495 aa, Haemophilus ducreyi; identical to SEQ ID NO: 2716

SEQ ID NO: 41729 - DNA, 1497 bp, Candidatus Blochmannia floridanus; identical to SEQ ID NO: 2717
  CDS (1)..(1497)

SEQ ID NO: 41730 - protein, 498 aa, Candidatus Blochmannia floridanus; identical to SEQ ID NO: 2718

SEQ ID NO: 41731 - DNA, 1768 bp, Oryza sativa; identical to SEQ ID NO: 2719
  CDS (2)..(1768)

SEQ ID NO: 41732 - protein, 588 aa, Oryza sativa; identical to SEQ ID NO: 2720

SEQ ID NO: 41733 - DNA, 1548 bp, Bos indicus; identical to SEQ ID NO: 2721
  CDS (1)..(1548)

SEQ ID NO: 41734 - protein, 515 aa, Bos indicus; identical to SEQ ID NO: 2722

SEQ ID NO: 41735 - DNA, 1536 bp, Chlamydophila caviae; identical to SEQ ID NO: 2723
  CDS (1)..(1536)

SEQ ID NO: 41736 - protein, 511 aa, Chlamydophila caviae; identical to SEQ ID NO: 2724

SEQ ID NO: 41737 - DNA, 1524 bp, Streptomyces avermitilis; identical to SEQ ID NO: 2725
  CDS (1)..(1524)

SEQ ID NO: 41738 - protein, 507 aa, Streptomyces avermitilis; identical to SEQ ID NO: 2726

SEQ ID NO: 41739 - DNA, 1647 bp, Streptomyces avermitilis; identical to SEQ ID NO: 2727
  CDS (1)..(1647)

SEQ ID NO: 41740 - protein, 548 aa, Streptomyces avermitilis; identical to SEQ ID NO: 2728

SEQ ID NO: 41741 - DNA, 1491 bp, Nitrosomonas europaea; identical to SEQ ID NO: 2729
  CDS (1)..(1491)

SEQ ID NO: 41742 - protein, 496 aa, Nitrosomonas europaea; identical to SEQ ID NO: 2730

SEQ ID NO: 41743 - DNA, 1524 bp, Enterococcus faecalis; identical to SEQ ID NO: 2731
  CDS (1)..(1524)

SEQ ID NO: 41744 - protein, 507 aa, Enterococcus faecalis; identical to SEQ ID NO: 2732

SEQ ID NO: 41745 - DNA, 1464 bp, Tropheryma whipplei; identical to SEQ ID NO: 2733
  CDS (1)..(1464)

SEQ ID NO: 41746 - protein, 487 aa, Tropheryma whipplei; identical to SEQ ID NO: 2734

SEQ ID NO: 41747 - DNA, 2145 bp, Leishmania mexicana; identical to SEQ ID NO: 2735
  CDS (298)..(1986)

SEQ ID NO: 41748 - protein, 562 aa, Leishmania mexicana; identical to SEQ ID NO: 2736

SEQ ID NO: 41749 - DNA, 1494 bp, Dictyostelium discoideum; identical to SEQ ID NO: 2737
  CDS (1)..(1494)

SEQ ID NO: 41750 - protein, 497 aa, Dictyostelium discoideum; identical to SEQ ID NO: 2738

SEQ ID NO: 41751 - DNA, 1503 bp, Xylella fastidiosa; identical to SEQ ID NO: 2739
  CDS (1)..(1503)

SEQ ID NO: 41752 - protein, 500 aa, Xylella fastidiosa; identical to SEQ ID NO: 2740

SEQ ID NO: 41753 - DNA, 1506 bp, Vibrio parahaemolyticus; identical to SEQ ID NO: 2741
  CDS (1)..(1506)

SEQ ID NO: 41754 - protein, 501 aa, Vibrio parahaemolyticus; identical to SEQ ID NO: 2742

SEQ ID NO: 41755 - DNA, 1533 bp, Pseudomonas syringae; identical to SEQ ID NO: 2743
  CDS (1)..(1533)

SEQ ID NO: 41756 - protein, 510 aa, Pseudomonas syringae; identical to SEQ ID NO: 2744

SEQ ID NO: 41757 - DNA, 1470 bp, Pseudomonas syringae; identical to SEQ ID NO: 2745
  CDS (1)..(1470)

SEQ ID NO: 41758 - protein, 489 aa, Pseudomonas syringae; identical to SEQ ID NO: 2746

SEQ ID NO: 41759 - DNA, 1458 bp, Pseudomonas putida; identical to SEQ ID NO: 2747
  CDS (1)..(1458)

SEQ ID NO: 41760 - protein, 485 aa, Pseudomonas putida; identical to SEQ ID NO: 2748

SEQ ID NO: 41761 - DNA, 1506 bp, Pseudomonas putida; identical to SEQ ID NO: 2749
  CDS (1)..(1506)

SEQ ID NO: 41762 - protein, 501 aa, Pseudomonas putida; identical to SEQ ID NO: 2750

SEQ ID NO: 41763 - DNA, 1470 bp, Pseudomonas putida; identical to SEQ ID NO: 2751
  CDS (1)..(1470)

SEQ ID NO: 41764 - protein, 489 aa, Pseudomonas putida; identical to SEQ ID NO: 2752

SEQ ID NO: 41765 - DNA, 1485 bp, Lactobacillus plantarum; identical to SEQ ID NO: 2753
  CDS (1)..(1485)

SEQ ID NO: 41766 - protein, 494 aa, Lactobacillus plantarum; identical to SEQ ID NO: 2754

SEQ ID NO: 41767 - DNA, 1440 bp, Clostridium tetani; identical to SEQ ID NO: 2755
  CDS (1)..(1440)

SEQ ID NO: 41768 - protein, 479 aa, Clostridium tetani; identical to SEQ ID NO: 2756

SEQ ID NO: 41769 - DNA, 1512 bp, Bradyrhizobium japonicum; identical to SEQ ID NO: 2757
  CDS (1)..(1512)

SEQ ID NO: 41770 - protein, 503 aa, Bradyrhizobium japonicum; identical to SEQ ID NO: 2758

SEQ ID NO: 41771 - DNA, 1497 bp, Bacteroides thetaiotaomicron; identical to SEQ ID NO: 2759
  CDS (1)..(1497)

SEQ ID NO: 41772 - protein, 498 aa, Bacteroides thetaiotaomicron; identical to SEQ ID NO: 2760

SEQ ID NO: 41773 - DNA, 4583 bp, Mus musculus; identical to SEQ ID NO: 2761
  CDS (119)..(2488)

SEQ ID NO: 41774 - protein, 789 aa, Mus musculus; identical to SEQ ID NO: 2762

SEQ ID NO: 41775 - DNA, 1485 bp, Staphylococcus epidermidis; identical to SEQ ID NO: 2763
  CDS (1)..(1485)

SEQ ID NO: 41776 - protein, 494 aa, Staphylococcus epidermidis; identical to SEQ ID NO: 2764

SEQ ID NO: 41777 - DNA, 1590 bp, Yersinia pestis; identical to SEQ ID NO: 2765
  CDS (1)..(1590)

SEQ ID NO: 41778 - protein, 529 aa, Yersinia pestis; identical to SEQ ID NO: 2766

SEQ ID NO: 41779 - DNA, 1530 bp, Synechococcus elongatus; identical to SEQ ID NO: 2767
  CDS (1)..(1530)

SEQ ID NO: 41780 - protein, 509 aa, Synechococcus elongatus; identical to SEQ ID NO: 2768

SEQ ID NO: 41781 - DNA, 1473 bp, Shewanella oneidensis; identical to SEQ ID NO: 2769
  CDS (1)..(1473)

SEQ ID NO: 41782 - protein, 490 aa, Shewanella oneidensis; identical to SEQ ID NO: 2770

SEQ ID NO: 41783 - DNA, 1476 bp, Oceanobacillus iheyensis; identical to SEQ ID NO: 2771
  CDS (1)..(1476)

SEQ ID NO: 41784 - protein, 491 aa, Oceanobacillus iheyensis; identical to SEQ ID NO: 2772

SEQ ID NO: 41785 - DNA, 1344 bp, Corynebacterium efficiens; identical to SEQ ID NO: 2773
  CDS (1)..(1344)

SEQ ID NO: 41786 - protein, 447 aa, Corynebacterium efficiens; identical to SEQ ID NO: 2774

SEQ ID NO: 41787 - DNA, 1545 bp, Corynebacterium efficiens; identical to SEQ ID NO: 2775
  CDS (1)..(1545)

SEQ ID NO: 41788 - protein, 514 aa, Corynebacterium efficiens; identical to SEQ ID NO: 2776

SEQ ID NO: 41789 - DNA, 1668 bp, Bifidobacterium longum; identical to SEQ ID NO: 2777
  CDS (1)..(1668)

SEQ ID NO: 41790 - protein, 555 aa, Bifidobacterium longum; identical to SEQ ID NO: 2778

SEQ ID NO: 41791 - DNA, 1284 bp, Rhodococcus opacus; identical to SEQ ID NO: 2779
  CDS (1)..(1284)

SEQ ID NO: 41792 - protein, 427 aa, Rhodococcus opacus; identical to SEQ ID NO: 2780

SEQ ID NO: 41793 - DNA, 2879 bp, Leishmania guyanensis; identical to SEQ ID NO: 2781
  misc_feature (1992)..(2321): n is a, c, g, or t
  misc_feature (2700)..(2700): n is a, c, g, or t
  misc_feature (2840)..(2840): n is a, c, g, or t
  CDS (205)..(1893)

SEQ ID NO: 41794 - protein, 562 aa, Leishmania guyanensis; identical to SEQ ID NO: 2782

SEQ ID NO: 41795 - DNA, 1689 bp, Leishmania mexicana; identical to SEQ ID NO: 2783
  misc_feature (227)..(444): n is a, c, g, or t
  misc_feature (1475)..(1528): n is a, c, g, or t
  CDS (1)..(1689)

SEQ ID NO: 41796 - protein, 562 aa, Leishmania mexicana; identical to SEQ ID NO: 2784
  misc_feature (76)..(148): Xaa can be any naturally occuring amino acid
  misc_feature (187)..(187): Xaa can be any naturally occuring amino acid
  misc_feature (197)..(197): Xaa can be any naturally occuring amino acid
  misc_feature (224)..(224): Xaa can be any naturally occuring amino acid
  misc_feature (243)..(243): Xaa can be any naturally occuring amino acid
  misc_feature (250)..(250): Xaa can be any naturally occuring amino acid
  misc_feature (492)..(510): Xaa can be any naturally occuring amino acid

SEQ ID NO: 41797 - DNA, 2916 bp, Leishmania amazonensis; identical to SEQ ID NO: 2785
  misc_feature (2191)..(2311): n is a, c, g, or t
  CDS (207)..(1895)

SEQ ID NO: 41798 - protein, 562 aa, Leishmania amazonensis; identical to SEQ ID NO: 2786
  misc_feature (463)..(463): Xaa can be any naturally occuring amino acid
  misc_feature (481)..(481): Xaa can be any naturally occuring amino acid

SEQ ID NO: 41799 - DNA, 1440 bp, Chlorobium tepidum; identical to SEQ ID NO: 2787
  CDS (1)..(1440)

SEQ ID NO: 41800 - protein, 479 aa, Chlorobium tepidum; identical to SEQ ID NO: 2788

SEQ ID NO: 41801 - DNA, 2187 bp, Methylobacterium extorquens; identical to SEQ ID NO: 2789
  CDS (640)..(2187)

SEQ ID NO: 41802 - protein, 515 aa, Methylobacterium extorquens; identical to SEQ ID NO: 2790

SEQ ID NO: 41803 - DNA, 1476 bp, Bartonella henselae; identical to SEQ ID NO: 2791
  CDS (1)..(1476)

SEQ ID NO: 41804 - protein, 491 aa, Bartonella henselae; identical to SEQ ID NO: 2792

SEQ ID NO: 41805 - DNA, 2266 bp, Toxoplasma gondii; identical to SEQ ID NO: 2793
  CDS (169)..(1851)

SEQ ID NO: 41806 - protein, 560 aa, Toxoplasma gondii; identical to SEQ ID NO: 2794

SEQ ID NO: 41807 - DNA, 1923 bp, Xanthomonas campestris; identical to SEQ ID NO: 2795
  CDS (1)..(1923)

SEQ ID NO: 41808 - protein, 640 aa, Xanthomonas campestris; identical to SEQ ID NO: 2796

SEQ ID NO: 41809 - DNA, 1431 bp, Xanthomonas campestris; identical to SEQ ID NO: 2797
  CDS (1)..(1431)

SEQ ID NO: 41810 - protein, 476 aa, Xanthomonas campestris; identical to SEQ ID NO: 2798

SEQ ID NO: 41811 - DNA, 1839 bp, Xanthomonas axonopodis; identical to SEQ ID NO: 2799
  CDS (1)..(1839)

SEQ ID NO: 41812 - protein, 612 aa, Xanthomonas axonopodis; identical to SEQ ID NO: 2800

SEQ ID NO: 41813 - DNA, 1431 bp, Xanthomonas axonopodis; identical to SEQ ID NO: 2801
  CDS (1)..(1431)

SEQ ID NO: 41814 - protein, 476 aa, Xanthomonas axonopodis; identical to SEQ ID NO: 2802

SEQ ID NO: 41815 - DNA, 1458 bp, Thermoanaerobacter tengcongensis; identical to SEQ ID NO: 2803
  CDS (1)..(1458)

SEQ ID NO: 41816 - protein, 485 aa, Thermoanaerobacter tengcongensis; identical to SEQ ID NO: 2804

SEQ ID NO: 41817 - DNA, 1762 bp, Oryza sativa; identical to SEQ ID NO: 2805
  CDS (41)..(1558)

SEQ ID NO: 41818 - protein, 505 aa, Oryza sativa; identical to SEQ ID NO: 2806

SEQ ID NO: 41819 - DNA, 1305 bp, Encephalitozoon cuniculi; identical to SEQ ID NO: 2807
  CDS (1)..(1305)

SEQ ID NO: 41820 - protein, 434 aa, Encephalitozoon cuniculi; identical to SEQ ID NO: 2808

SEQ ID NO: 41821 - DNA, 2125 bp, Drosophila melanogaster; identical to SEQ ID NO: 2809
  CDS (158)..(1738)

SEQ ID NO: 41822 - protein, 526 aa, Drosophila melanogaster; identical to SEQ ID NO: 2810

SEQ ID NO: 41823 - DNA, 1470 bp, Ralstonia solanacearum; identical to SEQ ID NO: 2811
  CDS (1)..(1470)

SEQ ID NO: 41824 - protein, 489 aa, Ralstonia solanacearum; identical to SEQ ID NO: 2812

SEQ ID NO: 41825 - DNA, 1521 bp, Enterococcus mundtii; identical to SEQ ID NO: 2813
  CDS (1)..(1521)

SEQ ID NO: 41826 - protein, 506 aa, Enterococcus mundtii; identical to SEQ ID NO: 2814

SEQ ID NO: 41827 - DNA, 2230 bp, Homo sapiens; identical to SEQ ID NO: 2815
  CDS (54)..(1601)

SEQ ID NO: 41828 - protein, 515 aa, Homo sapiens [sequence omitted]

SEQ ID NO: 41829 - DNA, 1470 bp, Rhizobium loti; identical to SEQ ID NO: 2817
  CDS (1)..(1470)

SEQ ID NO: 41830 - protein, 489 aa, Rhizobium loti; identical to SEQ ID NO: 2818

SEQ ID NO: 41831 - DNA, 1428 bp, Rhizobium loti; identical to SEQ ID NO: 2819
  CDS (1)..(1428)

SEQ ID NO: 41832 - protein, 475 aa, Rhizobium loti; identical to SEQ ID NO: 2820

SEQ ID NO: 41833 - DNA, 3584 bp, Plasmodium berghei; identical to SEQ ID NO: 2821
  CDS (370)..(3222)

SEQ ID NO: 41834 - protein, 950 aa, Plasmodium berghei; identical to SEQ ID NO: 2822

SEQ ID NO: 41835 - DNA, 1491 bp, Pasteurella multocida; identical to SEQ ID NO: 2823
  CDS (1)..(1491)

SEQ ID NO: 41836 - protein, 496 aa, Pasteurella multocida; identical to SEQ ID NO: 2824

SEQ ID NO: 41837 - DNA, 1470 bp, Pseudomonas putida; identical to SEQ ID NO: 2825
  CDS (1)..(1470)

SEQ ID NO: 41838 - protein, 489 aa, Pseudomonas putida; identical to SEQ ID NO: 2826

SEQ ID NO: 41839 - DNA, 1566 bp, Trypanosoma brucei; identical to SEQ ID NO: 2827
  CDS (1)..(1566)

SEQ ID NO: 41840 - protein, 521 aa, Trypanosoma brucei; identical to SEQ ID NO: 2828

SEQ ID NO: 41841 - DNA, 1904 bp, Triticum aestivum; identical to SEQ ID NO: 2829
  CDS (153)..(1682)

SEQ ID NO: 41842 - protein, 509 aa, Triticum aestivum; identical to SEQ ID NO: 2830

SEQ ID NO: 41843 - DNA, 2098 bp, Solanum tuberosum; identical to SEQ ID NO: 2831
  CDS (27)..(1775)

SEQ ID NO: 41844 - protein, 582 aa, Solanum tuberosum; identical to SEQ ID NO: 2832

SEQ ID NO: 41845 - DNA, 1924 bp, Dunaliella bioculata; identical to SEQ ID NO: 2833
  CDS (68)..(1840)

SEQ ID NO: 41846 - protein, 590 aa, Dunaliella bioculata; identical to SEQ ID NO: 2834

SEQ ID NO: 41847 - DNA, 1976 bp, Cyanidium caldarium; identical to SEQ ID NO: 2835
  CDS (46)..(1848)

SEQ ID NO: 41848 - protein, 600 aa, Cyanidium caldarium; identical to SEQ ID NO: 2836

SEQ ID NO: 41849 - DNA, 2106 bp, Drosophila melanogaster; identical to SEQ ID NO: 2837
  CDS (28)..(1746)

SEQ ID NO: 41850 - protein, 572 aa, Drosophila melanogaster; identical to SEQ ID NO: 2838

SEQ ID NO: 41851 - DNA, 1777 bp, Mesembryanthemum crystallinum; identical to SEQ ID NO: 2839
  CDS (39)..(1589)

SEQ ID NO: 41852 - protein, 516 aa, Mesembryanthemum crystallinum; identical to SEQ ID NO: 2840

SEQ ID NO: 41853 - DNA, 1542 bp, Mus musculus; identical to SEQ ID NO: 2841
  CDS (1)..(1542)

SEQ ID NO: 41854 - protein, 513 aa, Mus musculus; identical to SEQ ID NO: 2842

SEQ ID NO: 41855 - DNA, 1485 bp, Actinobacillus actinomycetemcomitans; identical to SEQ ID NO: 2843
  CDS (1)..(1485)

SEQ ID NO: 41856 - protein, 494 aa, Actinobacillus actinomycetemcomitans; identical to SEQ ID NO: 2844

SEQ ID NO: 41857 - DNA, 1473 bp, Buchnera aphidicola; identical to SEQ ID NO: 2845
  CDS (1)..(1473)

SEQ ID NO: 41858 - protein, 490 aa, Buchnera aphidicola; identical to SEQ ID NO: 2846

SEQ ID NO: 41859 - DNA, 1473 bp, Buchnera aphidicola; identical to SEQ ID NO: 2847
  CDS (1)..(1473)

SEQ ID NO: 41860 - protein, 490 aa, Buchnera aphidicola; identical to SEQ ID NO: 2848

SEQ ID NO: 41861 - DNA, 2049 bp, Ceratitis capitata; identical to SEQ ID NO: 2849
  CDS (60)..(1640)

SEQ ID NO: 41862 - protein, 526 aa, Ceratitis capitata; identical to SEQ ID NO: 2850

SEQ ID NO: 41863 - DNA, 1524 bp, Chlamydia muridarum; identical to SEQ ID NO: 2851
  CDS (1)..(1524)

SEQ ID NO: 41864 - protein, 507 aa, Chlamydia muridarum; identical to SEQ ID NO: 2852

SEQ ID NO: 41865 - DNA, 2062 bp, Drosophila melanogaster; identical to SEQ ID NO: 2853
  CDS (303)..(1877)

SEQ ID NO: 41866 - protein, 524 aa, Drosophila melanogaster; identical to SEQ ID NO: 2854

SEQ ID NO: 41867 - DNA, 1536 bp, Emericella nidulans; identical to SEQ ID NO: 2855
  CDS (1)..(1536)

SEQ ID NO: 41868 - protein, 511 aa, Emericella nidulans; identical to SEQ ID NO: 2856

SEQ ID NO: 41869 - DNA, 1957 bp, Leuconostoc mesenteroides; identical to SEQ ID NO: 2857
  CDS (206)..(1666)

SEQ ID NO: 41870 - protein, 486 aa, Leuconostoc mesenteroides; identical to SEQ ID NO: 2858

SEQ ID NO: 41871 - DNA, 2055 bp, Macropus robustus; identical to SEQ ID NO: 2859
  CDS (94)..(1641)

SEQ ID NO: 41872 - protein, 515 aa, Macropus robustus; identical to SEQ ID NO: 2860

SEQ ID NO: 41873 - DNA, 1530 bp, Nostoc punctiforme; identical to SEQ ID NO: 2861
  CDS (1)..(1530)

SEQ ID NO: 41874 - protein, 509 aa, Nostoc punctiforme; identical to SEQ ID NO: 2862

SEQ ID NO: 41875 - DNA, 1476 bp, Rhizobium meliloti; identical to SEQ ID NO: 2863
  CDS (1)..(1476)

SEQ ID NO: 41876 - protein, 491 aa, Rhizobium meliloti; identical to SEQ ID NO: 2864

SEQ ID NO: 41877 - DNA, 2853 bp, Homo sapiens; identical to SEQ ID NO: 2865
  CDS (273)..(2648)

SEQ ID NO: 41878 - protein, 791 aa, Homo sapiens; identical to SEQ ID NO: 2866

SEQ ID NO: 41879 - DNA, 1970 bp, Arabidopsis thaliana; identical to SEQ ID NO: 2867
  CDS (60)..(1790)

SEQ ID NO: 41880 - protein, 576 aa, Arabidopsis thaliana; identical to SEQ ID NO: 2868

SEQ ID NO: 41881 - DNA, 2112 bp, Arabidopsis thaliana; identical to SEQ ID NO: 2869
  CDS (142)..(1932)

SEQ ID NO: 41882 - protein, 596 aa, Arabidopsis thaliana; identical to SEQ ID NO: 2870

SEQ ID NO: 41883 - DNA, 2161 bp, Arabidopsis thaliana; identical to SEQ ID NO: 2871
  CDS (90)..(1967)

SEQ ID NO: 41884 - protein, 625 aa, Arabidopsis thaliana; identical to SEQ ID NO: 2872

SEQ ID NO: 41885 - DNA, 1936 bp, Arabidopsis thaliana; identical to SEQ ID NO: 2873
  CDS (136)..(1686)

SEQ ID NO: 41886 - protein, 516 aa, Arabidopsis thaliana; identical to SEQ ID NO: 2874

SEQ ID NO: 41887 - DNA, 1959 bp, Arabidopsis thaliana; identical to SEQ ID NO: 2875
  CDS (194)..(1741)

SEQ ID NO: 41888 - protein, 515 aa, Arabidopsis thaliana [sequence omitted]

SEQ ID NO: 41889 - DNA, 1503 bp, Xenopus laevis; identical to SEQ ID NO: 2877
  CDS (1)..(1503)

SEQ ID NO: 41890 - protein, 500 aa, Xenopus laevis; identical to SEQ ID NO: 2878

SEQ ID NO: 41891 - DNA, 2004 bp, Arabidopsis thaliana; identical to SEQ ID NO: 2879
  CDS (51)..(1850)

SEQ ID NO: 41892 - protein, 599 aa, Arabidopsis thaliana; identical to SEQ ID NO: 2880

SEQ ID NO: 41893 - DNA, 23 bp, Artificial sequence
  Primer sequence
atgagtgaaggccccgtcaaatt

SEQ ID NO: 41894 - DNA, 25 bp, Artificial sequence
  Primer sequence
ctaattatccttcgtatcttctggc

SEQ ID NO: 41895 - protein, 806 aa, Artificial sequence; identical to SEQ ID NO: 18604
  Consensus
  Variant (2)..(3): Xaa in position 2 to 3 is any amino acid
  Variant (7)..(9): Xaa in position 7 to 9 is any amino acid
  Variant (11)..(12): Xaa in position 11 to 12 is any amino acid
  Variant (14)..(17): Xaa in position 14 to 17 is any amino acid
  Variant (19)..(23): Xaa in position 19 to 23 is any amino acid
  Variant (25)..(32): Xaa in position 25 to 32 is any amino acid
  Variant (34)..(35): Xaa in position 34 to 35 is any amino acid
  Variant (37)..(81): Xaa in position 37 to 81 is any amino acid
  Variant (83)..(95): Xaa in position 83 to 95 is any amino acid
  Variant (97)..(225): Xaa in position 97 to 225 is any amino acid
  Variant (227)..(230): Xaa in position 227 to 230 is any amino acid
  Variant (232)..(258): Xaa in position 232 to 258 is any amino acid
  Variant (260)..(262): Xaa in position 260 to 262 is any amino acid
  Variant (266)..(266): Xaa in position 266 is any amino acid
  Variant (268)..(268): Xaa in position 268 is any amino acid
  Variant (270)..(271): Xaa in position 270 to 271 is any amino acid
  Variant (273)..(275): Xaa in position 273 to 275 is any amino acid
  Variant (277)..(285): Xaa in position 277 to 285 is any amino acid
  Variant (287)..(290): Xaa in position 287 to 290 is any amino acid
  Variant (300)..(300): Xaa in position 300 is any amino acid
  Variant (302)..(302): Xaa in position 302 is any amino acid
  Variant (304)..(307): Xaa in position 304 to 307 is any amino acid
  Variant (310)..(310): Xaa in position 310 is any amino acid
  Variant (312)..(318): Xaa in position 312 to 318 is any amino acid
  Variant (321)..(323): Xaa in position 321 to 323 is any amino acid
  Variant (325)..(328): Xaa in position 325 to 328 is any amino acid
  Variant (330)..(332): Xaa in position 330 to 332 is any amino acid
  Variant (334)..(335): Xaa in position 334 to 335 is any amino acid
  Variant (337)..(339): Xaa in position 337 to 339 is any amino acid
  Variant (341)..(342): Xaa in position 341 to 342 is any amino acid
  Variant (344)..(347): Xaa in position 344 to 347 is any amino acid
  Variant (349)..(351): Xaa in position 349 to 351 is any amino acid
  Variant (354)..(355): Xaa in position 354 to 355 is any amino acid
  Variant (359)..(360): Xaa in position 359 to 360 is any amino acid
  Variant (362)..(366): Xaa in position 362 to 366 is any amino acid
  Variant (370)..(370): Xaa in position 370 is any amino acid
  Variant (372)..(382): Xaa in position 372 to 382 is any amino acid
  Variant (385)..(385): Xaa in position 385 is any amino acid
  Variant (387)..(387): Xaa in position 387 is any amino acid
  Variant (389)..(405): Xaa in position 389 to 405 is any amino acid
  Variant (409)..(438): Xaa in position 409 to 438 is any amino acid
  Variant (440)..(451): Xaa in position 440 to 451 is any amino acid
  Variant (453)..(455): Xaa in position 453 to 455 is any amino acid
  Variant (457)..(465): Xaa in position 457 to 465 is any amino acid
  Variant (467)..(467): Xaa in position 467 is any amino acid
  Variant (470)..(470): Xaa in position 470 is any amino acid
  Variant (475)..(478): Xaa in position 475 to 478 is any amino acid
  Variant (481)..(493): Xaa in position 481 to 493 is any amino acid
  Variant (495)..(524): Xaa in position 495 to 524 is any amino acid
  Variant (526)..(531): Xaa in position 526 to 531 is any amino acid
  Variant (534)..(534): Xaa in position 534 is any amino acid
  Variant (536)..(543): Xaa in position 536 to 543 is any amino acid
  Variant (545)..(545): Xaa in position 545 is any amino acid
  Variant (548)..(588): Xaa in position 548 to 588 is any amino acid
  Variant (592)..(592): Xaa in position 592 is any amino acid
  Variant (594)..(595): Xaa in position 594 to 595 is any amino acid
  Variant (597)..(599): Xaa in position 597 to 599 is any amino acid
  Variant (601)..(604): Xaa in position 601 to 604 is any amino acid
  Variant (606)..(609): Xaa in position 606 to 609 is any amino acid
  Variant (611)..(614): Xaa in position 611 to 614 is any amino acid
  Variant (616)..(797): Xaa in position 616 to 797 is any amino acid
  Variant (799)..(800): Xaa in position 799 to 800 is any amino acid
  Variant (802)..(805): Xaa in position 802 to 805 is any amino acid

SEQ ID NO: 41896 - protein, 150 aa, Artificial sequence; identical to SEQ ID NO: 2917
  Consensus
  Variant (1)..(1): Xaa in position 1 is Arg or Lys
  Variant (2)..(2): Xaa in position 2 is Val, Ile, Leu or Ala
  Variant (3)..(3): Xaa in position 3 is Ile, Val, Met or Ala
  Variant (4)..(4): Xaa in position 4 is Ile, Val, Leu, Met or Ala
  Variant (8)..(8): Xaa in position 8 is Phe, Ile, Leu or Tyr
  Variant (9)..(9): Xaa in position 9 is Gly or Ala
  Variant (10)..(10): Xaa in position 10 is any amino acid
  Variant (11)..(11): Xaa in position 11 is Asp, Ser or Asn
  Variant (12)..(13): Xaa in position 12 to 13 is any amino acid
  Variant (14)..(14): Xaa in position 14 is Ser, Thr or Asn
  Variant (15)..(15): Xaa in position 15 is Ala, Ser, Phe or Tyr
  Variant (16)..(17): Xaa in position 16 to 17 is any amino acid
  Variant (18)..(18): Xaa in position 18 is Leu, Ile, Val or Phe
  Variant (19)..(21): Xaa in position 19 to 21 is any amino acid
  Variant (22)..(22): Xaa in position 22 is Leu, Ile or Val
  Variant (23)..(27): Xaa in position 23 to 27 is any amino acid
  Variant (28)..(28): Xaa in position 28 is Glu, Asp, Pro or Ser
  Variant (29)..(30): Xaa in position 29 to 30 is any amino acid
  Variant (31)..(31): Xaa in position 31 is Ile, Val, Leu, Thr or Met
  Variant (32)..(32): Xaa in position 32 is Tyr, Phe or Leu
  Variant (33)..(33): Xaa in position 33 is Arg, His or Leu
  Variant (34)..(34): Xaa in position 34 is Ile, Val, Met or Leu
  Variant (37)..(37): Xaa in position 37 is Tyr or Phe
  Variant (39)..(39): Xaa in position 39 is Gly, Ser or Ala
  Variant (40)..(40): Xaa in position 40 is Lys, Arg or Glu
  Variant (41)..(42): Xaa in position 41 to 42 is any amino acid
  Variant (43)..(43): Xaa in position 43 is Val, Ile, Leu, Ala or Met
  Variant (44)..(44): Xaa in position 44 is any amino acid
  Variant (45)..(45): Xaa in position 45 is Asn, Gly, Gln or Ala
  Variant (46)..(46): Xaa in position 46 is Leu, Ile, Met, Phe or Val
  Variant (47)..(49): Xaa in position 47 to 49 is any amino acid
  Variant (50)..(50): Xaa in position 50 is Arg, Lys or Glu
  Variant (51)..(51): Xaa in position 51 is Phe or Tyr
  Variant (52)..(52): Xaa in position 52 is any amino acid
  Variant (54)..(59): Xaa in position 54 to 59 is any amino acid
  Variant (60)..(60): Xaa in position 60 is any or no amino acid
  Variant (61)..(61): Xaa in position 61 is Trp, Met, Asn or Leu
  Variant (62)..(63): Xaa in position 62 to 63 is any amino acid
  Variant (64)..(65): Xaa in position 64 to 65 is any or no amino acid
  Variant (66)..(66): Xaa in position 66 is Ile, Val or Ala
  Variant (67)..(68): Xaa in position 67 to 68 is any amino acid
  Variant (69)..(69): Xaa in position 69 is Val, Ile, Met or Leu
  Variant (70)..(70): Xaa in position 70 is any amino acid
  Variant (71)..(71): Xaa in position 71 is Ile, Leu, Val, Phe or Ser
  Variant (72)..(74): Xaa in position 72 to 74 is any amino acid
  Variant (76)..(77): Xaa in position 76 to 77 is any amino acid
  Variant (78)..(78): Xaa in position 78 is Gly, Asp, Val or Ala
  Variant (79)..(81): Xaa in position 79 to 81 is any amino acid
  Variant (82)..(82): Xaa in position 82 is Arg or Lys
  Variant (83)..(84): Xaa in position 83 to 84 is any or no amino acid
  Variant (85)..(85): Xaa in position 85 is Tyr or Phe
  Variant (86)..(86): Xaa in position 86 is Tyr, Phe or Trp
  Variant (87)..(87): Xaa in position 87 is Asp, Glu, Ala or Asn
  Variant (88)..(89): Xaa in position 88 to 89 is any amino acid
  Variant (91)..(91): Xaa in position 91 is any amino acid
  Variant (92)..(92): Xaa in position 92 is any or no amino acid
  Variant (93)..(93): Xaa in position 93 is Leu, Ile, Val, Met or Ala
  Variant (94)..(94): Xaa in position 94 is Arg, Lys or Leu
  Variant (96)..(96): Xaa in position 96 is Met, Val, Ile or Leu
  Variant (97)..(97): Xaa in position 97 is Val, Met, Ile, Leu or Phe
  Variant (98)..(98): Xaa in position 98 is Gln, Pro or Thr
  Variant (99)..(99): Xaa in position 99 is Asn or Ser
  Variant (100)..(100): Xaa in position 100 is His, Gln or Pro
  Variant (101)..(102): Xaa in position 101 to 102 is any amino acid
  Variant (103)..(103): Xaa in position 103 is Gln, Glu, Asn or Leu
  Variant (104)..(104): Xaa in position 104 is Leu, Ile, Val, Met or Thr
  Variant (105)..(105): Xaa in position 105 is Leu, Met, Val, Ile, Phe or Tyr
  Variant (106)..(106): Xaa in position 106 is any amino acid
  Variant (107)..(107): Xaa in position 107 is Leu, Met, Ile, Val, Trp or Phe
  Variant (108)..(109): Xaa in position 108 to 109 is any amino acid
  Variant (111)..(111): Xaa in position 111 is Glu, Asp, Ser or Asn
  Variant (112)..(112): Xaa in position 112 is any amino acid
  Variant (114)..(118): Xaa in position 114 to 118 is any amino acid
  Variant (119)..(121): Xaa in position 119 to 121 is any or no amino acid
  Variant (122)..(122): Xaa in position 122 is Ile, Val, Leu, Phe or Met
  Variant (123)..(124): Xaa in position 123 to 124 is any amino acid
  Variant (125)..(125): Xaa in position 125 is Glu, Lys, Ala, Arg or His
  Variant (126)..(126): Xaa in position 126 is Lys or Val
  Variant (127)..(128): Xaa in position 127 to 128 is any amino acid
  Variant (129)..(129): Xaa in position 129 is Val, Ile, Ala, Leu or Phe
  Variant (130)..(130): Xaa in position 130 is Leu, Ile, Val, Phe or Met
  Variant (131)..(140): Xaa in position 131 to 140 is any amino acid
  Variant (141)..(145): Xaa in position 141 to 145 is any or no amino acid
  Variant (146)..(146): Xaa in position 146 is Val, Leu, Ile, Ala or Ser
  Variant (147)..(147): Xaa in position 147 is any amino acid
  Variant (148)..(148): Xaa in position 148 is Gly or Ala
  Variant (149)..(149): Xaa in position 149 is Gln or Arg
  Variant (150)..(150): Xaa in position 150 is Tyr or Phe

SEQ ID NO: 41897 - protein, 44 aa, Artificial sequence; identical to SEQ ID NO: 2918
  Consensus
  Variant (1)..(1): Xaa in position 1 is Tyr or Leu
  Variant (2)..(2): Xaa in position 2 is any amino acid
  Variant (3)..(13): Xaa in position 3 to 13 is any or no amino acid
  Variant (15)..(17): Xaa in position 15 to 17 is any amino acid
  Variant (19)..(19): Xaa in position 19 is Phe or Tyr
  Variant (20)..(25): Xaa in position 20 to 25 is any amino acid
  Variant (26)..(26): Xaa in position 26 is Ile, Val, Leu or Phe
  Variant (27)..(29): Xaa in position 27 to 29 is any amino acid
  Variant (30)..(30): Xaa in position 30 is Arg, Asn, Phe or Gln
  Variant (31)..(31): Xaa in position 31 is Trp or Phe
  Variant (32)..(32): Xaa in position 32 is any amino acid
  Variant (33)..(33): Xaa in position 33 is Gly or Asp
  Variant (34)..(34): Xaa in position 34 is Val or Thr
  Variant (36)..(36): Xaa in position 36 is Phe or Ile
  Variant (37)..(37): Xaa in position 37 is any amino acid
  Variant (38)..(38): Xaa in position 38 is Leu, Met, Ile, Val or Phe
  Variant (39)..(40): Xaa in position 39 to 40 is any amino acid
  Variant (41)..(41): Xaa in position 41 is Gly or Ala
  Variant (43)..(43): Xaa in position 43 is any amino acid
  Variant (44)..(44): Xaa in position 44 is Leu, Met or Val

SEQ ID NO: 41898 - protein, 97 aa, Artificial sequence; identical to SEQ ID NO: 2919
  Consensus
  Variant (1)..(1): Xaa in position 1 is Asn, Asp, Gln, Arg or Lys
  Variant (2)..(4): Xaa in position 2 to 4 is any amino acid
  Variant (5)..(5): Xaa in position 5 is Ile, Leu, Met, Phe or Val
  Variant (6)..(6): Xaa in position 6 is any amino acid
  Variant (7)..(7): Xaa in position 7 is Ile, Leu, Val, Ala or Ser
  Variant (8)..(8): Xaa in position 8 is any amino acid
  Variant (9)..(9): Xaa in position 9 is Pro or His
  Variant (10)..(12): Xaa in position 10 to 12 is any amino acid
  Variant (13)..(13): Xaa in position 13 is Ile, Val, Met, Leu, Phe or Ala
  Variant (14)..(19): Xaa in position 14 to 19 is any amino acid
  Variant (20)..(20): Xaa in position 20 is Lys, Ser or Arg
  Variant (21)..(29): Xaa in position 21 to 29 is any amino acid
  Variant (30)..(35): Xaa in position 30 to 35 is any or no amino acid
  Variant (36)..(36): Xaa in position 36 is Leu, Ile, Met or Val
  Variant (37)..(44): Xaa in position 37 to 44 is any amino acid
  Variant (45)..(64): Xaa in position 45 to 64 is any or no amino acid
  Variant (65)..(65): Xaa in position 65 is Ala, Gly, Pro or Ser
  Variant (66)..(66): Xaa in position 66 is Tyr or Leu
  Variant (67)..(68): Xaa in position 67 to 68 is any amino acid
  Variant (69)..(69): Xaa in position 69 is Leu, Met or Tyr
  Variant (70)..(70): Xaa in position 70 is Leu, Ile, Phe or Met
  Variant (71)..(71): Xaa in position 71 is any amino acid
  Variant (72)..(72): Xaa in position 72 is Asp, Glu, Ala, Asn or His
  Variant (73)..(75): Xaa in position 73 to 75 is any amino acid
  Variant (76)..(76): Xaa in position 76 is Gly, Ser or Asp
  Variant (77)..(80): Xaa in position 77 to 80 is any amino acid
  Variant (81)..(81): Xaa in position 81 is Phe or Tyr
  Variant (82)..(85): Xaa in position 82 to 85 is any amino acid
  Variant (86)..(86): Xaa in position 86 is any or no amino acid
  Variant (87)..(87): Xaa in position 87 is Val, Ile, Leu, Ala or Gln
  Variant (88)..(90): Xaa in position 88 to 90 is any amino acid
  Variant (92)..(96): Xaa in position 92 to 96 is any amino acid
  Variant (97)..(97): Xaa in position 97 is Ile, Val, Leu, Phe or Ala

SEQ ID NO: 41899 - DNA, 1203 bp, Escherichia coli; identical to SEQ ID NO: 13945
  CDS (1)..(1203)

SEQ ID NO: 41900 - protein, 400 aa, Escherichia coli; identical to SEQ ID NO: 13946

SEQ ID NO: 41901 - DNA, 1281 bp, Aquifex aeolicus VF5; identical to SEQ ID NO: 13947
  CDS (1)..(1281): transl_table=11

SEQ ID NO: 41902 - protein, 426 aa, Aquifex aeolicus VF5; identical to SEQ ID NO: 13948

SEQ ID NO: 41903 - DNA, 1260 bp, Neisseria meningitidis Z2491; identical to SEQ ID NO: 13949
  CDS (1)..(1260): transl_table=11

SEQ ID NO: 41904 - protein, 419 aa, Neisseria meningitidis Z2491; identical to SEQ ID NO: 13950

SEQ ID NO: 41905 - DNA, 1425 bp, Deinococcus radiodurans R1; identical to SEQ ID NO: 13951
  CDS (1)..(1425): transl_table=11

SEQ ID NO: 41906 - protein, 474 aa, Deinococcus radiodurans R1; identical to SEQ ID NO: 13952

SEQ ID NO: 41907 - DNA, 1392 bp, Mycobacterium tuberculosis CDC1551; identical to SEQ ID NO: 13953
  CDS (1)..(1392): transl_table=11

SEQ ID NO: 41908 - protein, 463 aa, Mycobacterium tuberculosis CDC1551; identical to SEQ ID NO: 13954

SEQ ID NO: 41909 - DNA, 1203 bp, Salmonella typhimurium LT2; identical to SEQ ID NO: 13955
  CDS (1)..(1203): transl_table=11

SEQ ID NO: 41910 - protein, 400 aa, Salmonella typhimurium LT2; identical to SEQ ID NO: 13956

SEQ ID NO: 41911 - DNA, 1320 bp, Agrobacterium tumefaciens str. C58; identical to SEQ ID NO: 13957
  CDS (1)..(1320): transl_table=11

SEQ ID NO: 41912 - protein, 439 aa, Agrobacterium tumefaciens str. C58; identical to SEQ ID NO: 13958

SEQ ID NO: 41913 - DNA, 1251 bp, Yersinia pestis KIM; identical to SEQ ID NO: 13959
  CDS (1)..(1251): transl_table=11

SEQ ID NO: 41914 - protein, 416 aa, Yersinia pestis KIM; identical to SEQ ID NO: 13960

SEQ ID NO: 41915 - DNA, 1314 bp, Thermosynechococcus elongatus BP-1; identical to SEQ ID NO: 13961
  CDS (1)..(1314): transl_table=11

SEQ ID NO: 41916 - protein, 437 aa, Thermosynechococcus elongatus BP-1; identical to SEQ ID NO: 13962

SEQ ID NO: 41917 - DNA, 1464 bp, Oceanobacillus iheyensis HTE831; identical to SEQ ID NO: 13963
  CDS (1)..(1464): transl_table=11

SEQ ID NO: 41918 - protein, 487 aa, Oceanobacillus iheyensis HTE831; identical to SEQ ID NO: 13964

SEQ ID NO: 41919 - DNA, 1209 bp, Pseudomonas putida KT2440; identical to SEQ ID NO: 13965
  CDS (1)..(1209): transl_table=11

SEQ ID NO: 41920 - protein, 402 aa, Pseudomonas putida KT2440; identical to SEQ ID NO: 13966

SEQ ID NO: 41921 - DNA, 1305 bp, Bradyrhizobium japonicum USDA 110; identical to SEQ ID NO: 13967
  CDS (1)..(1305)

SEQ ID NO: 41922 - protein, 434 aa, Bradyrhizobium japonicum USDA 110; identical to SEQ ID NO: 13968

SEQ ID NO: 41923 - DNA, 1434 bp, Lactobacillus plantarum WCFS1; identical to SEQ ID NO: 13969
  CDS (1)..(1434): transl_table=11

SEQ ID NO: 41924 - protein, 477 aa, Lactobacillus plantarum WCFS1; identical to SEQ ID NO: 13970

SEQ ID NO: 41925 - DNA, 1203 bp, Salmonella enterica subsp. enterica serovar Typhi Ty2; identical to SEQ ID NO: 13971
  CDS (1)..(1203): transl_table=11

SEQ ID NO: 41926 - protein, 400 aa, Salmonella enterica subsp. enterica serovar Typhi Ty2; identical to SEQ ID NO: 13972

SEQ ID NO: 41927 - DNA, 1170 bp, Bacteroides thetaiotaomicron VPI-5482; identical to SEQ ID NO: 13973
  CDS (1)..(1170): transl_table=11

SEQ ID NO: 41928 - protein, 389 aa, Bacteroides thetaiotaomicron VPI-5482; identical to SEQ ID NO: 13974

SEQ ID NO: 41929 - DNA, 1407 bp, Coxiella burnetii RSA 493; identical to SEQ ID NO: 13975
  CDS (1)..(1407): transl_table=11

SEQ ID NO: 41930 - protein, 468 aa, Coxiella burnetii RSA 493; identical to SEQ ID NO: 13976

SEQ ID NO: 41931 - DNA, 1185 bp, Porphyromonas gingivalis W83; identical to SEQ ID NO: 13977
  CDS (1)..(1185): transl_table=11

SEQ ID NO: 41932 - protein, 394 aa, Porphyromonas gingivalis W83; identical to SEQ ID NO: 13978

SEQ ID NO: 41933 - DNA, 1608 bp, Oryza sativa (japonica cultivar-group); identical to SEQ ID NO: 13979
  CDS (1)..(1608)

SEQ ID NO: 41934 - protein, 535 aa, Oryza sativa (japonica cultivar-group); identical to SEQ ID NO: 13980

SEQ ID NO: 41935 - DNA, 1446 bp, Geobacter sulfurreducens PCA; identical to SEQ ID NO: 13981
  CDS (1)..(1446): transl_table=11

SEQ ID NO: 41936 - protein, 481 aa, Geobacter sulfurreducens PCA; identical to SEQ ID NO: 13982

SEQ ID NO: 41937 - DNA, 1437 bp, Treponema denticola ATCC 35405; identical to SEQ ID NO: 13983
  CDS (1)..(1437): transl_table=11

SEQ ID NO: 41938 - protein, 478 aa, Treponema denticola ATCC 35405; identical to SEQ ID NO: 13984

SEQ ID NO: 41939 - DNA, 1293 bp, Eremothecium gossypii; identical to SEQ ID NO: 13985
  CDS (1)..(1293)

SEQ ID NO: 41940 - protein, 430 aa, Eremothecium gossypii; identical to SEQ ID NO: 13986

SEQ ID NO: 41941 - DNA, 1434 bp, Neurospora crassa; identical to SEQ ID NO: 13987
  CDS (1)..(1434)

SEQ ID NO: 41942 - protein, 477 aa, Neurospora crassa; identical to SEQ ID NO: 13988

SEQ ID NO: 41943 - DNA, 5916 bp, Magnaporthe grisea 70-15; identical to SEQ ID NO: 13989
  CDS (1)..(5916)

SEQ ID NO: 41944 - protein, 1971 aa, Magnaporthe grisea 70-15; identical to SEQ ID NO: 13990

SEQ ID NO: 41945 - DNA, 1380 bp, Gibberella zeae PH-1; identical to SEQ ID NO: 13991
  CDS (1)..(1380)

SEQ ID NO: 41946 - protein, 459 aa, Gibberella zeae PH-1; identical to SEQ ID NO: 13992

SEQ ID NO: 41947 - DNA, 1839 bp, Ustilago maydis 521; identical to SEQ ID NO: 13993
  CDS (1)..(1839)

SEQ ID NO: 41948 - protein, 612 aa, Ustilago maydis 521; identical to SEQ ID NO: 13994

SEQ ID NO: 41949 - DNA, 1464 bp, Aspergillus nidulans FGSC A4; identical to SEQ ID NO: 13995
  CDS (1)..(1464)

SEQ ID NO: 41950 - protein, 487 aa, Aspergillus nidulans FGSC A4; identical to SEQ ID NO: 13996

SEQ ID NO: 41951 - DNA, 1296 bp, Candida glabrata CBS138; identical to SEQ ID NO: 13997
  CDS (1)..(1296)

SEQ ID NO: 41952 - protein, 431 aa, Candida glabrata CBS138; identical to SEQ ID NO: 13998

SEQ ID NO: 41953 - DNA, 1284 bp, Kluyveromyces lactis NRRL Y-1140; identical to SEQ ID NO: 13999
  CDS (1)..(1284)

SEQ ID NO: 41954 - protein, 427 aa, Kluyveromyces lactis NRRL Y-1140; identical to SEQ ID NO: 14000

SEQ ID NO: 41955 - DNA, 1269 bp, Debaryomyces hansenii CBS767; identical to SEQ ID NO: 14001
  CDS (1)..(1269)

SEQ ID NO: 41956 - protein, 422 aa, Debaryomyces hansenii CBS767; identical to SEQ ID NO: 14002

SEQ ID NO: 41957 - DNA, 1245 bp, Yarrowia lipolytica CLIB99; identical to SEQ ID NO: 14003
  CDS (1)..(1245)

SEQ ID NO: 41958 - protein, 414 aa, Yarrowia lipolytica CLIB99; identical to SEQ ID NO: 14004

SEQ ID NO: 41959 - DNA, 1362 bp, Cryptococcus neoformans var. neoformans JEC21; identical to SEQ ID NO: 14005
  CDS (1)..(1362)

SEQ ID NO: 41960 - protein, 453 aa, Cryptococcus neoformans var. neoformans JEC21; identical to SEQ ID NO: 14006

SEQ ID NO: 41961 - DNA, 1173 bp, Entamoeba histolytica HM-1:IMSS; identical to SEQ ID NO: 14007
  CDS (1)..(1173)

SEQ ID NO: 41962 - protein, 390 aa, Entamoeba histolytica HM-1:IMSS; identical to SEQ ID NO: 14008

SEQ ID NO: 41963 - DNA, 1266 bp, Candida albicans SC5314; identical to SEQ ID NO: 14009
  CDS (1)..(1266): transl_table=12

SEQ ID NO: 41964 - protein, 421 aa, Candida albicans SC5314; identical to SEQ ID NO: 14010

SEQ ID NO: 41965 - DNA, 1305 bp, Bartonella quintana str. Toulouse; identical to SEQ ID NO: 14011
  CDS (1)..(1305): transl_table=11

SEQ ID NO: 41966 - protein, 434 aa, Bartonella quintana str. Toulouse; identical to SEQ ID NO: 14012

SEQ ID NO: 41967 - DNA, 1305 bp, Bartonella henselae str. Houston-1; identical to SEQ ID NO: 14013
  CDS (1)..(1305): transl_table=11

SEQ ID NO: 41968 - protein, 434 aa, Bartonella henselae str. Houston-1; identical to SEQ ID NO: 14014

SEQ ID NO: 41969 - DNA, 1470 bp, Bacillus licheniformis ATCC 14580; identical to SEQ ID NO: 14015
  CDS (1)..(1470): transl_table=11

SEQ ID NO: 41970 - protein, 489 aa, Bacillus licheniformis ATCC 14580; identical to SEQ ID NO: 14016

SEQ ID NO: 41971 - DNA, 1167 bp, Bacteroides fragilis YCH46; identical to SEQ ID NO: 14017
  CDS (1)..(1167): transl_table=11

SEQ ID NO: 41972 - protein, 388 aa, Bacteroides fragilis YCH46; identical to SEQ ID NO: 14018

SEQ ID NO: 41973 - DNA, 1350 bp, Methylococcus capsulatus str. Bath; identical to SEQ ID NO: 14019
  CDS (1)..(1350): transl_table=11

SEQ ID NO: 41974 - protein, 449 aa, Methylococcus capsulatus str. Bath; identical to SEQ ID NO: 14020

SEQ ID NO: 41975 - DNA, 1317 bp, Nocardia farcinica IFM 10152; identical to SEQ ID NO: 14021
  CDS (1)..(1317): transl_table=11

SEQ ID NO: 41976 - protein, 438 aa, Nocardia farcinica IFM 10152; identical to SEQ ID NO: 14022

SEQ ID NO: 41977 - DNA, 1404 bp, Legionella pneumophila str. Paris; identical to SEQ ID NO: 14023
  CDS (1)..(1404): transl_table=11

SEQ ID NO: 41978 - protein, 467 aa, Legionella pneumophila str. Paris; identical to SEQ ID NO: 14024

SEQ ID NO: 41979 - DNA, 1404 bp, Legionella pneumophila str. Lens; identical to SEQ ID NO: 14025
  CDS (1)..(1404): transl_table=11

SEQ ID NO: 41980 - protein, 467 aa, Legionella pneumophila str. Lens; identical to SEQ ID NO: 14026

SEQ ID NO: 41981 - DNA, 1473 bp, Geobacillus kaustophilus HTA426; identical to SEQ ID NO: 14027
  CDS (1)..(1473): transl_table=11

SEQ ID NO: 41982 - protein, 490 aa, Geobacillus kaustophilus HTA426; identical to SEQ ID NO: 14028

SEQ ID NO: 41983 - DNA, 1347 bp, Idiomarina loihiensis L2TR; identical to SEQ ID NO: 14029
  CDS (1)..(1347): transl_table=11

SEQ ID NO: 41984 - protein, 448 aa, Idiomarina loihiensis L2TR; identical to SEQ ID NO: 14030

SEQ ID NO: 41985 - DNA, 1344 bp, Silicibacter pomeroyi DSS-3; identical to SEQ ID NO: 14031
  CDS (1)..(1344): transl_table=11

SEQ ID NO: 41986 - protein, 447 aa, Silicibacter pomeroyi DSS-3; identical to SEQ ID NO: 14032

SEQ ID NO: 41987 - DNA, 1260 bp, Neisseria gonorrhoeae FA 1090; identical to SEQ ID NO: 14033
  CDS (1)..(1260): transl_table=11

SEQ ID NO: 41988 - protein, 419 aa, Neisseria gonorrhoeae FA 1090; identical to SEQ ID NO: 14034

SEQ ID NO: 41989 - DNA, 1167 bp, Bacteroides fragilis NCTC 9343; identical to SEQ ID NO: 14035
  CDS (1)..(1167): transl_table=11

SEQ ID NO: 41990 - protein, 388 aa, Bacteroides fragilis NCTC 9343; identical to SEQ ID NO: 14036

SEQ ID NO: 41991 - DNA, 1251 bp, Salmonella enterica subsp. enterica serovar Choleraesuis str; identical to SEQ ID NO: 14037
  CDS (1)..(1251): transl_table=11

SEQ ID NO: 41992 - protein, 416 aa, Salmonella enterica subsp. enterica serovar Choleraesuis str; identical to SEQ ID NO: 14038

SEQ ID NO: 41993 - DNA, 1224 bp, Pseudomonas syringae pv. syringae B728a; identical to SEQ ID NO: 14039
  CDS (1)..(1224)

SEQ ID NO: 41994 - protein, 407 aa, Pseudomonas syringae pv. syringae B728a; identical to SEQ ID NO: 14040

SEQ ID NO: 41995 - DNA, 1326 bp, Corynebacterium jeikeium K411; identical to SEQ ID NO: 14041
  CDS (1)..(1326): transl_table=11

SEQ ID NO: 41996 - protein, 441 aa, Corynebacterium jeikeium K411; identical to SEQ ID NO: 14042

SEQ ID NO: 41997 - DNA, 1293 bp, Rhodobacter sphaeroides 2.4.1; identical to SEQ ID NO: 14043
  CDS (1)..(1293)

SEQ ID NO: 41998 - protein, 430 aa, Rhodobacter sphaeroides 2.4.1; identical to SEQ ID NO: 14044

SEQ ID NO: 41999 - DNA, 1134 bp, Xylella fastidiosa Ann-1; identical to SEQ ID NO: 14045
  CDS (1)..(1134)

SEQ ID NO: 42000 - protein, 377 aa, Xylella fastidiosa Ann-1; identical to SEQ ID NO: 14046

SEQ ID NO: 42001 - DNA, 1464 bp, Leuconostoc mesenteroides subsp. mesenteroides ATCC 8293; identical to SEQ ID NO: 14047
  CDS (1)..(1464)

SEQ ID NO: 42002 - protein, 487 aa, Leuconostoc mesenteroides subsp. mesenteroides ATCC 8293; identical to SEQ ID NO: 14048

SEQ ID NO: 42003 - DNA, 1242 bp, Psychrobacter sp. 273-4; identical to SEQ ID NO: 14049
  CDS (1)..(1242)

SEQ ID NO: 42004 - protein, 413 aa, Psychrobacter sp. 273-4; identical to SEQ ID NO: 14050

SEQ ID NO: 42005 - DNA, 1179 bp, Ralstonia eutropha JMP134; identical to SEQ ID NO: 14051
  CDS (1)..(1179)

SEQ ID NO: 42006 - protein, 392 aa, Ralstonia eutropha JMP134; identical to SEQ ID NO: 14052

SEQ ID NO: 42007 - DNA, 1200 bp, Burkholderia cepacia R18194; identical to SEQ ID NO: 14053
  CDS (1)..(1200)

SEQ ID NO: 42008 - protein, 399 aa, Burkholderia cepacia R18194; identical to SEQ ID NO: 14054

SEQ ID NO: 42009 - DNA, 1224 bp, Pseudomonas fluorescens PfO-1; identical to SEQ ID NO: 14055
  CDS (1)..(1224)

SEQ ID NO: 42010 - protein, 407 aa, Pseudomonas fluorescens PfO-1; identical to SEQ ID NO: 14056

SEQ ID NO: 42011 - DNA, 1197 bp, Burkholderia fungorum LB400; identical to SEQ ID NO: 14057
  CDS (1)..(1197)

SEQ ID NO: 42012 - protein, 398 aa, Burkholderia fungorum LB400; identical to SEQ ID NO: 14058

SEQ ID NO: 42013 - DNA, 1428 bp, Oenococcus oeni PSU-1; identical to SEQ ID NO: 14059
  CDS (1)..(1428)

SEQ ID NO: 42014 - protein, 475 aa, Oenococcus oeni PSU-1; identical to SEQ ID NO: 14060

SEQ ID NO: 42015 - DNA, 1380 bp, Trichodesmium erythraeum IMS101; identical to SEQ ID NO: 14061
  CDS (1)..(1380)

SEQ ID NO: 42016 - protein, 459 aa, Trichodesmium erythraeum IMS101; identical to SEQ ID NO: 14062

SEQ ID NO: 42017 - DNA, 1434 bp, Campylobacter upsaliensis RM3195; identical to SEQ ID NO: 14063
  CDS (1)..(1434): transl_table=11

SEQ ID NO: 42018 - protein, 477 aa, Campylobacter upsaliensis RM3195; identical to SEQ ID NO: 14064

SEQ ID NO: 42019 - DNA, 1488 bp, Lactococcus lactis subsp. cremoris SK11; identical to SEQ ID NO: 14065
  CDS (1)..(1488)

SEQ ID NO: 42020 - protein, 495 aa, Lactococcus lactis subsp. cremoris SK11; identical to SEQ ID NO: 14066

SEQ ID NO: 42021 - DNA, 1461 bp, Deinococcus geothermalis DSM 11300; identical to SEQ ID NO: 14067
  CDS (1)..(1461): transl_table=11

SEQ ID NO: 42022 - protein, 486 aa, Deinococcus geothermalis DSM 11300; identical to SEQ ID NO: 14068

SEQ ID NO: 42023 - DNA, 1359 bp, Azotobacter vinelandii AvOP; identical to SEQ ID NO: 14069
  CDS (1)..(1359): transl_table=11

SEQ ID NO: 42024 - protein, 452 aa, Azotobacter vinelandii AvOP; identical to SEQ ID NO: 14070

SEQ ID NO: 42025 - DNA, 1356 bp, Burkholderia vietnamiensis G4; identical to SEQ ID NO: 14071
  CDS (1)..(1356): transl_table=11

SEQ ID NO: 42026 - protein, 451 aa, Burkholderia vietnamiensis G4; identical to SEQ ID NO: 14072

SEQ ID NO: 42027 - DNA, 1200 bp, Burkholderia mallei 10229; identical to SEQ ID NO: 14073
  CDS (1)..(1200)

SEQ ID NO: 42028 - protein, 399 aa, Burkholderia mallei 10229; identical to SEQ ID NO: 14074

SEQ ID NO: 42029 - DNA, 1200 bp, Burkholderia cenocepacia AU 1054; identical to SEQ ID NO: 14075
  CDS (1)..(1200): transl_table=11

SEQ ID NO: 42030 - protein, 399 aa, Burkholderia cenocepacia AU 1054; identical to SEQ ID NO: 14076

SEQ ID NO: 42031 - DNA, 1356 bp, Burkholderia pseudomallei 1655; identical to SEQ ID NO: 14077
  CDS (1)..(1356)

SEQ ID NO: 42032 - protein, 451 aa, Burkholderia pseudomallei 1655; identical to SEQ ID NO: 14078

SEQ ID NO: 42033 - DNA, 1173 bp, Chromohalobacter salexigens DSM 3043; identical to SEQ ID NO: 14079
  CDS (1)..(1173): transl_table=11

SEQ ID NO: 42034 - protein, 390 aa, Chromohalobacter salexigens DSM 3043; identical to SEQ ID NO: 14080

SEQ ID NO: 42035 - DNA, 1356 bp, Burkholderia pseudomallei 668; identical to SEQ ID NO: 14081
  CDS (1)..(1356)

SEQ ID NO: 42036 - protein, 451 aa, Burkholderia pseudomallei 668; identical to SEQ ID NO: 14082

SEQ ID NO: 42037 - DNA, 1269 bp, Polaromonas sp. JS666; identical to SEQ ID NO: 14083
  CDS (1)..(1269): transl_table=11

SEQ ID NO: 42038 - protein, 422 aa, Polaromonas sp. JS666; identical to SEQ ID NO: 14084

SEQ ID NO: 42039 - DNA, 1341 bp, Crocosphaera watsonii WH 8501; identical to SEQ ID NO: 14085
  CDS (1)..(1341): transl_table=11

SEQ ID NO: 42040 - protein, 446 aa, Crocosphaera watsonii WH 8501; identical to SEQ ID NO: 14086

SEQ ID NO: 42041 - DNA, 1431 bp, Geobacter metallireducens GS-15; identical to SEQ ID NO: 14087
  CDS (1)..(1431): transl_table=11

SEQ ID NO: 42042 - protein, 476 aa, Geobacter metallireducens GS-15; identical to SEQ ID NO: 14088

SEQ ID NO: 42043 - DNA, 1206 bp, Methanosarcina barkeri str. fusaro; identical to SEQ ID NO: 14089
  CDS (1)..(1206): transl_table=11

SEQ ID NO: 42044 - protein, 401 aa, Methanosarcina barkeri str. fusaro; identical to SEQ ID NO: 14090

SEQ ID NO: 42045 - DNA, 1206 bp, Desulfuromonas acetoxidans DSM 684; identical to SEQ ID NO: 14091
  CDS (1)..(1206): transl_table=11

SEQ ID NO: 42046 - protein, 401 aa, Desulfuromonas acetoxidans DSM 684; identical to SEQ ID NO: 14092

SEQ ID NO: 42047 - DNA, 1293 bp, Jannaschia sp. CCS1; identical to SEQ ID NO: 14093
  CDS (1)..(1293): transl_table=11

SEQ ID NO: 42048 - protein, 430 aa, Jannaschia sp. CCS1; identical to SEQ ID NO: 14094

SEQ ID NO: 42049 - DNA, 1458 bp, Desulfitobacterium hafniense DCB-2; identical to SEQ ID NO: 14095
  CDS (1)..(1458): transl_table=11

SEQ ID NO: 42050 - protein, 485 aa, Desulfitobacterium hafniense DCB-2; identical to SEQ ID NO: 14096

SEQ ID NO: 42051 - DNA, 1218 bp, Methanococcoides burtonii DSM 6242; identical to SEQ ID NO: 14097
  CDS (1)..(1218): transl_table=11

SEQ ID NO: 42052 - protein, 405 aa, Methanococcoides burtonii DSM 6242; identical to SEQ ID NO: 14098

SEQ ID NO: 42053 - DNA, 1575 bp, Frankia sp. EAN1pec; identical to SEQ ID NO: 14099
  CDS (1)..(1575): transl_table=11

SEQ ID NO: 42054 - protein, 524 aa, Frankia sp. EAN1pec; identical to SEQ ID NO: 14100

SEQ ID NO: 42055 - DNA, 1200 bp, Ralstonia metallidurans CH34; identical to SEQ ID NO: 14101
  CDS (1)..(1200): transl_table=11

SEQ ID NO: 42056 - protein, 399 aa, Ralstonia metallidurans CH34; identical to SEQ ID NO: 14102

SEQ ID NO: 42057 - DNA, 1341 bp, Magnetococcus sp. MC-1; identical to SEQ ID NO: 14103
  CDS (1)..(1341): transl_table=11

SEQ ID NO: 42058 - protein, 446 aa, Magnetococcus sp. MC-1; identical to SEQ ID NO: 14104

SEQ ID NO: 42059 - DNA, 1305 bp, Mesorhizobium sp. BNC1; identical to SEQ ID NO: 14105
  CDS (1)..(1305): transl_table=11

SEQ ID NO: 42060 - protein, 434 aa, Mesorhizobium sp. BNC1; identical to SEQ ID NO: 14106

SEQ ID NO: 42061 - DNA, 1290 bp, Silicibacter sp. TM1040; identical to SEQ ID NO: 14107
  CDS (1)..(1290): transl_table=11

SEQ ID NO: 42062 - protein, 429 aa, Silicibacter sp. TM1040; identical to SEQ ID NO: 14108

SEQ ID NO: 42063 - DNA, 1305 bp, Nitrobacter hamburgensis X14; identical to SEQ ID NO: 14109
  CDS (1)..(1305): transl_table=11

SEQ ID NO: 42064 - protein, 434 aa, Nitrobacter hamburgensis X14; identical to SEQ ID NO: 14110

SEQ ID NO: 42065 - DNA, 1308 bp, Paracoccus denitrificans PD1222; identical to SEQ ID NO: 14111
  CDS (1)..(1308): transl_table=11

SEQ ID NO: 42066 - protein, 435 aa, Paracoccus denitrificans PD1222; identical to SEQ ID NO: 14112

SEQ ID NO: 42067 - DNA, 1230 bp, Pseudomonas fluorescens; identical to SEQ ID NO: 14113
  CDS (1)..(1230): transl_table=11

SEQ ID NO: 42068 - protein, 409 aa, Pseudomonas fluorescens; identical to SEQ ID NO: 14114

SEQ ID NO: 42069 - DNA, 1215 bp, Pseudomonas fluorescens; identical to SEQ ID NO: 14115
  CDS (1)..(1215): transl_table=11

SEQ ID NO: 42070 - protein, 404 aa, Pseudomonas fluorescens; identical to SEQ ID NO: 14116

SEQ ID NO: 42071 - DNA, 1443 bp, Staphylococcus haemolyticus; identical to SEQ ID NO: 14117
  CDS (1)..(1443): transl_table=11

SEQ ID NO: 42072 - protein, 480 aa, Staphylococcus haemolyticus; identical to SEQ ID NO: 14118

SEQ ID NO: 42073 - DNA, 1245 bp, Leishmania major; identical to SEQ ID NO: 14119
  CDS (1)..(1245)

SEQ ID NO: 42074 - protein, 414 aa, Leishmania major; identical to SEQ ID NO: 14120

SEQ ID NO: 42075 - DNA, 1380 bp, Gibberella moniliformis; identical to SEQ ID NO: 14121
  CDS (1)..(1380)

SEQ ID NO: 42076 - protein, 459 aa, Gibberella moniliformis; identical to SEQ ID NO: 14122

SEQ ID NO: 42077 - DNA, 1233 bp, Schizosaccharomyces pombe; identical to SEQ ID NO: 14123
  CDS (1)..(1233)

SEQ ID NO: 42078 - protein, 410 aa, Schizosaccharomyces pombe; identical to SEQ ID NO: 14124

SEQ ID NO: 42079 - DNA, 1290 bp, Saccharomyces cerevisiae; identical to SEQ ID NO: 14125
  CDS (1)..(1290)

SEQ ID NO: 42080 - protein, 429 aa, Saccharomyces cerevisiae; identical to SEQ ID NO: 14126

SEQ ID NO: 42081 - DNA, 1200 bp, Pseudomonas aeruginosa; identical to SEQ ID NO: 14127
  CDS (1)..(1200): transl_table=11

SEQ ID NO: 42082 - protein, 399 aa, Pseudomonas aeruginosa; identical to SEQ ID NO: 14128

SEQ ID NO: 42083 - DNA, 1197 bp, Pseudomonas aeruginosa; identical to SEQ ID NO: 14129
  CDS (1)..(1197): transl_table=11

SEQ ID NO: 42084 - protein, 398 aa, Pseudomonas aeruginosa; identical to SEQ ID NO: 14130

SEQ ID NO: 42085 - DNA, 1224 bp, Acinetobacter sp; identical to SEQ ID NO: 14131
  CDS (1)..(1224): transl_table=11

SEQ ID NO: 42086 - protein, 407 aa, Acinetobacter sp; identical to SEQ ID NO: 14132

SEQ ID NO: 42087 - DNA, 1218 bp, Bordetella pertussis; identical to SEQ ID NO: 14133
  CDS (1)..(1218): transl_table=11

SEQ ID NO: 42088 - protein, 405 aa, Bordetella pertussis; identical to SEQ ID NO: 14134

SEQ ID NO: 42089 - DNA, 1305 bp, Brucella melitensis; identical to SEQ ID NO: 14135
  CDS (1)..(1305): transl_table=11

SEQ ID NO: 42090 - protein, 434 aa, Brucella melitensis; identical to SEQ ID NO: 14136

SEQ ID NO: 42091 - DNA, 1305 bp, Brucella suis; identical to SEQ ID NO: 14137
  CDS (1)..(1305)

SEQ ID NO: 42092 - protein, 434 aa, Brucella suis; identical to SEQ ID NO: 14138

SEQ ID NO: 42093 - DNA, 1200 bp, Buchnera aphidicola; identical to SEQ ID NO: 14139
  CDS (1)..(1200): transl_table=11

SEQ ID NO: 42094 - protein, 399 aa, Buchnera aphidicola; identical to SEQ ID NO: 14140

SEQ ID NO: 42095 - DNA, 1197 bp, Buchnera aphidicola; identical to SEQ ID NO: 14141
  CDS (1)..(1197): transl_table=11

SEQ ID NO: 42096 - protein, 398 aa, Buchnera aphidicola; identical to SEQ ID NO: 14142

SEQ ID NO: 42097 - DNA, 1200 bp, Burkholderia mallei; identical to SEQ ID NO: 14143
  CDS (1)..(1200): transl_table=11

SEQ ID NO: 42098 - protein, 399 aa, Burkholderia mallei; identical to SEQ ID NO: 14144

SEQ ID NO: 42099 - DNA, 1209 bp, Chromobacterium violaceum; identical to SEQ ID NO: 14145
  CDS (1)..(1209): transl_table=11

SEQ ID NO: 42100 - protein, 402 aa, Chromobacterium violaceum; identical to SEQ ID NO: 14146

SEQ ID NO: 42101 - DNA, 1206 bp, Erwinia carotovora; identical to SEQ ID NO: 14147
  CDS (1)..(1206): transl_table=11

SEQ ID NO: 42102 - protein, 401 aa, Erwinia carotovora; identical to SEQ ID NO: 14148

SEQ ID NO: 42103 - DNA, 1215 bp, Methanosarcina acetivorans; identical to SEQ ID NO: 14149
  CDS (1)..(1215): transl_table=11

SEQ ID NO: 42104 - protein, 404 aa, Methanosarcina acetivorans; identical to SEQ ID NO: 14150

SEQ ID NO: 42105 - DNA, 1209 bp, Neisseria gonorrhoeae; identical to SEQ ID NO: 14151
  CDS (1)..(1209)

SEQ ID NO: 42106 - protein, 402 aa, Neisseria gonorrhoeae; identical to SEQ ID NO: 14152

SEQ ID NO: 42107 - DNA, 1209 bp, Neisseria meningitidis; identical to SEQ ID NO: 14153
  CDS (1)..(1209)

SEQ ID NO: 42108 - protein, 402 aa, Neisseria meningitidis; identical to SEQ ID NO: 14154

SEQ ID NO: 42109 - DNA, 1209 bp, Neisseria meningitidis; identical to SEQ ID NO: 14155
  CDS (1)..(1209): transl_table=11

SEQ ID NO: 42110 - protein, 402 aa, Neisseria meningitidis; identical to SEQ ID NO: 14156

SEQ ID NO: 42111 - DNA, 1215 bp, Photorhabdus luminescens; identical to SEQ ID NO: 14157
  CDS (1)..(1215): transl_table=11

SEQ ID NO: 42112 - protein, 404 aa, Photorhabdus luminescens; identical to SEQ ID NO: 14158

SEQ ID NO: 42113 - DNA, 1218 bp, Photobacterium profundum; identical to SEQ ID NO: 14159
  CDS (1)..(1218): transl_table=11

SEQ ID NO: 42114 - protein, 405 aa, Photobacterium profundum; identical to SEQ ID NO: 14160

SEQ ID NO: 42115 - DNA, 1170 bp, Ralstonia solanacearum; identical to SEQ ID NO: 14161
  CDS (1)..(1170)

SEQ ID NO: 42116 - protein, 389 aa, Ralstonia solanacearum; identical to SEQ ID NO: 14162

SEQ ID NO: 42117 - DNA, 1305 bp, Rhizobium loti; identical to SEQ ID NO: 14163
  CDS (1)..(1305): transl_table=11

SEQ ID NO: 42118 - protein, 434 aa, Rhizobium loti; identical to SEQ ID NO: 14164

SEQ ID NO: 42119 - DNA, 1305 bp, Rhizobium meliloti; identical to SEQ ID NO: 14165
  CDS (1)..(1305): transl_table=11

SEQ ID NO: 42120 - protein, 434 aa, Rhizobium meliloti; identical to SEQ ID NO: 14166

SEQ ID NO: 42121 - DNA, 1203 bp, Salmonella choleraesuis; identical to SEQ ID NO: 14167
  CDS (1)..(1203)

SEQ ID NO: 42122 - protein, 400 aa, Salmonella choleraesuis; identical to SEQ ID NO: 14168

SEQ ID NO: 42123 - DNA, 1203 bp, Salmonella paratyphi; identical to SEQ ID NO: 14169
  CDS (1)..(1203): transl_table=11

SEQ ID NO: 42124 - protein, 400 aa, Salmonella paratyphi; identical to SEQ ID NO: 14170

SEQ ID NO: 42125 - DNA, 1308 bp, Vibrio cholerae; identical to SEQ ID NO: 14171
  CDS (1)..(1308): transl_table=11

SEQ ID NO: 42126 - protein, 435 aa, Vibrio cholerae; identical to SEQ ID NO: 14172

SEQ ID NO: 42127 - DNA, 1311 bp, Vibrio parahaemolyticus; identical to SEQ ID NO: 14173
  CDS (1)..(1311): transl_table=11

SEQ ID NO: 42128 - protein, 436 aa, Vibrio parahaemolyticus; identical to SEQ ID NO: 14174

SEQ ID NO: 42129 - DNA, 1314 bp, Vibrio vulnificus; identical to SEQ ID NO: 14175
  CDS (1)..(1314): transl_table=11

SEQ ID NO: 42130 - protein, 437 aa, Vibrio vulnificus; identical to SEQ ID NO: 14176

SEQ ID NO: 42131 - DNA, 1314 bp, Vibrio vulnificus; identical to SEQ ID NO: 14177
  CDS (1)..(1314): transl_table=11

SEQ ID NO: 42132 - protein, 437 aa, Vibrio vulnificus; identical to SEQ ID NO: 14178

SEQ ID NO: 42133 - DNA, 1179 bp, Xanthomonas axonopodis; identical to SEQ ID NO: 14179
  CDS (1)..(1179): transl_table=11

SEQ ID NO: 42134 - protein, 392 aa, Xanthomonas axonopodis; identical to SEQ ID NO: 14180

SEQ ID NO: 42135 - DNA, 1197 bp, Xanthomonas campestris; identical to SEQ ID NO: 14181
  CDS (1)..(1197): transl_table=11

SEQ ID NO: 42136 - protein, 398 aa, Xanthomonas campestris; identical to SEQ ID NO: 14182

SEQ ID NO: 42137 - DNA, 1185 bp, Xylella fastidiosa; identical to SEQ ID NO: 14183
  CDS (1)..(1185): transl_table=11

SEQ ID NO: 42138 - protein, 394 aa, Xylella fastidiosa; identical to SEQ ID NO: 14184

SEQ ID NO: 42139 - DNA, 1185 bp, Xylella fastidiosa; identical to SEQ ID NO: 14185
  CDS (1)..(1185): transl_table=11

SEQ ID NO: 42140 - protein, 394 aa, Xylella fastidiosa; identical to SEQ ID NO: 14186

SEQ ID NO: 42141 - DNA, 24 bp, Artificial sequence
  Primer sequence
atgacacaattcgcttctcctgtt

SEQ ID NO: 42142 - DNA, 26 bp, Artificial sequence
  Primer sequence
ttaactggcttttttaatatgcggaa

SEQ ID NO: 42143 - protein, 581 aa, Artificial sequence; identical to SEQ ID NO: 14189
  Consensus
  Variant (3)..(3): Xaa in position 3 is any amino acid
  Variant (20)..(22): Xaa in position 20 to 22 is any amino acid
  Variant (23)..(24): Xaa in position 23 to 24 is any or no amino acid
  Variant (27)..(29): Xaa in position 27 to 29 is any amino acid
  Variant (31)..(31): Xaa in position 31 is any amino acid
  Variant (33)..(33): Xaa in position 33 is any amino acid
  Variant (35)..(36): Xaa in position 35 to 36 is any amino acid
  Variant (38)..(42): Xaa in position 38 to 42 is any amino acid
  Variant (43)..(53): Xaa in position 43 to 53 is any or no amino acid
  Variant (56)..(57): Xaa in position 56 to 57 is any amino acid
  Variant (60)..(60): Xaa in position 60 is any amino acid
  Variant (62)..(63): Xaa in position 62 to 63 is any amino acid
  Variant (68)..(68): Xaa in position 68 is any amino acid
  Variant (72)..(72): Xaa in position 72 is any amino acid
  Variant (75)..(76): Xaa in position 75 to 76 is any amino acid
  Variant (78)..(78): Xaa in position 78 is any amino acid
  Variant (80)..(88): Xaa in position 80 to 88 is any or no amino acid
  Variant (95)..(96): Xaa in position 95 to 96 is any amino acid
  Variant (100)..(103): Xaa in position 100 to 103 is any amino acid
  Variant (105)..(105): Xaa in position 105 is any amino acid
  Variant (107)..(109): Xaa in position 107 to 109 is any amino acid
  Variant (110)..(126): Xaa in position 110 to 126 is any or no amino acid
  Variant (128)..(128): Xaa in position 128 is any or no amino acid
  Variant (130)..(130): Xaa in position 130 is any or no amino acid
  Variant (132)..(132): Xaa in position 132 is any or no amino acid
  Variant (134)..(134): Xaa in position 134 is any or no amino acid
  Variant (136)..(137): Xaa in position 136 to 137 is any amino acid
  Variant (138)..(138): Xaa in position 138 is any or no amino acid
  Variant (153)..(154): Xaa in position 153 to 154 is any amino acid
  Variant (156)..(156): Xaa in position 156 is any amino acid
  Variant (158)..(161): Xaa in position 158 to 161 is any amino acid
  Variant (162)..(162): Xaa in position 162 is any or no amino acid
  Variant (164)..(172): Xaa in position 164 to 172 is any amino acid
  Variant (174)..(176): Xaa in position 174 to 176 is any amino acid
  Variant (178)..(183): Xaa in position 178 to 183 is any amino acid
  Variant (184)..(198): Xaa in position 184 to 198 is any or no amino acid
  Variant (208)..(208): Xaa in position 208 is any amino acid
  Variant (210)..(212): Xaa in position 210 to 212 is any amino acid
  Variant (214)..(215): Xaa in position 214 to 215 is any amino acid
  Variant (218)..(218): Xaa in position 218 is any amino acid
  Variant (221)..(222): Xaa in position 221 to 222 is any amino acid
  Variant (224)..(224): Xaa in position 224 is any amino acid
  Variant (225)..(236): Xaa in position 225 to 236 is any or no amino acid
  Variant (238)..(238): Xaa in position 238 is any or no amino acid
  Variant (244)..(245): Xaa in position 244 to 245 is any amino acid
  Variant (250)..(250): Xaa in position 250 is any amino acid
  Variant (252)..(252): Xaa in position 252 is any amino acid
  Variant (263)..(263): Xaa in position 263 is any amino acid
  Variant (265)..(266): Xaa in position 265 to 266 is any amino acid
  Variant (269)..(270): Xaa in position 269 to 270 is any amino acid
  Variant (271)..(288): Xaa in position 271 to 288 is any or no amino acid
  Variant (290)..(291): Xaa in position 290 to 291 is any amino acid
  Variant (294)..(295): Xaa in position 294 to 295 is any amino acid
  Variant (298)..(299): Xaa in position 298 to 299 is any amino acid
  Variant (302)..(303): Xaa in position 302 to 303 is any amino acid
  Variant (305)..(305): Xaa in position 305 is any amino acid
  Variant (306)..(316): Xaa in position 306 to 316 is any or no amino acid
  Variant (318)..(318): Xaa in position 318 is any amino acid
  Variant (326)..(329): Xaa in position 326 to 329 is any amino acid
  Variant (334)..(334): Xaa in position 334 is any amino acid
  Variant (337)..(337): Xaa in position 337 is any amino acid
  Variant (338)..(391): Xaa in position 338 to 391 is any or no amino acid
  Variant (394)..(394): Xaa in position 394 is any amino acid
  Variant (397)..(397): Xaa in position 397 is any amino acid
  Variant (401)..(401): Xaa in position 401 is any amino acid
  Variant (407)..(408): Xaa in position 407 to 408 is any amino acid
  Variant (416)..(416): Xaa in position 416 is any amino acid
  Variant (418)..(418): Xaa in position 418 is any amino acid
  Variant (419)..(427): Xaa in position 419 to 427 is any or no amino acid
  Variant (430)..(430): Xaa in position 430 is any amino acid
  Variant (433)..(442): Xaa in position 433 to 442 is any or no amino acid
  Variant (453)..(453): Xaa in position 453 is any amino acid
  Variant (455)..(455): Xaa in position 455 is any amino acid
  Variant (457)..(457): Xaa in position 457 is any amino acid
  Variant (459)..(459): Xaa in position 459 is any amino acid
  Variant (461)..(466): Xaa in position 461 to 466 is any amino acid
  Variant (468)..(474): Xaa in position 468 to 474 is any or no amino acid
  Variant (484)..(484): Xaa in position 484 is any amino acid
  Variant (489)..(491): Xaa in position 489 to 491 is any amino acid
  Variant (492)..(531): Xaa in position 492 to 531 is any or no amino acid
  Variant (541)..(542): Xaa in position 541 to 542 is any amino acid
  Variant (545)..(545): Xaa in position 545 is any amino acid
  Variant (553)..(553): Xaa in position 553 is any amino acid
  Variant (557)..(557): Xaa in position 557 is any amino acid
  Variant (559)..(560): Xaa in position 559 to 560 is any amino acid
  Variant (561)..(575): Xaa in position 561 to 575 is any or no amino acid
  Variant (578)..(579): Xaa in position 578 to 579 is any amino acid

SEQ ID NO: 42144 - protein, 10 aa, Artificial sequence
  Consensus
  Variant (2)..(2): Xaa in position 2 is any amino acid
  Variant (3)..(3): Xaa in position 3 is Asn or Thr
  Variant (5)..(5): Xaa in position 5 is any amino acid
  Variant (7)..(7): Xaa in position 7 is any amino acid
  Variant (8)..(8): Xaa in position 8 is Phe, Ile, Leu or Val
  Variant (9)..(9): Xaa in position 9 is any amino acid
LXXDXYXXXM

SEQ ID NO: 42145 - protein, 25 aa, Artificial sequence
  Consensus
  Variant (2)..(4): Xaa in position 2 to 4 is any or no amino acid
  Variant (8)..(10): Xaa in position 8 to 10 is any amino acid
  Variant (11)..(11): Xaa in position 11 is Ala or Gly
  Variant (12)..(14): Xaa in position 12 to 14 is any amino acid
  Variant (15)..(15): Xaa in position 15 is Ala, Asp, Glu, Gly, Asn, Gln or Ser
  Variant (16)..(19): Xaa in position 16 to 19 is any amino acid
  Variant (22)..(22): Xaa in position 22 is any amino acid
  Variant (25)..(25): Xaa in position 25 is Ala, Glu, Gln or Ser
GXXXTSNXXXXXXXXXXXXGTXAHX

SEQ ID NO: 42146 - DNA, 1482 bp, Escherichia coli; identical to SEQ ID NO: 14192
  CDS (1)..(1482)

SEQ ID NO: 42147 - protein, 493 aa, Escherichia coli; identical to SEQ ID NO: 14193

SEQ ID NO: 42148 - DNA, 1401 bp, Mesorhizobium loti MAFF303099; identical to SEQ ID NO: 14194
  CDS (1)..(1401): transl_table=11

SEQ ID NO: 42149 - protein, 466 aa, Mesorhizobium loti MAFF303099; identical to SEQ ID NO: 14195

SEQ ID NO: 42150 - DNA, 1401 bp, Mesorhizobium loti MAFF303099; identical to SEQ ID NO: 14196
  CDS (1)..(1401): transl_table=11

SEQ ID NO: 42151 - protein, 466 aa, Mesorhizobium loti MAFF303099; identical to SEQ ID NO: 14197

SEQ ID NO: 42152 - DNA, 1197 bp, Bacillus halodurans C-125; identical to SEQ ID NO: 14198
  CDS (1)..(1197): transl_table=11

SEQ ID NO: 42153 - protein, 398 aa, Bacillus halodurans C-125; identical to SEQ ID NO: 14199

SEQ ID NO: 42154 - DNA, 1545 bp, Pasteurella multocida subsp. multocida str. Pm70; identical to SEQ ID NO: 14200
  CDS (1)..(1545): transl_table=11

SEQ ID NO: 42155 - protein, 514 aa, Pasteurella multocida subsp. multocida str. Pm70; identical to SEQ ID NO: 14201

SEQ ID NO: 42156 - DNA, 1206 bp, Pseudomonas aeruginosa PAO1; identical to SEQ ID NO: 14202
  CDS (1)..(1206): transl_table=11

SEQ ID NO: 42157 - protein, 401 aa, Pseudomonas aeruginosa PAO1; identical to SEQ ID NO: 14203

SEQ ID NO: 42158 - DNA, 1080 bp, Pseudomonas aeruginosa PAO1; identical to SEQ ID NO: 14204
  CDS (1)..(1080): transl_table=11

SEQ ID NO: 42159 - protein, 359 aa, Pseudomonas aeruginosa PAO1; identical to SEQ ID NO: 14205

SEQ ID NO: 42160 - DNA, 1590 bp, Pseudomonas aeruginosa PAO1; identical to SEQ ID NO: 14206
  CDS (1)..(1590): transl_table=11

SEQ ID NO: 42161 - protein, 529 aa, Pseudomonas aeruginosa PAO1; identical to SEQ ID NO: 14207

SEQ ID NO: 42162 - DNA, 1446 bp, Lactococcus lactis subsp. lactis Il1403; identical to SEQ ID NO: 14208
  CDS (1)..(1446): transl_table=11

SEQ ID NO: 42163 - protein, 481 aa, Lactococcus lactis subsp. lactis Il1403; identical to SEQ ID NO: 14209

SEQ ID NO: 42164 - DNA, 1464 bp, Lactococcus lactis subsp. lactis Il1403; identical to SEQ ID NO: 14210
  CDS (1)..(1464): transl_table=11

SEQ ID NO: 42165 - protein, 487 aa, Lactococcus lactis subsp. lactis Il1403; identical to SEQ ID NO: 14211

SEQ ID NO: 42166 - DNA, 1527 bp, Neisseria meningitidis MC58; identical to SEQ ID NO: 14212
  CDS (1)..(1527): transl_table=11

SEQ ID NO: 42167 - protein, 508 aa, Neisseria meningitidis MC58; identical to SEQ ID NO: 14213

SEQ ID NO: 42168 - DNA, 1959 bp, Xylella fastidiosa 9a5c; identical to SEQ ID NO: 14214
  CDS (1)..(1959): transl_table=11

SEQ ID NO: 42169 - protein, 652 aa, Xylella fastidiosa 9a5c; identical to SEQ ID NO: 14215

SEQ ID NO: 42170 - DNA, 1404 bp, Xylella fastidiosa 9a5c; identical to SEQ ID NO: 14216
  CDS (1)..(1404): transl_table=11

SEQ ID NO: 42171 - protein, 467 aa, Xylella fastidiosa 9a5c; identical to SEQ ID NO: 14217

SEQ ID NO: 42172 - DNA, 1506 bp, Mycoplasma pulmonis UAB CTIP; identical to SEQ ID NO: 14218
  CDS (1)..(1506): transl_table=4

SEQ ID NO: 42173 - protein, 501 aa, Mycoplasma pulmonis UAB CTIP; identical to SEQ ID NO: 14219

SEQ ID NO: 42174 - DNA, 1533 bp, Clostridium acetobutylicum ATCC 824; identical to SEQ ID NO: 14220
  CDS (1)..(1533): transl_table=11

SEQ ID NO: 42175 - protein, 510 aa, Clostridium acetobutylicum ATCC 824; identical to SEQ ID NO: 14221

SEQ ID NO: 42176 - DNA, 1518 bp, Staphylococcus aureus subsp. aureus Mu50; identical to SEQ ID NO: 14222
  CDS (1)..(1518): transl_table=11

SEQ ID NO: 42177 - protein, 505 aa, Staphylococcus aureus subsp. aureus Mu50; identical to SEQ ID NO: 14223

SEQ ID NO: 42178 - DNA, 1566 bp, Sinorhizobium meliloti 1021; identical to SEQ ID NO: 14224
  CDS (1)..(1566): transl_table=11

SEQ ID NO: 42179 - protein, 521 aa, Sinorhizobium meliloti 1021; identical to SEQ ID NO: 14225

SEQ ID NO: 42180 - DNA, 1464 bp, Sinorhizobium meliloti 1021; identical to SEQ ID NO: 14226
  CDS (1)..(1464): transl_table=11

SEQ ID NO: 42181 - protein, 487 aa, Sinorhizobium meliloti 1021; identical to SEQ ID NO: 14227

SEQ ID NO: 42182 - DNA, 1488 bp, Salmonella typhimurium LT2; identical to SEQ ID NO: 14228
  CDS (1)..(1488): transl_table=11

SEQ ID NO: 42183 - protein, 495 aa, Salmonella typhimurium LT2; identical to SEQ ID NO: 14229

SEQ ID NO: 42184 - DNA, 1515 bp, Listeria monocytogenes EGD-e; identical to SEQ ID NO: 14230
  CDS (1)..(1515): transl_table=11

SEQ ID NO: 42185 - protein, 504 aa, Listeria monocytogenes EGD-e; identical to SEQ ID NO: 14231

SEQ ID NO: 42186 - DNA, 1515 bp, Listeria innocua Clip11262; identical to SEQ ID NO: 14232
  CDS (1)..(1515): transl_table=11

SEQ ID NO: 42187 - protein, 504 aa, Listeria innocua Clip11262; identical to SEQ ID NO: 14233

SEQ ID NO: 42188 - DNA, 1443 bp, Nostoc sp. PCC 7120; identical to SEQ ID NO: 14234
  CDS (1)..(1443): transl_table=11

SEQ ID NO: 42189 - protein, 480 aa, Nostoc sp. PCC 7120; identical to SEQ ID NO: 14235

SEQ ID NO: 42190 - DNA, 1269 bp, Ralstonia solanacearum GMI1000; identical to SEQ ID NO: 14236
  CDS (1)..(1269): transl_table=11

SEQ ID NO: 42191 - protein, 422 aa, Ralstonia solanacearum GMI1000; identical to SEQ ID NO: 14237

SEQ ID NO: 42192 - DNA, 1557 bp, Agrobacterium tumefaciens str. C58; identical to SEQ ID NO: 14238
  CDS (1)..(1557): transl_table=11

SEQ ID NO: 42193 - protein, 518 aa, Agrobacterium tumefaciens str. C58; identical to SEQ ID NO: 14239

SEQ ID NO: 42194 - DNA, 1479 bp, Agrobacterium tumefaciens str. C58; identical to SEQ ID NO: 14240
  CDS (1)..(1479): transl_table=11

SEQ ID NO: 42195 - protein, 492 aa, Agrobacterium tumefaciens str. C58; identical to SEQ ID NO: 14241

SEQ ID NO: 42196 - DNA, 1479 bp, Brucella melitensis 16M; identical to SEQ ID NO: 14242
  CDS (1)..(1479): transl_table=11

SEQ ID NO: 42197 - protein, 492 aa, Brucella melitensis 16M; identical to SEQ ID NO: 14243

SEQ ID NO: 42198 - DNA, 1443 bp, Clostridium perfringens str. 13; identical to SEQ ID NO: 14244
  CDS (1)..(1443): transl_table=11

SEQ ID NO: 42199 - protein, 480 aa, Clostridium perfringens str. 13; identical to SEQ ID NO: 14245

SEQ ID NO: 42200 - DNA, 1536 bp, Clostridium perfringens str. 13; identical to SEQ ID NO: 14246
  CDS (1)..(1536): transl_table=11

SEQ ID NO: 42201 - protein, 511 aa, Clostridium perfringens str. 13; identical to SEQ ID NO: 14247

SEQ ID NO: 42202 - DNA, 1458 bp, Clostridium perfringens str. 13; identical to SEQ ID NO: 14248
  CDS (1)..(1458): transl_table=11

SEQ ID NO: 42203 - protein, 485 aa, Clostridium perfringens str. 13; identical to SEQ ID NO: 14249

SEQ ID NO: 42204 - DNA, 1503 bp, Corynebacterium glutamicum ATCC 13032; identical to SEQ ID NO: 14250
  CDS (1)..(1503): transl_table=11

SEQ ID NO: 42205 - protein, 500 aa, Corynebacterium glutamicum ATCC 13032; identical to SEQ ID NO: 14251

SEQ ID NO: 42206 - DNA, 1440 bp, Fusobacterium nucleatum subsp. nucleatum ATCC 25586; identical to SEQ ID NO: 14252
  CDS (1)..(1440): transl_table=11

SEQ ID NO: 42207 - protein, 479 aa, Fusobacterium nucleatum subsp. nucleatum ATCC 25586; identical to SEQ ID NO: 14253

SEQ ID NO: 42208 - DNA, 1188 bp, Streptomyces coelicolor A3(2); identical to SEQ ID NO: 14254
  CDS (1)..(1188)

SEQ ID NO: 42209 - protein, 395 aa, Streptomyces coelicolor A3(2); identical to SEQ ID NO: 14255

SEQ ID NO: 42210 - DNA, 1461 bp, Xanthomonas campestris pv. campestris str. ATCC 33913; identical to SEQ ID NO: 14256
  CDS (1)..(1461): transl_table=11

SEQ ID NO: 42211 - protein, 486 aa, Xanthomonas campestris pv. campestris str. ATCC 33913; identical to SEQ ID NO: 14257

SEQ ID NO: 42212 - DNA, 1983 bp, Xanthomonas campestris pv. campestris str. ATCC 33913; identical to SEQ ID NO: 14258
  CDS (1)..(1983): transl_table=11

SEQ ID NO: 42213 - protein, 660 aa, Xanthomonas campestris pv. campestris str. ATCC 33913; identical to SEQ ID NO: 14259

SEQ ID NO: 42214 - DNA, 1020 bp, Xanthomonas campestris pv. campestris str. ATCC 33913; identical to SEQ ID NO: 14260
  CDS (1)..(1020): transl_table=11

SEQ ID NO: 42215 - protein, 339 aa, Xanthomonas campestris pv. campestris str. ATCC 33913; identical to SEQ ID NO: 14261

SEQ ID NO: 42216 - DNA, 1563 bp, Xanthomonas campestris pv. campestris str. ATCC 33913; identical to SEQ ID NO: 14262
  CDS (1)..(1563): transl_table=11

SEQ ID NO: 42217 - protein, 520 aa, Xanthomonas campestris pv. campestris str. ATCC 33913; identical to SEQ ID NO: 14263

SEQ ID NO: 42218 - DNA, 1425 bp, Xanthomonas campestris pv. campestris str. ATCC 33913; identical to SEQ ID NO: 14264
  CDS (1)..(1425): transl_table=11

SEQ ID NO: 42219 - protein, 474 aa, Xanthomonas campestris pv. campestris str. ATCC 33913; identical to SEQ ID NO: 14265

SEQ ID NO: 42220 - DNA, 1461 bp, Xanthomonas axonopodis pv. citri str. 306; identical to SEQ ID NO: 14266
  CDS (1)..(1461): transl_table=11

SEQ ID NO: 42221 - protein, 486 aa, Xanthomonas axonopodis pv. citri str. 306; identical to SEQ ID NO: 14267

SEQ ID NO: 42222 - DNA, 2019 bp, Xanthomonas axonopodis pv. citri str. 306; identical to SEQ ID NO: 14268
  CDS (1)..(2019): transl_table=11

SEQ ID NO: 42223 - protein, 672 aa, Xanthomonas axonopodis pv. citri str. 306; identical to SEQ ID NO: 14269

SEQ ID NO: 42224 - DNA, 1563 bp, Xanthomonas axonopodis pv. citri str. 306; identical to SEQ ID NO: 14270
  CDS (1)..(1563): transl_table=11

SEQ ID NO: 42225 - protein, 520 aa, Xanthomonas axonopodis pv. citri str. 306; identical to SEQ ID NO: 14271

SEQ ID NO: 42226 - DNA, 1416 bp, Xanthomonas axonopodis pv. citri str. 306; identical to SEQ ID NO: 14272
  CDS (1)..(1416): transl_table=11

SEQ ID NO: 42227 - protein, 471 aa, Xanthomonas axonopodis pv. citri str. 306; identical to SEQ ID NO: 14273

SEQ ID NO: 42228 - DNA, 1224 bp, Xanthomonas axonopodis pv. citri str. 306; identical to SEQ ID NO: 14274
  CDS (1)..(1224): transl_table=11

SEQ ID NO: 42229 - protein, 407 aa, Xanthomonas axonopodis pv. citri str. 306; identical to SEQ ID NO: 14275

SEQ ID NO: 42230 - DNA, 1518 bp, Staphylococcus aureus subsp. aureus MW2; identical to SEQ ID NO: 14276
  CDS (1)..(1518): transl_table=11

SEQ ID NO: 42231 - protein, 505 aa, Staphylococcus aureus subsp. aureus MW2; identical to SEQ ID NO: 14277

SEQ ID NO: 42232 - DNA, 1482 bp, Yersinia pestis KIM; identical to SEQ ID NO: 14278
  CDS (1)..(1482): transl_table=11

SEQ ID NO: 42233 - protein, 493 aa, Yersinia pestis KIM; identical to SEQ ID NO: 14279

SEQ ID NO: 42234 - DNA, 1461 bp, Brucella suis 1330; identical to SEQ ID NO: 14280
  CDS (1)..(1461): transl_table=11

SEQ ID NO: 42235 - protein, 486 aa, Brucella suis 1330; identical to SEQ ID NO: 14281

SEQ ID NO: 42236 - DNA, 1503 bp, Corynebacterium efficiens YS-314; identical to SEQ ID NO: 14282
  CDS (1)..(1503): transl_table=11

SEQ ID NO: 42237 - protein, 500 aa, Corynebacterium efficiens YS-314; identical to SEQ ID NO: 14283

SEQ ID NO: 42238 - DNA, 1158 bp, Pseudomonas putida KT2440; identical to SEQ ID NO: 14284
  CDS (1)..(1158): transl_table=11

SEQ ID NO: 42239 - protein, 385 aa, Pseudomonas putida KT2440; identical to SEQ ID NO: 14285

SEQ ID NO: 42240 - DNA, 1554 bp, Pseudomonas putida KT2440; identical to SEQ ID NO: 14286
  CDS (1)..(1554): transl_table=11

SEQ ID NO: 42241 - protein, 517 aa, Pseudomonas putida KT2440; identical to SEQ ID NO: 14287

SEQ ID NO: 42242 - DNA, 1575 bp, Vibrio vulnificus CMCP6; identical to SEQ ID NO: 14288
  CDS (1)..(1575): transl_table=11

SEQ ID NO: 42243 - protein, 524 aa, Vibrio vulnificus CMCP6; identical to SEQ ID NO: 14289

SEQ ID NO: 42244 - DNA, 1485 bp, Staphylococcus epidermidis ATCC 12228; identical to SEQ ID NO: 14290
  CDS (1)..(1485): transl_table=11

SEQ ID NO: 42245 - protein, 494 aa, Staphylococcus epidermidis ATCC 12228; identical to SEQ ID NO: 14291

SEQ ID NO: 42246 - DNA, 1959 bp, Xylella fastidiosa Temecula1; identical to SEQ ID NO: 14292
  CDS (1)..(1959): transl_table=11

SEQ ID NO: 42247 - protein, 652 aa, Xylella fastidiosa Temecula1; identical to SEQ ID NO: 14293

SEQ ID NO: 42248 - DNA, 1404 bp, Xylella fastidiosa Temecula1; identical to SEQ ID NO: 14294
  CDS (1)..(1404): transl_table=11

SEQ ID NO: 42249 - protein, 467 aa, Xylella fastidiosa Temecula1; identical to SEQ ID NO: 14295

SEQ ID NO: 42250 - DNA, 1437 bp, Clostridium tetani E88; identical to SEQ ID NO: 14296
  CDS (1)..(1437): transl_table=11

SEQ ID NO: 42251 - protein, 478 aa, Clostridium tetani E88; identical to SEQ ID NO: 14297

SEQ ID NO: 42252 - DNA, 1458 bp, Lactobacillus plantarum WCFS1; identical to SEQ ID NO: 14298
  CDS (1)..(1458): transl_table=11

SEQ ID NO: 42253 - protein, 485 aa, Lactobacillus plantarum WCFS1; identical to SEQ ID NO: 14299

SEQ ID NO: 42254 - DNA, 1497 bp, Tropheryma whipplei str. Twist; identical to SEQ ID NO: 14300
  CDS (1)..(1497): transl_table=11

SEQ ID NO: 42255 - protein, 498 aa, Tropheryma whipplei str. Twist; identical to SEQ ID NO: 14301

SEQ ID NO: 42256 - DNA, 1497 bp, Tropheryma whipplei TW08/27; identical to SEQ ID NO: 14302
  CDS (1)..(1497): transl_table=11

SEQ ID NO: 42257 - protein, 498 aa, Tropheryma whipplei TW08/27; identical to SEQ ID NO: 14303

SEQ ID NO: 42258 - DNA, 1629 bp, Pseudomonas syringae pv. tomato str. DC3000; identical to SEQ ID NO: 14304
  CDS (1)..(1629): transl_table=11

SEQ ID NO: 42259 - protein, 542 aa, Pseudomonas syringae pv. tomato str. DC3000; identical to SEQ ID NO: 14305

SEQ ID NO: 42260 - DNA, 1251 bp, Pseudomonas syringae pv. tomato str. DC3000; identical to SEQ ID NO: 14306
  CDS (1)..(1251): transl_table=11

SEQ ID NO: 42261 - protein, 416 aa, Pseudomonas syringae pv. tomato str. DC3000; identical to SEQ ID NO: 14307

SEQ ID NO: 42262 - DNA, 1158 bp, Pseudomonas syringae pv. tomato str. DC3000; identical to SEQ ID NO: 14308
  CDS (1)..(1158): transl_table=11

SEQ ID NO: 42263 - protein, 385 aa, Pseudomonas syringae pv. tomato str. DC3000; identical to SEQ ID NO: 14309

SEQ ID NO: 42264 - DNA, 1197 bp, Bacteroides thetaiotaomicron VPI-5482; identical to SEQ ID NO: 14310
  CDS (1)..(1197): transl_table=11

SEQ ID NO: 42265 - protein, 398 aa, Bacteroides thetaiotaomicron VPI-5482; identical to SEQ ID NO: 14311

SEQ ID NO: 42266 - DNA, 1425 bp, Bacteroides thetaiotaomicron VPI-5482; identical to SEQ ID NO: 14312
  CDS (1)..(1425): transl_table=11

SEQ ID NO: 42267 - protein, 474 aa, Bacteroides thetaiotaomicron VPI-5482; identical to SEQ ID NO: 14313

SEQ ID NO: 42268 - DNA, 1440 bp, Bacteroides thetaiotaomicron VPI-5482; identical to SEQ ID NO: 14314
  CDS (1)..(1440): transl_table=11

SEQ ID NO: 42269 - protein, 479 aa, Bacteroides thetaiotaomicron VPI-5482; identical to SEQ ID NO: 14315

SEQ ID NO: 42270 - DNA, 1446 bp, Enterococcus faecalis V583; identical to SEQ ID NO: 14316
  CDS (1)..(1446): transl_table=11

SEQ ID NO: 42271 - protein, 481 aa, Enterococcus faecalis V583; identical to SEQ ID NO: 14317

SEQ ID NO: 42272 - DNA, 1461 bp, Enterococcus faecalis V583; identical to SEQ ID NO: 14318
  CDS (1)..(1461): transl_table=11

SEQ ID NO: 42273 - protein, 486 aa, Enterococcus faecalis V583; identical to SEQ ID NO: 14319

SEQ ID NO: 42274 - DNA, 1176 bp, Coxiella burnetii RSA 493; identical to SEQ ID NO: 14320
  CDS (1)..(1176): transl_table=11

SEQ ID NO: 42275 - protein, 391 aa, Coxiella burnetii RSA 493; identical to SEQ ID NO: 14321

SEQ ID NO: 42276 - DNA, 1215 bp, Streptomyces avermitilis MA-4680; identical to SEQ ID NO: 14322
  CDS (1)..(1215)

SEQ ID NO: 42277 - protein, 404 aa, Streptomyces avermitilis MA-4680; identical to SEQ ID NO: 14323

SEQ ID NO: 42278 - DNA, 1098 bp, Bacillus cereus ATCC 14579; identical to SEQ ID NO: 14324
  CDS (1)..(1098): transl_table=11

SEQ ID NO: 42279 - protein, 365 aa, Bacillus cereus ATCC 14579; identical to SEQ ID NO: 14325

SEQ ID NO: 42280 - DNA, 1194 bp, Bacillus cereus ATCC 14579; identical to SEQ ID NO: 14326
  CDS (1)..(1194): transl_table=11

SEQ ID NO: 42281 - protein, 397 aa, Bacillus cereus ATCC 14579; identical to SEQ ID NO: 14327

SEQ ID NO: 42282 - DNA, 1242 bp, Shigella flexneri 2a str. 2457T; identical to SEQ ID NO: 14328
  CDS (1)..(1242): transl_table=11

SEQ ID NO: 42283 - protein, 413 aa, Shigella flexneri 2a str. 2457T; identical to SEQ ID NO: 14329

SEQ ID NO: 42284 - DNA, 1158 bp, Nitrosomonas europaea ATCC 19718; identical to SEQ ID NO: 14330
  CDS (1)..(1158): transl_table=11

SEQ ID NO: 42285 - protein, 385 aa, Nitrosomonas europaea ATCC 19718; identical to SEQ ID NO: 14331

SEQ ID NO: 42286 - DNA, 1218 bp, Bacillus anthracis str. Ames; identical to SEQ ID NO: 14332
  CDS (1)..(1218): transl_table=11

SEQ ID NO: 42287 - protein, 405 aa, Bacillus anthracis str. Ames; identical to SEQ ID NO: 14333

SEQ ID NO: 42288 - DNA, 1104 bp, Bacillus anthracis str. Ames; identical to SEQ ID NO: 14334
  CDS (1)..(1104): transl_table=11

SEQ ID NO: 42289 - protein, 367 aa, Bacillus anthracis str. Ames; identical to SEQ ID NO: 14335

SEQ ID NO: 42290 - DNA, 1194 bp, Bacillus anthracis str. Ames; identical to SEQ ID NO: 14336
  CDS (1)..(1194): transl_table=11

SEQ ID NO: 42291 - protein, 397 aa, Bacillus anthracis str. Ames; identical to SEQ ID NO: 14337

SEQ ID NO: 42292 - DNA, 1563 bp, Helicobacter hepaticus ATCC 51449; identical to SEQ ID NO: 14338
  CDS (1)..(1563): transl_table=11

SEQ ID NO: 42293 - protein, 520 aa, Helicobacter hepaticus ATCC 51449; identical to SEQ ID NO: 14339

SEQ ID NO: 42294 - DNA, 1476 bp, Rhodopirellula baltica SH 1; identical to SEQ ID NO: 14340
  CDS (1)..(1476): transl_table=11

SEQ ID NO: 42295 - protein, 491 aa, Rhodopirellula baltica SH 1; identical to SEQ ID NO: 14341

SEQ ID NO: 42296 - DNA, 1476 bp, Candidatus Blochmannia floridanus; identical to SEQ ID NO: 14342
  CDS (1)..(1476): transl_table=11

SEQ ID NO: 42297 - protein, 491 aa, Candidatus Blochmannia floridanus; identical to SEQ ID NO: 14343

SEQ ID NO: 42298 - DNA, 1206 bp, Bordetella pertussis Tohama I; identical to SEQ ID NO: 14344
  CDS (1)..(1206): transl_table=11

SEQ ID NO: 42299 - protein, 401 aa, Bordetella pertussis Tohama I; identical to SEQ ID NO: 14345

SEQ ID NO: 42300 - DNA, 1458 bp, Bordetella pertussis Tohama I; identical to SEQ ID NO: 14346
  CDS (1)..(1458): transl_table=11

SEQ ID NO: 42301 - protein, 485 aa, Bordetella pertussis Tohama I; identical to SEQ ID NO: 14347

SEQ ID NO: 42302 - DNA, 1575 bp, Bordetella pertussis Tohama I; identical to SEQ ID NO: 14348
  CDS (1)..(1575): transl_table=11

SEQ ID NO: 42303 - protein, 524 aa, Bordetella pertussis Tohama I; identical to SEQ ID NO: 14349

SEQ ID NO: 42304 - DNA, 1263 bp, Bordetella parapertussis 12822; identical to SEQ ID NO: 14350
  CDS (1)..(1263)

SEQ ID NO: 42305 - protein, 420 aa, Bordetella parapertussis 12822; identical to SEQ ID NO: 14351

SEQ ID NO: 42306 - DNA, 1431 bp, Bordetella parapertussis 12822; identical to SEQ ID NO: 14352
  CDS (1)..(1431)

SEQ ID NO: 42307 - protein, 476 aa, Bordetella parapertussis 12822; identical to SEQ ID NO: 14353

SEQ ID NO: 42308 - DNA, 1479 bp, Bordetella bronchiseptica RB50; identical to SEQ ID NO: 14354
  CDS (1)..(1479)

SEQ ID NO: 42309 - protein, 492 aa, Bordetella bronchiseptica RB50; identical to SEQ ID NO: 14355

SEQ ID NO: 42310 - DNA, 1545 bp, Bordetella bronchiseptica RB50; identical to SEQ ID NO: 14356
  CDS (1)..(1545)

SEQ ID NO: 42311 - protein, 514 aa, Bordetella bronchiseptica RB50; identical to SEQ ID NO: 14357

SEQ ID NO: 42312 - DNA, 1518 bp, Chromobacterium violaceum ATCC 12472; identical to SEQ ID NO: 14358
  CDS (1)..(1518): transl_table=11

SEQ ID NO: 42313 - protein, 505 aa, Chromobacterium violaceum ATCC 12472; identical to SEQ ID NO: 14359

SEQ ID NO: 42314 - DNA, 1422 bp, Porphyromonas gingivalis W83; identical to SEQ ID NO: 14360
  CDS (1)..(1422): transl_table=11

SEQ ID NO: 42315 - protein, 473 aa, Porphyromonas gingivalis W83; identical to SEQ ID NO: 14361

SEQ ID NO: 42316 - DNA, 1443 bp, Gloeobacter violaceus PCC 7421; identical to SEQ ID NO: 14362
  CDS (1)..(1443): transl_table=11

SEQ ID NO: 42317 - protein, 480 aa, Gloeobacter violaceus PCC 7421; identical to SEQ ID NO: 14363

SEQ ID NO: 42318 - DNA, 1470 bp, Photorhabdus luminescens subsp. laumondii TTO1; identical to SEQ ID NO: 14364
  CDS (1)..(1470): transl_table=11

SEQ ID NO: 42319 - protein, 489 aa, Photorhabdus luminescens subsp. laumondii TTO1; identical to SEQ ID NO: 14365

SEQ ID NO: 42320 - DNA, 1455 bp, Vibrio vulnificus YJ016; identical to SEQ ID NO: 14366
  CDS (1)..(1455): transl_table=11

SEQ ID NO: 42321 - protein, 484 aa, Vibrio vulnificus YJ016; identical to SEQ ID NO: 14367

SEQ ID NO: 42322 - DNA, 1191 bp, Geobacter sulfurreducens PCA; identical to SEQ ID NO: 14368
  CDS (1)..(1191): transl_table=11

SEQ ID NO: 42323 - protein, 396 aa, Geobacter sulfurreducens PCA; identical to SEQ ID NO: 14369

SEQ ID NO: 42324 - DNA, 1443 bp, Geobacter sulfurreducens PCA; identical to SEQ ID NO: 14370
  CDS (1)..(1443): transl_table=11

SEQ ID NO: 42325 - protein, 480 aa, Geobacter sulfurreducens PCA; identical to SEQ ID NO: 14371

SEQ ID NO: 42326 - DNA, 1578 bp, Geobacter sulfurreducens PCA; identical to SEQ ID NO: 14372
  CDS (1)..(1578): transl_table=11

SEQ ID NO: 42327 - protein, 525 aa, Geobacter sulfurreducens PCA; identical to SEQ ID NO: 14373

SEQ ID NO: 42328 - DNA, 1470 bp, Lactobacillus johnsonii NCC 533; identical to SEQ ID NO: 14374
  CDS (1)..(1470): transl_table=11

SEQ ID NO: 42329 - protein, 489 aa, Lactobacillus johnsonii NCC 533; identical to SEQ ID NO: 14375

SEQ ID NO: 42330 - DNA, 1488 bp, Lactobacillus johnsonii NCC 533; identical to SEQ ID NO: 14376
  CDS (1)..(1488): transl_table=11

SEQ ID NO: 42331 - protein, 495 aa, Lactobacillus johnsonii NCC 533; identical to SEQ ID NO: 14377

SEQ ID NO: 42332 - DNA, 1593 bp, Bdellovibrio bacteriovorus HD100; identical to SEQ ID NO: 14378
  CDS (1)..(1593): transl_table=11

SEQ ID NO: 42333 - protein, 530 aa, Bdellovibrio bacteriovorus HD100; identical to SEQ ID NO: 14379

SEQ ID NO: 42334 - DNA, 1212 bp, Bacillus cereus ATCC 10987; identical to SEQ ID NO: 14380
  CDS (1)..(1212): transl_table=11

SEQ ID NO: 42335 - protein, 403 aa, Bacillus cereus ATCC 10987; identical to SEQ ID NO: 14381

SEQ ID NO: 42336 - DNA, 1446 bp, Desulfovibrio vulgaris subsp. vulgaris str. Hildenborough; identical to SEQ ID NO: 14382
  CDS (1)..(1446): transl_table=11

SEQ ID NO: 42337 - protein, 481 aa, Desulfovibrio vulgaris subsp. vulgaris str. Hildenborough; identical to SEQ ID NO: 14383

SEQ ID NO: 42338 - DNA, 1137 bp, Bacillus anthracis str. Sterne; identical to SEQ ID NO: 14384
  CDS (1)..(1137): transl_table=11

SEQ ID NO: 42339 - protein, 378 aa, Bacillus anthracis str. Sterne; identical to SEQ ID NO: 14385

SEQ ID NO: 42340 - DNA, 1572 bp, Bartonella quintana str. Toulouse; identical to SEQ ID NO: 14386
  CDS (1)..(1572): transl_table=11

SEQ ID NO: 42341 - protein, 523 aa, Bartonella quintana str. Toulouse; identical to SEQ ID NO: 14387

SEQ ID NO: 42342 - DNA, 1572 bp, Bartonella henselae str. Houston-1; identical to SEQ ID NO: 14388
  CDS (1)..(1572): transl_table=11

SEQ ID NO: 42343 - protein, 523 aa, Bartonella henselae str. Houston-1; identical to SEQ ID NO: 14389

SEQ ID NO: 42344 - DNA, 1530 bp, Bacillus thuringiensis serovar konkukian str. 97-27; identical to SEQ ID NO: 14390
  CDS (1)..(1530): transl_table=11

SEQ ID NO: 42345 - protein, 509 aa, Bacillus thuringiensis serovar konkukian str. 97-27; identical to SEQ ID NO: 14391

SEQ ID NO: 42346 - DNA, 1218 bp, Bacillus thuringiensis serovar konkukian str. 97-27; identical to SEQ ID NO: 14392
  CDS (1)..(1218): transl_table=11

SEQ ID NO: 42347 - protein, 405 aa, Bacillus thuringiensis serovar konkukian str. 97-27; identical to SEQ ID NO: 14393

SEQ ID NO: 42348 - DNA, 1134 bp, Bacillus thuringiensis serovar konkukian str. 97-27; identical to SEQ ID NO: 14394
  CDS (1)..(1134): transl_table=11

SEQ ID NO: 42349 - protein, 377 aa, Bacillus thuringiensis serovar konkukian str. 97-27; identical to SEQ ID NO: 14395

SEQ ID NO: 42350 - DNA, 1482 bp, Staphylococcus aureus subsp. aureus MSSA476; identical to SEQ ID NO: 14396
  CDS (1)..(1482): transl_table=11

SEQ ID NO: 42351 - protein, 493 aa, Staphylococcus aureus subsp. aureus MSSA476; identical to SEQ ID NO: 14397

SEQ ID NO: 42352 - DNA, 1563 bp, Acinetobacter sp. ADP1; identical to SEQ ID NO: 14398
  CDS (1)..(1563): transl_table=11

SEQ ID NO: 42353 - protein, 520 aa, Acinetobacter sp. ADP1; identical to SEQ ID NO: 14399

SEQ ID NO: 42354 - DNA, 1560 bp, Acinetobacter sp. ADP1; identical to SEQ ID NO: 14400
  CDS (1)..(1560): transl_table=11

SEQ ID NO: 42355 - protein, 519 aa, Acinetobacter sp. ADP1; identical to SEQ ID NO: 14401

SEQ ID NO: 42356 - DNA, 1461 bp, Erwinia carotovora subsp. atroseptica SCRI1043; identical to SEQ ID NO: 14402
  CDS (1)..(1461)

SEQ ID NO: 42357 - protein, 486 aa, Erwinia carotovora subsp. atroseptica SCRI1043; identical to SEQ ID NO: 14403

SEQ ID NO: 42358 - DNA, 1269 bp, Propionibacterium acnes KPA171202; identical to SEQ ID NO: 14404
  CDS (1)..(1269): transl_table=11

SEQ ID NO: 42359 - protein, 422 aa, Propionibacterium acnes KPA171202; identical to SEQ ID NO: 14405

SEQ ID NO: 42360 - DNA, 1464 bp, Leifsonia xyli subsp. xyli str. CTCB07; identical to SEQ ID NO: 14406
  CDS (1)..(1464): transl_table=11

SEQ ID NO: 42361 - protein, 487 aa, Leifsonia xyli subsp. xyli str. CTCB07; identical to SEQ ID NO: 14407

SEQ ID NO: 42362 - DNA, 1533 bp, Desulfotalea psychrophila LSv54; identical to SEQ ID NO: 14408
  CDS (1)..(1533): transl_table=11

SEQ ID NO: 42363 - protein, 510 aa, Desulfotalea psychrophila LSv54; identical to SEQ ID NO: 14409

SEQ ID NO: 42364 - DNA, 1461 bp, Yersinia pseudotuberculosis IP 32953; identical to SEQ ID NO: 14410
  CDS (1)..(1461): transl_table=11

SEQ ID NO: 42365 - protein, 486 aa, Yersinia pseudotuberculosis IP 32953; identical to SEQ ID NO: 14411

SEQ ID NO: 42366 - DNA, 1545 bp, Bacillus cereus E33L; identical to SEQ ID NO: 14412
  CDS (1)..(1545): transl_table=11

SEQ ID NO: 42367 - protein, 514 aa, Bacillus cereus E33L; identical to SEQ ID NO: 14413

SEQ ID NO: 42368 - DNA, 1212 bp, Bacillus cereus E33L; identical to SEQ ID NO: 14414
  CDS (1)..(1212): transl_table=11

SEQ ID NO: 42369 - protein, 403 aa, Bacillus cereus E33L; identical to SEQ ID NO: 14415

SEQ ID NO: 42370 - DNA, 1104 bp, Bacillus cereus E33L; identical to SEQ ID NO: 14416
  CDS (1)..(1104): transl_table=11

SEQ ID NO: 42371 - protein, 367 aa, Bacillus cereus E33L; identical to SEQ ID NO: 14417

SEQ ID NO: 42372 - DNA, 1536 bp, Mannheimia succiniciproducens MBEL55E; identical to SEQ ID NO: 14418
  CDS (1)..(1536): transl_table=11

SEQ ID NO: 42373 - protein, 511 aa, Mannheimia succiniciproducens MBEL55E; identical to SEQ ID NO: 14419

SEQ ID NO: 42374 - DNA, 1197 bp, Bacteroides fragilis YCH46; identical to SEQ ID NO: 14420
  CDS (1)..(1197): transl_table=11

SEQ ID NO: 42375 - protein, 398 aa, Bacteroides fragilis YCH46; identical to SEQ ID NO: 14421

SEQ ID NO: 42376 - DNA, 1440 bp, Burkholderia mallei ATCC 23344; identical to SEQ ID NO: 14422
  CDS (1)..(1440): transl_table=11

SEQ ID NO: 42377 - protein, 479 aa, Burkholderia mallei ATCC 23344; identical to SEQ ID NO: 14423

SEQ ID NO: 42378 - DNA, 1275 bp, Burkholderia pseudomallei K96243; identical to SEQ ID NO: 14424
  CDS (1)..(1275): transl_table=11

SEQ ID NO: 42379 - protein, 424 aa, Burkholderia pseudomallei K96243; identical to SEQ ID NO: 14425

SEQ ID NO: 42380 - DNA, 1653 bp, Burkholderia pseudomallei K96243; identical to SEQ ID NO: 14426
  CDS (1)..(1653): transl_table=11

SEQ ID NO: 42381 - protein, 550 aa, Burkholderia pseudomallei K96243; identical to SEQ ID NO: 14427

SEQ ID NO: 42382 - DNA, 1458 bp, Photobacterium profundum SS9; identical to SEQ ID NO: 14428
  CDS (1)..(1458): transl_table=11

SEQ ID NO: 42383 - protein, 485 aa, Photobacterium profundum SS9; identical to SEQ ID NO: 14429

SEQ ID NO: 42384 - DNA, 1533 bp, Photobacterium profundum SS9; identical to SEQ ID NO: 14430
  CDS (1)..(1533): transl_table=11

SEQ ID NO: 42385 - protein, 510 aa, Photobacterium profundum SS9; identical to SEQ ID NO: 14431

SEQ ID NO: 42386 - DNA, 1509 bp, Geobacillus kaustophilus HTA426; identical to SEQ ID NO: 14432
  CDS (1)..(1509): transl_table=11

SEQ ID NO: 42387 - protein, 502 aa, Geobacillus kaustophilus HTA426; identical to SEQ ID NO: 14433

SEQ ID NO: 42388 - DNA, 1242 bp, Salmonella enterica subsp. enterica serovar Paratyphi A str. ATCC; identical to SEQ ID NO: 14434
  CDS (1)..(1242): transl_table=11

SEQ ID NO: 42389 - protein, 413 aa, Salmonella enterica subsp. enterica serovar Paratyphi A str. ATCC; identical to SEQ ID NO: 14435

SEQ ID NO: 42390 - DNA, 1395 bp, Idiomarina loihiensis L2TR; identical to SEQ ID NO: 14436
  CDS (1)..(1395): transl_table=11

SEQ ID NO: 42391 - protein, 464 aa, Idiomarina loihiensis L2TR; identical to SEQ ID NO: 14437

SEQ ID NO: 42392 - DNA, 1383 bp, Azoarcus sp. EbN1; identical to SEQ ID NO: 14438
  CDS (1)..(1383): transl_table=11

SEQ ID NO: 42393 - protein, 460 aa, Azoarcus sp. EbN1; identical to SEQ ID NO: 14439

SEQ ID NO: 42394 - DNA, 1458 bp, Azoarcus sp. EbN1; identical to SEQ ID NO: 14440
  CDS (1)..(1458): transl_table=11

SEQ ID NO: 42395 - protein, 485 aa, Azoarcus sp. EbN1; identical to SEQ ID NO: 14441

SEQ ID NO: 42396 - DNA, 1419 bp, Zymomonas mobilis subsp. mobilis ZM4; identical to SEQ ID NO: 14442
  CDS (1)..(1419): transl_table=11

SEQ ID NO: 42397 - protein, 472 aa, Zymomonas mobilis subsp. mobilis ZM4; identical to SEQ ID NO: 14443

SEQ ID NO: 42398 - DNA, 1413 bp, Silicibacter pomeroyi DSS-3; identical to SEQ ID NO: 14444
  CDS (1)..(1413): transl_table=11

SEQ ID NO: 42399 - protein, 470 aa, Silicibacter pomeroyi DSS-3; identical to SEQ ID NO: 14445

SEQ ID NO: 42400 - DNA, 1467 bp, Bacillus clausii KSM-K16; identical to SEQ ID NO: 14446
  CDS (1)..(1467): transl_table=11

SEQ ID NO: 42401 - protein, 488 aa, Bacillus clausii KSM-K16; identical to SEQ ID NO: 14447

SEQ ID NO: 42402 - DNA, 1197 bp, Bacillus clausii KSM-K16; identical to SEQ ID NO: 14448
  CDS (1)..(1197): transl_table=11

SEQ ID NO: 42403 - protein, 398 aa, Bacillus clausii KSM-K16; identical to SEQ ID NO: 14449

SEQ ID NO: 42404 - DNA, 1482 bp, Staphylococcus aureus subsp. aureus COL; identical to SEQ ID NO: 14450
  CDS (1)..(1482): transl_table=11

SEQ ID NO: 42405 - protein, 493 aa, Staphylococcus aureus subsp. aureus COL; identical to SEQ ID NO: 14451

SEQ ID NO: 42406 - DNA, 2016 bp, Xanthomonas oryzae pv. oryzae KACC10331; identical to SEQ ID NO: 14452
  CDS (1)..(2016): transl_table=11

SEQ ID NO: 42407 - protein, 671 aa, Xanthomonas oryzae pv. oryzae KACC10331; identical to SEQ ID NO: 14453

SEQ ID NO: 42408 - DNA, 1419 bp, Xanthomonas oryzae pv. oryzae KACC10331; identical to SEQ ID NO: 14454
  CDS (1)..(1419): transl_table=11

SEQ ID NO: 42409 - protein, 472 aa, Xanthomonas oryzae pv. oryzae KACC10331; identical to SEQ ID NO: 14455

SEQ ID NO: 42410 - DNA, 1548 bp, Vibrio fischeri ES114; identical to SEQ ID NO: 14456
  CDS (1)..(1548): transl_table=11

SEQ ID NO: 42411 - protein, 515 aa, Vibrio fischeri ES114; identical to SEQ ID NO: 14457

SEQ ID NO: 42412 - DNA, 1455 bp, Vibrio fischeri ES114; identical to SEQ ID NO: 14458
  CDS (1)..(1455): transl_table=11

SEQ ID NO: 42413 - protein, 484 aa, Vibrio fischeri ES114; identical to SEQ ID NO: 14459

SEQ ID NO: 42414 - DNA, 1578 bp, Neisseria gonorrhoeae FA 1090; identical to SEQ ID NO: 14460
  CDS (1)..(1578): transl_table=11

SEQ ID NO: 42415 - protein, 525 aa, Neisseria gonorrhoeae FA 1090; identical to SEQ ID NO: 14461

SEQ ID NO: 42416 - DNA, 1440 bp, Bacteroides fragilis NCTC 9343; identical to SEQ ID NO: 14462
  CDS (1)..(1440): transl_table=11

SEQ ID NO: 42417 - protein, 479 aa, Bacteroides fragilis NCTC 9343; identical to SEQ ID NO: 14463

SEQ ID NO: 42418 - DNA, 1275 bp, Bacteroides fragilis NCTC 9343; identical to SEQ ID NO: 14464
  CDS (1)..(1275): transl_table=11

SEQ ID NO: 42419 - protein, 424 aa, Bacteroides fragilis NCTC 9343; identical to SEQ ID NO: 14465

SEQ ID NO: 42420 - DNA, 1242 bp, Salmonella enterica subsp. enterica serovar Choleraesuis str; identical to SEQ ID NO: 14466
  CDS (1)..(1242): transl_table=11

SEQ ID NO: 42421 - protein, 413 aa, Salmonella enterica subsp. enterica serovar Choleraesuis str; identical to SEQ ID NO: 14467

SEQ ID NO: 42422 - DNA, 1587 bp, Salmonella enterica subsp. enterica serovar Choleraesuis str; identical to SEQ ID NO: 14468
  CDS (1)..(1587): transl_table=11

SEQ ID NO: 42423 - protein, 528 aa, Salmonella enterica subsp. enterica serovar Choleraesuis str; identical to SEQ ID NO: 14469

SEQ ID NO: 42424 - DNA, 1581 bp, Pseudomonas syringae pv. syringae B728a; identical to SEQ ID NO: 14470
  CDS (1)..(1581)

SEQ ID NO: 42425 - protein, 526 aa, Pseudomonas syringae pv. syringae B728a; identical to SEQ ID NO: 14471

SEQ ID NO: 42426 - DNA, 1251 bp, Pseudomonas syringae pv. syringae B728a; identical to SEQ ID NO: 14472
  CDS (1)..(1251)

SEQ ID NO: 42427 - protein, 416 aa, Pseudomonas syringae pv. syringae B728a; identical to SEQ ID NO: 14473

SEQ ID NO: 42428 - DNA, 1158 bp, Pseudomonas syringae pv. syringae B728a; identical to SEQ ID NO: 14474
  CDS (1)..(1158)

SEQ ID NO: 42429 - protein, 385 aa, Pseudomonas syringae pv. syringae B728a; identical to SEQ ID NO: 14475

SEQ ID NO: 42430 - DNA, 1440 bp, Pseudomonas syringae pv. syringae B728a; identical to SEQ ID NO: 14476
  CDS (1)..(1440)

SEQ ID NO: 42431 - protein, 479 aa, Pseudomonas syringae pv. syringae B728a; identical to SEQ ID NO: 14477

SEQ ID NO: 42432 - DNA, 1512 bp, Corynebacterium jeikeium K411; identical to SEQ ID NO: 14478
  CDS (1)..(1512): transl_table=11

SEQ ID NO: 42433 - protein, 503 aa, Corynebacterium jeikeium K411; identical to SEQ ID NO: 14479

SEQ ID NO: 42434 - DNA, 1404 bp, Xylella fastidiosa Ann-1; identical to SEQ ID NO: 14480
  CDS (1)..(1404)

SEQ ID NO: 42435 - protein, 467 aa, Xylella fastidiosa Ann-1; identical to SEQ ID NO: 14481

SEQ ID NO: 42436 - DNA, 1488 bp, Lactobacillus gasseri; identical to SEQ ID NO: 14482
  CDS (1)..(1488)

SEQ ID NO: 42437 - protein, 495 aa, Lactobacillus gasseri; identical to SEQ ID NO: 14483

SEQ ID NO: 42438 - DNA, 1416 bp, Leuconostoc mesenteroides subsp. mesenteroides ATCC 8293; identical to SEQ ID NO: 14484
  CDS (1)..(1416)

SEQ ID NO: 42439 - protein, 471 aa, Leuconostoc mesenteroides subsp. mesenteroides ATCC 8293; identical to SEQ ID NO: 14485

SEQ ID NO: 42440 - DNA, 1455 bp, Desulfovibrio desulfuricans G20; identical to SEQ ID NO: 14486
  CDS (1)..(1455)

SEQ ID NO: 42441 - protein, 484 aa, Desulfovibrio desulfuricans G20; identical to SEQ ID NO: 14487

SEQ ID NO: 42442 - DNA, 1434 bp, Pseudomonas aeruginosa UCBPP-PA14; identical to SEQ ID NO: 14488
  CDS (1)..(1434)

SEQ ID NO: 42443 - protein, 477 aa, Pseudomonas aeruginosa UCBPP-PA14; identical to SEQ ID NO: 14489

SEQ ID NO: 42444 - DNA, 1440 bp, Fusobacterium nucleatum subsp. vincentii ATCC 49256; identical to SEQ ID NO: 14490
  CDS (1)..(1440): transl_table=11

SEQ ID NO: 42445 - protein, 479 aa, Fusobacterium nucleatum subsp. vincentii ATCC 49256; identical to SEQ ID NO: 14491

SEQ ID NO: 42446 - DNA, 1713 bp, Psychrobacter sp. 273-4; identical to SEQ ID NO: 14492
  CDS (1)..(1713)

SEQ ID NO: 42447 - protein, 570 aa, Psychrobacter sp. 273-4; identical to SEQ ID NO: 14493

SEQ ID NO: 42448 - DNA, 1644 bp, Psychrobacter sp. 273-4; identical to SEQ ID NO: 14494
  CDS (1)..(1644)

SEQ ID NO: 42449 - protein, 547 aa, Psychrobacter sp. 273-4; identical to SEQ ID NO: 14495

SEQ ID NO: 42450 - DNA, 1470 bp, Ralstonia eutropha JMP134; identical to SEQ ID NO: 14496
  CDS (1)..(1470)

SEQ ID NO: 42451 - protein, 489 aa, Ralstonia eutropha JMP134; identical to SEQ ID NO: 14497

SEQ ID NO: 42452 - DNA, 1617 bp, Ralstonia eutropha JMP134; identical to SEQ ID NO: 14498
  CDS (1)..(1617)

SEQ ID NO: 42453 - protein, 538 aa, Ralstonia eutropha JMP134; identical to SEQ ID NO: 14499

SEQ ID NO: 42454 - DNA, 1809 bp, Ralstonia eutropha JMP134; identical to SEQ ID NO: 14500
  CDS (1)..(1809)

SEQ ID NO: 42455 - protein, 602 aa, Ralstonia eutropha JMP134; identical to SEQ ID NO: 14501

SEQ ID NO: 42456 - DNA, 1329 bp, Ralstonia eutropha JMP134; identical to SEQ ID NO: 14502
  CDS (1)..(1329)

SEQ ID NO: 42457 - protein, 442 aa, Ralstonia eutropha JMP134; identical to SEQ ID NO: 14503

SEQ ID NO: 42458 - DNA, 1254 bp, Ralstonia eutropha JMP134; identical to SEQ ID NO: 14504
  CDS (1)..(1254)

SEQ ID NO: 42459 - protein, 417 aa, Ralstonia eutropha JMP134; identical to SEQ ID NO: 14505

SEQ ID NO: 42460 - DNA, 1551 bp, Burkholderia cepacia R18194; identical to SEQ ID NO: 14506
  CDS (1)..(1551)

SEQ ID NO: 42461 - protein, 516 aa, Burkholderia cepacia R18194; identical to SEQ ID NO: 14507

SEQ ID NO: 42462 - DNA, 1275 bp, Burkholderia cepacia R18194; identical to SEQ ID NO: 14508
  CDS (1)..(1275)

SEQ ID NO: 42463 - protein, 424 aa, Burkholderia cepacia R18194; identical to SEQ ID NO: 14509

SEQ ID NO: 42464 - DNA, 1515 bp, Listeria monocytogenes str. 4b H7858; identical to SEQ ID NO: 14510
  CDS (1)..(1515): transl_table=11

SEQ ID NO: 42465 - protein, 504 aa, Listeria monocytogenes str. 4b H7858; identical to SEQ ID NO: 14511

SEQ ID NO: 42466 - DNA, 1212 bp, Bacillus cereus G9241; identical to SEQ ID NO: 14512
  CDS (1)..(1212): transl_table=11

SEQ ID NO: 42467 - protein, 403 aa, Bacillus cereus G9241; identical to SEQ ID NO: 14513

SEQ ID NO: 42468 - DNA, 1530 bp, Bacillus cereus G9241; identical to SEQ ID NO: 14514
  CDS (1)..(1530): transl_table=11

SEQ ID NO: 42469 - protein, 509 aa, Bacillus cereus G9241; identical to SEQ ID NO: 14515

SEQ ID NO: 42470 - DNA, 1545 bp, Bacillus cereus G9241; identical to SEQ ID NO: 14516
  CDS (1)..(1545): transl_table=11

SEQ ID NO: 42471 - protein, 514 aa, Bacillus cereus G9241; identical to SEQ ID NO: 14517

SEQ ID NO: 42472 - DNA, 1167 bp, Bacillus cereus G9241; identical to SEQ ID NO: 14518
  CDS (1)..(1167): transl_table=11

SEQ ID NO: 42473 - protein, 388 aa, Bacillus cereus G9241; identical to SEQ ID NO: 14519

SEQ ID NO: 42474 - DNA, 1194 bp, Bacillus cereus G9241; identical to SEQ ID NO: 14520
  CDS (1)..(1194): transl_table=11

SEQ ID NO: 42475 - protein, 397 aa, Bacillus cereus G9241; identical to SEQ ID NO: 14521

SEQ ID NO: 42476 - DNA, 1314 bp, Rubrivivax gelatinosus PM1; identical to SEQ ID NO: 14522
  CDS (1)..(1314)

SEQ ID NO: 42477 - protein, 437 aa, Rubrivivax gelatinosus PM1; identical to SEQ ID NO: 14523

SEQ ID NO: 42478 - DNA, 1647 bp, Rubrivivax gelatinosus PM1; identical to SEQ ID NO: 14524
  CDS (1)..(1647)

SEQ ID NO: 42479 - protein, 548 aa, Rubrivivax gelatinosus PM1; identical to SEQ ID NO: 14525

SEQ ID NO: 42480 - DNA, 1287 bp, Pseudomonas fluorescens PfO-1; identical to SEQ ID NO: 14526
  CDS (1)..(1287)

SEQ ID NO: 42481 - protein, 428 aa, Pseudomonas fluorescens PfO-1; identical to SEQ ID NO: 14527

SEQ ID NO: 42482 - DNA, 1158 bp, Pseudomonas fluorescens PfO-1; identical to SEQ ID NO: 14528
  CDS (1)..(1158)

SEQ ID NO: 42483 - protein, 385 aa, Pseudomonas fluorescens PfO-1; identical to SEQ ID NO: 14529

SEQ ID NO: 42484 - DNA, 1263 bp, Burkholderia fungorum LB400; identical to SEQ ID NO: 14530
  CDS (1)..(1263)

SEQ ID NO: 42485 - protein, 420 aa, Burkholderia fungorum LB400; identical to SEQ ID NO: 14531

SEQ ID NO: 42486 - DNA, 1554 bp, Burkholderia fungorum LB400; identical to SEQ ID NO: 14532
  CDS (1)..(1554)

SEQ ID NO: 42487 - protein, 517 aa, Burkholderia fungorum LB400; identical to SEQ ID NO: 14533

SEQ ID NO: 42488 - DNA, 1452 bp, Burkholderia fungorum LB400; identical to SEQ ID NO: 14534
  CDS (1)..(1452)

SEQ ID NO: 42489 - protein, 483 aa, Burkholderia fungorum LB400; identical to SEQ ID NO: 14535

SEQ ID NO: 42490 - DNA, 1503 bp, Cytophaga hutchinsonii; identical to SEQ ID NO: 14536
  CDS (1)..(1503)

SEQ ID NO: 42491 - protein, 500 aa, Cytophaga hutchinsonii; identical to SEQ ID NO: 14537

SEQ ID NO: 42492 - DNA, 1434 bp, Oenococcus oeni PSU-1; identical to SEQ ID NO: 14538
  CDS (1)..(1434)

SEQ ID NO: 42493 - protein, 477 aa, Oenococcus oeni PSU-1; identical to SEQ ID NO: 14539

SEQ ID NO: 42494 - DNA, 1464 bp, Pediococcus pentosaceus ATCC 25745; identical to SEQ ID NO: 14540
  CDS (1)..(1464)

SEQ ID NO: 42495 - protein, 487 aa, Pediococcus pentosaceus ATCC 25745; identical to SEQ ID NO: 14541

SEQ ID NO: 42496 - DNA, 1365 bp, Pediococcus pentosaceus ATCC 25745; identical to SEQ ID NO: 14542
  CDS (1)..(1365)

SEQ ID NO: 42497 - protein, 454 aa, Pediococcus pentosaceus ATCC 25745; identical to SEQ ID NO: 14543

SEQ ID NO: 42498 - DNA, 1191 bp, Thiobacillus denitrificans ATCC 25259; identical to SEQ ID NO: 14544
  CDS (1)..(1191)

SEQ ID NO: 42499 - protein, 396 aa, Thiobacillus denitrificans ATCC 25259; identical to SEQ ID NO: 14545

SEQ ID NO: 42500 - DNA, 1443 bp, Thiobacillus denitrificans ATCC 25259; identical to SEQ ID NO: 14546
  CDS (1)..(1443)

SEQ ID NO: 42501 - protein, 480 aa, Thiobacillus denitrificans ATCC 25259; identical to SEQ ID NO: 14547

SEQ ID NO: 42502 - DNA, 1260 bp, Thiobacillus denitrificans ATCC 25259; identical to SEQ ID NO: 14548
  CDS (1)..(1260)

SEQ ID NO: 42503 - protein, 419 aa, Thiobacillus denitrificans ATCC 25259; identical to SEQ ID NO: 14549

SEQ ID NO: 42504 - DNA, 1959 bp, Xylella fastidiosa Ann-1; identical to SEQ ID NO: 14550
  CDS (1)..(1959)

SEQ ID NO: 42505 - protein, 652 aa, Xylella fastidiosa Ann-1; identical to SEQ ID NO: 14551

SEQ ID NO: 42506 - DNA, 1206 bp, Pseudomonas aeruginosa UCBPP-PA14; identical to SEQ ID NO: 14552
  CDS (1)..(1206)

SEQ ID NO: 42507 - protein, 401 aa, Pseudomonas aeruginosa UCBPP-PA14; identical to SEQ ID NO: 14553

SEQ ID NO: 42508 - DNA, 1203 bp, Erythrobacter litoralis HTCC2594; identical to SEQ ID NO: 14554
  CDS (1)..(1203): transl_table=11

SEQ ID NO: 42509 - protein, 400 aa, Erythrobacter litoralis HTCC2594; identical to SEQ ID NO: 14555

SEQ ID NO: 42510 - DNA, 1497 bp, Brevibacterium linens BL2; identical to SEQ ID NO: 14556
  CDS (1)..(1497)

SEQ ID NO: 42511 - protein, 498 aa, Brevibacterium linens BL2; identical to SEQ ID NO: 14557

SEQ ID NO: 42512 - DNA, 1446 bp, Lactococcus lactis subsp. cremoris SK11; identical to SEQ ID NO: 14558
  CDS (1)..(1446)

SEQ ID NO: 42513 - protein, 481 aa, Lactococcus lactis subsp. cremoris SK11; identical to SEQ ID NO: 14559

SEQ ID NO: 42514 - DNA, 1470 bp, Lactobacillus casei ATCC 334; identical to SEQ ID NO: 14560
  CDS (1)..(1470)

SEQ ID NO: 42515 - protein, 489 aa, Lactobacillus casei ATCC 334; identical to SEQ ID NO: 14561

SEQ ID NO: 42516 - DNA, 1212 bp, Bacillus anthracis str. A2012; identical to SEQ ID NO: 14562
  CDS (1)..(1212)

SEQ ID NO: 42517 - protein, 403 aa, Bacillus anthracis str. A2012; identical to SEQ ID NO: 14563

SEQ ID NO: 42518 - DNA, 2703 bp, Anaeromyxobacter dehalogenans 2CP-C; identical to SEQ ID NO: 14564
  CDS (1)..(2703): transl_table=11

SEQ ID NO: 42519 - protein, 900 aa, Anaeromyxobacter dehalogenans 2CP-C; identical to SEQ ID NO: 14565

SEQ ID NO: 42520 - DNA, 1461 bp, Anaeromyxobacter dehalogenans 2CP-C; identical to SEQ ID NO: 14566
  CDS (1)..(1461): transl_table=11

SEQ ID NO: 42521 - protein, 486 aa, Anaeromyxobacter dehalogenans 2CP-C; identical to SEQ ID NO: 14567

SEQ ID NO: 42522 - DNA, 1509 bp, Anaeromyxobacter dehalogenans 2CP-C; identical to SEQ ID NO: 14568
  CDS (1)..(1509): transl_table=11

SEQ ID NO: 42523 - protein, 502 aa, Anaeromyxobacter dehalogenans 2CP-C; identical to SEQ ID NO: 14569

SEQ ID NO: 42524 - DNA, 1533 bp, Arthrobacter sp. FB24; identical to SEQ ID NO: 14570
  CDS (1)..(1533): transl_table=11

SEQ ID NO: 42525 - protein, 510 aa, Arthrobacter sp. FB24; identical to SEQ ID NO: 14571

SEQ ID NO: 42526 - DNA, 1161 bp, Azotobacter vinelandii AvOP; identical to SEQ ID NO: 14572
  CDS (1)..(1161): transl_table=11

SEQ ID NO: 42527 - protein, 386 aa, Azotobacter vinelandii AvOP; identical to SEQ ID NO: 14573

SEQ ID NO: 42528 - DNA, 1446 bp, Azotobacter vinelandii AvOP; identical to SEQ ID NO: 14574
  CDS (1)..(1446): transl_table=11

SEQ ID NO: 42529 - protein, 481 aa, Azotobacter vinelandii AvOP; identical to SEQ ID NO: 14575

SEQ ID NO: 42530 - DNA, 1623 bp, Burkholderia vietnamiensis G4; identical to SEQ ID NO: 14576
  CDS (1)..(1623): transl_table=11

SEQ ID NO: 42531 - protein, 540 aa, Burkholderia vietnamiensis G4; identical to SEQ ID NO: 14577

SEQ ID NO: 42532 - DNA, 1452 bp, Burkholderia vietnamiensis G4; identical to SEQ ID NO: 14578
  CDS (1)..(1452): transl_table=11

SEQ ID NO: 42533 - protein, 483 aa, Burkholderia vietnamiensis G4; identical to SEQ ID NO: 14579

SEQ ID NO: 42534 - DNA, 1275 bp, Burkholderia mallei 10229; identical to SEQ ID NO: 14580
  CDS (1)..(1275)

SEQ ID NO: 42535 - protein, 424 aa, Burkholderia mallei 10229; identical to SEQ ID NO: 14581

SEQ ID NO: 42536 - DNA, 1275 bp, Burkholderia mallei 10399; identical to SEQ ID NO: 14582
  CDS (1)..(1275)

SEQ ID NO: 42537 - protein, 424 aa, Burkholderia mallei 10399; identical to SEQ ID NO: 14583

SEQ ID NO: 42538 - DNA, 1275 bp, Burkholderia cenocepacia AU 1054; identical to SEQ ID NO: 14621
  CDS (1)..(1275): transl_table=11

SEQ ID NO: 42539 - protein, 424 aa, Burkholderia cenocepacia AU 1054; identical to SEQ ID NO: 14622

SEQ ID NO: 42540 - DNA, 1623 bp, Burkholderia cenocepacia AU 1054; identical to SEQ ID NO: 14623
  CDS (1)..(1623): transl_table=11

SEQ ID NO: 42541 - protein, 540 aa, Burkholderia cenocepacia AU 1054; identical to SEQ ID NO: 14624

SEQ ID NO: 42542 - DNA, 1440 bp, Burkholderia cenocepacia AU 1054; identical to SEQ ID NO: 14625
  CDS (1)..(1440): transl_table=11

SEQ ID NO: 42543 - protein, 479 aa, Burkholderia cenocepacia AU 1054; identical to SEQ ID NO: 14626

SEQ ID NO: 42544 - DNA, 1077 bp, Burkholderia cenocepacia HI2424; identical to SEQ ID NO: 14627
  CDS (1)..(1077): transl_table=11

SEQ ID NO: 42545 - protein, 358 aa, Burkholderia cenocepacia HI2424; identical to SEQ ID NO: 14628

SEQ ID NO: 42546 - DNA, 1551 bp, Burkholderia cenocepacia HI2424; identical to SEQ ID NO: 14629
  CDS (1)..(1551): transl_table=11

SEQ ID NO: 42547 - protein, 516 aa, Burkholderia cenocepacia HI2424; identical to SEQ ID NO: 14630

SEQ ID NO: 42548 - DNA, 1425 bp, Chromohalobacter salexigens DSM 3043; identical to SEQ ID NO: 14631
  CDS (1)..(1425): transl_table=11

SEQ ID NO: 42549 - protein, 474 aa, Chromohalobacter salexigens DSM 3043; identical to SEQ ID NO: 14632

SEQ ID NO: 42550 - DNA, 1440 bp, Burkholderia pseudomallei 668; identical to SEQ ID NO: 14633
  CDS (1)..(1440)

SEQ ID NO: 42551 - protein, 479 aa, Burkholderia pseudomallei 668; identical to SEQ ID NO: 14634

SEQ ID NO: 42552 - DNA, 1719 bp, Polaromonas sp. JS666; identical to SEQ ID NO: 14635
  CDS (1)..(1719): transl_table=11

SEQ ID NO: 42553 - protein, 572 aa, Polaromonas sp. JS666; identical to SEQ ID NO: 14636

SEQ ID NO: 42554 - DNA, 1284 bp, Solibacter usitatus Ellin6076; identical to SEQ ID NO: 14637
  CDS (1)..(1284): transl_table=11

SEQ ID NO: 42555 - protein, 427 aa, Solibacter usitatus Ellin6076; identical to SEQ ID NO: 14638

SEQ ID NO: 42556 - DNA, 1191 bp, Geobacter metallireducens GS-15; identical to SEQ ID NO: 14639
  CDS (1)..(1191): transl_table=11

SEQ ID NO: 42557 - protein, 396 aa, Geobacter metallireducens GS-15; identical to SEQ ID NO: 14640

SEQ ID NO: 42558 - DNA, 1509 bp, Geobacter metallireducens GS-15; identical to SEQ ID NO: 14641
  CDS (1)..(1509): transl_table=11

SEQ ID NO: 42559 - protein, 502 aa, Geobacter metallireducens GS-15; identical to SEQ ID NO: 14642

SEQ ID NO: 42560 - DNA, 1524 bp, Exiguobacterium sp. 255-15; identical to SEQ ID NO: 14643
  CDS (1)..(1524): transl_table=11

SEQ ID NO: 42561 - protein, 507 aa, Exiguobacterium sp. 255-15; identical to SEQ ID NO: 14644

SEQ ID NO: 42562 - DNA, 1440 bp, Exiguobacterium sp. 255-15; identical to SEQ ID NO: 14645
  CDS (1)..(1440): transl_table=11

SEQ ID NO: 42563 - protein, 479 aa, Exiguobacterium sp. 255-15; identical to SEQ ID NO: 14646

SEQ ID NO: 42564 - DNA, 1512 bp, Exiguobacterium sp. 255-15; identical to SEQ ID NO: 14647
  CDS (1)..(1512): transl_table=11

SEQ ID NO: 42565 - protein, 503 aa, Exiguobacterium sp. 255-15; identical to SEQ ID NO: 14648

SEQ ID NO: 42566 - DNA, 1467 bp, Desulfuromonas acetoxidans DSM 684; identical to SEQ ID NO: 14649
  CDS (1)..(1467): transl_table=11

SEQ ID NO: 42567 - protein, 488 aa, Desulfuromonas acetoxidans DSM 684; identical to SEQ ID NO: 14650

SEQ ID NO: 42568 - DNA, 1443 bp, Desulfuromonas acetoxidans DSM 684; identical to SEQ ID NO: 14651
  CDS (1)..(1443): transl_table=11

SEQ ID NO: 42569 - protein, 480 aa, Desulfuromonas acetoxidans DSM 684; identical to SEQ ID NO: 14652

SEQ ID NO: 42570 - DNA, 1437 bp, Desulfitobacterium hafniense DCB-2; identical to SEQ ID NO: 14653
  CDS (1)..(1437): transl_table=11

SEQ ID NO: 42571 - protein, 478 aa, Desulfitobacterium hafniense DCB-2; identical to SEQ ID NO: 14654

SEQ ID NO: 42572 - DNA, 1608 bp, Methylobacillus flagellatus KT; identical to SEQ ID NO: 14655
  CDS (1)..(1608): transl_table=11

SEQ ID NO: 42573 - protein, 535 aa, Methylobacillus flagellatus KT; identical to SEQ ID NO: 14656

SEQ ID NO: 42574 - DNA, 1152 bp, Methylobacillus flagellatus KT; identical to SEQ ID NO: 14657
  CDS (1)..(1152): transl_table=11

SEQ ID NO: 42575 - protein, 383 aa, Methylobacillus flagellatus KT; identical to SEQ ID NO: 14658

SEQ ID NO: 42576 - DNA, 1173 bp, Sphingopyxis alaskensis RB2256; identical to SEQ ID NO: 14659
  CDS (1)..(1173): transl_table=11

SEQ ID NO: 42577 - protein, 390 aa, Sphingopyxis alaskensis RB2256; identical to SEQ ID NO: 14660

SEQ ID NO: 42578 - DNA, 1140 bp, Sphingopyxis alaskensis RB2256; identical to SEQ ID NO: 14661
  CDS (1)..(1140): transl_table=11

SEQ ID NO: 42579 - protein, 379 aa, Sphingopyxis alaskensis RB2256; identical to SEQ ID NO: 14662

SEQ ID NO: 42580 - DNA, 1527 bp, Shewanella amazonensis SB2B; identical to SEQ ID NO: 14663
  CDS (1)..(1527): transl_table=11

SEQ ID NO: 42581 - protein, 508 aa, Shewanella amazonensis SB2B; identical to SEQ ID NO: 14664

SEQ ID NO: 42582 - DNA, 1518 bp, Ralstonia metallidurans CH34; identical to SEQ ID NO: 14665
  CDS (1)..(1518): transl_table=11

SEQ ID NO: 42583 - protein, 505 aa, Ralstonia metallidurans CH34; identical to SEQ ID NO: 14666

SEQ ID NO: 42584 - DNA, 1605 bp, Ralstonia metallidurans CH34; identical to SEQ ID NO: 14667
  CDS (1)..(1605): transl_table=11

SEQ ID NO: 42585 - protein, 534 aa, Ralstonia metallidurans CH34; identical to SEQ ID NO: 14668

SEQ ID NO: 42586 - DNA, 1599 bp, Ralstonia metallidurans CH34; identical to SEQ ID NO: 14669
  CDS (1)..(1599): transl_table=11

SEQ ID NO: 42587 - protein, 532 aa, Ralstonia metallidurans CH34; identical to SEQ ID NO: 14670

SEQ ID NO: 42588 - DNA, 1281 bp, Rubrobacter xylanophilus DSM 9941; identical to SEQ ID NO: 14671
  CDS (1)..(1281): transl_table=11

SEQ ID NO: 42589 - protein, 426 aa, Rubrobacter xylanophilus DSM 9941; identical to SEQ ID NO: 14672

SEQ ID NO: 42590 - DNA, 1437 bp, Mesorhizobium sp. BNC1; identical to SEQ ID NO: 14673
  CDS (1)..(1437): transl_table=11

SEQ ID NO: 42591 - protein, 478 aa, Mesorhizobium sp. BNC1; identical to SEQ ID NO: 14674

SEQ ID NO: 42592 - DNA, 1404 bp, Kineococcus radiotolerans SRS30216; identical to SEQ ID NO: 14675
  CDS (1)..(1404): transl_table=11

SEQ ID NO: 42593 - protein, 467 aa, Kineococcus radiotolerans SRS30216; identical to SEQ ID NO: 14676

SEQ ID NO: 42594 - DNA, 1476 bp, Kineococcus radiotolerans SRS30216; identical to SEQ ID NO: 14677
  CDS (1)..(1476): transl_table=11

SEQ ID NO: 42595 - protein, 491 aa, Kineococcus radiotolerans SRS30216; identical to SEQ ID NO: 14678

SEQ ID NO: 42596 - DNA, 1551 bp, Silicibacter sp. TM1040; identical to SEQ ID NO: 14679
  CDS (1)..(1551): transl_table=11

SEQ ID NO: 42597 - protein, 516 aa, Silicibacter sp. TM1040; identical to SEQ ID NO: 14680

SEQ ID NO: 42598 - DNA, 1554 bp, Nitrobacter hamburgensis X14; identical to SEQ ID NO: 14681
  CDS (1)..(1554): transl_table=11

SEQ ID NO: 42599 - protein, 517 aa, Nitrobacter hamburgensis X14; identical to SEQ ID NO: 14682

SEQ ID NO: 42600 - DNA, 1428 bp, Paracoccus denitrificans PD1222; identical to SEQ ID NO: 14683
  CDS (1)..(1428): transl_table=11

SEQ ID NO: 42601 - protein, 475 aa, Paracoccus denitrificans PD1222; identical to SEQ ID NO: 14684

SEQ ID NO: 42602 - DNA, 1569 bp, Pseudomonas fluorescens; identical to SEQ ID NO: 14685
  CDS (1)..(1569): transl_table=11

SEQ ID NO: 42603 - protein, 522 aa, Pseudomonas fluorescens; identical to SEQ ID NO: 14686

SEQ ID NO: 42604 - DNA, 1158 bp, Pseudomonas fluorescens; identical to SEQ ID NO: 14687
  CDS (1)..(1158): transl_table=11

SEQ ID NO: 42605 - protein, 385 aa, Pseudomonas fluorescens; identical to SEQ ID NO: 14688

SEQ ID NO: 42606 - DNA, 1485 bp, Staphylococcus haemolyticus; identical to SEQ ID NO: 14689
  CDS (1)..(1485): transl_table=11

SEQ ID NO: 42607 - protein, 494 aa, Staphylococcus haemolyticus; identical to SEQ ID NO: 14690

SEQ ID NO: 42608 - DNA, 1515 bp, Listeria monocytogenes; identical to SEQ ID NO: 14691
  CDS (1)..(1515): transl_table=11

SEQ ID NO: 42609 - protein, 504 aa, Listeria monocytogenes; identical to SEQ ID NO: 14692

SEQ ID NO: 42610 - DNA, 1485 bp, Salmonella typhimurium; identical to SEQ ID NO: 14693
  CDS (1)..(1485): transl_table=11

SEQ ID NO: 42611 - protein, 494 aa, Salmonella typhimurium; identical to SEQ ID NO: 14694

SEQ ID NO: 42612 - DNA, 1530 bp, Bacillus anthracis; identical to SEQ ID NO: 14695
  CDS (1)..(1530): transl_table=11

SEQ ID NO: 42613 - protein, 509 aa, Bacillus anthracis; identical to SEQ ID NO: 14696

SEQ ID NO: 42614 - DNA, 1530 bp, Bacillus cereus; identical to SEQ ID NO: 14697
  CDS (1)..(1530): transl_table=11

SEQ ID NO: 42615 - protein, 509 aa, Bacillus cereus; identical to SEQ ID NO: 14698

SEQ ID NO: 42616 - DNA, 1503 bp, Bacillus subtilis; identical to SEQ ID NO: 14699
  CDS (1)..(1503): transl_table=11

SEQ ID NO: 42617 - protein, 500 aa, Bacillus subtilis; identical to SEQ ID NO: 14700

SEQ ID NO: 42618 - DNA, 1482 bp, Staphylococcus aureus; identical to SEQ ID NO: 14701
  CDS (1)..(1482): transl_table=11

SEQ ID NO: 42619 - protein, 493 aa, Staphylococcus aureus; identical to SEQ ID NO: 14702

SEQ ID NO: 42620 - DNA, 1473 bp, Staphylococcus epidermidis; identical to SEQ ID NO: 14703
  CDS (1)..(1473): transl_table=11

SEQ ID NO: 42621 - protein, 490 aa, Staphylococcus epidermidis; identical to SEQ ID NO: 14704

SEQ ID NO: 42622 - DNA, 1473 bp, Staphylococcus epidermidis; identical to SEQ ID NO: 14705
  CDS (1)..(1473): transl_table=11

SEQ ID NO: 42623 - protein, 490 aa, Staphylococcus epidermidis; identical to SEQ ID NO: 14706

SEQ ID NO: 42624 - DNA, 1545 bp, Bacillus cereus; identical to SEQ ID NO: 14707
  CDS (1)..(1545): transl_table=11

SEQ ID NO: 42625 - protein, 514 aa, Bacillus cereus; identical to SEQ ID NO: 14708

SEQ ID NO: 42626 - DNA, 1449 bp, Bacillus subtilis; identical to SEQ ID NO: 14709
  CDS (1)..(1449): transl_table=11

SEQ ID NO: 42627 - protein, 482 aa, Bacillus subtilis; identical to SEQ ID NO: 14710

SEQ ID NO: 42628 - DNA, 1485 bp, Staphylococcus aureus; identical to SEQ ID NO: 14711
  CDS (1)..(1485): transl_table=11

SEQ ID NO: 42629 - protein, 494 aa, Staphylococcus aureus; identical to SEQ ID NO: 14712

SEQ ID NO: 42630 - DNA, 1467 bp, Staphylococcus epidermidis; identical to SEQ ID NO: 14713
  CDS (1)..(1467)

SEQ ID NO: 42631 - protein, 488 aa, Staphylococcus epidermidis; identical to SEQ ID NO: 14714

SEQ ID NO: 42632 - DNA, 1512 bp, Bacillus halodurans; identical to SEQ ID NO: 14715
  CDS (1)..(1512): transl_table=11

SEQ ID NO: 42633 - protein, 503 aa, Bacillus halodurans; identical to SEQ ID NO: 14716

SEQ ID NO: 42634 - DNA, 1512 bp, Bacillus pseudofirmus; identical to SEQ ID NO: 14717
  CDS (1)..(1512): transl_table=11

SEQ ID NO: 42635 - protein, 503 aa, Bacillus pseudofirmus; identical to SEQ ID NO: 14718

SEQ ID NO: 42636 - DNA, 1473 bp, Buchnera aphidicola; identical to SEQ ID NO: 14719
  CDS (1)..(1473): transl_table=11

SEQ ID NO: 42637 - protein, 490 aa, Buchnera aphidicola; identical to SEQ ID NO: 14720

SEQ ID NO: 42638 - DNA, 1431 bp, Clostridium perfringens; identical to SEQ ID NO: 14721
  CDS (1)..(1431): transl_table=11

SEQ ID NO: 42639 - protein, 476 aa, Clostridium perfringens; identical to SEQ ID NO: 14722

SEQ ID NO: 42640 - DNA, 1461 bp, Escherichia coli O157; identical to SEQ ID NO: 14723
  CDS (1)..(1461): transl_table=11

SEQ ID NO: 42641 - protein, 486 aa, Escherichia coli O157; identical to SEQ ID NO: 14724

SEQ ID NO: 42642 - DNA, 1449 bp, Listeria monocytogenes; identical to SEQ ID NO: 14725
  CDS (1)..(1449): transl_table=11

SEQ ID NO: 42643 - protein, 482 aa, Listeria monocytogenes; identical to SEQ ID NO: 14726

SEQ ID NO: 42644 - DNA, 1473 bp, Pseudomonas aeruginosa; identical to SEQ ID NO: 14727
  CDS (1)..(1473): transl_table=11

SEQ ID NO: 42645 - protein, 490 aa, Pseudomonas aeruginosa; identical to SEQ ID NO: 14728

SEQ ID NO: 42646 - DNA, 1446 bp, Pseudomonas putida; identical to SEQ ID NO: 14729
  CDS (1)..(1446): transl_table=11

SEQ ID NO: 42647 - protein, 481 aa, Pseudomonas putida; identical to SEQ ID NO: 14730

SEQ ID NO: 42648 - DNA, 1446 bp, Pseudomonas putida; identical to SEQ ID NO: 14731
  CDS (1)..(1446): transl_table=11

SEQ ID NO: 42649 - protein, 481 aa, Pseudomonas putida; identical to SEQ ID NO: 14732

SEQ ID NO: 42650 - DNA, 1440 bp, Pseudomonas syringae; identical to SEQ ID NO: 14733
  CDS (1)..(1440): transl_table=11

SEQ ID NO: 42651 - protein, 479 aa, Pseudomonas syringae; identical to SEQ ID NO: 14734

SEQ ID NO: 42652 - DNA, 1461 bp, Salmonella typhi; identical to SEQ ID NO: 14735
  CDS (1)..(1461): transl_table=11

SEQ ID NO: 42653 - protein, 486 aa, Salmonella typhi; identical to SEQ ID NO: 14736

SEQ ID NO: 42654 - DNA, 1461 bp, Shigella flexneri; identical to SEQ ID NO: 14737
  CDS (1)..(1461): transl_table=11

SEQ ID NO: 42655 - protein, 486 aa, Shigella flexneri; identical to SEQ ID NO: 14738

SEQ ID NO: 42656 - DNA, 1485 bp, Staphylococcus aureus; identical to SEQ ID NO: 14739
  CDS (1)..(1485): transl_table=11

SEQ ID NO: 42657 - protein, 494 aa, Staphylococcus aureus; identical to SEQ ID NO: 14740

SEQ ID NO: 42658 - DNA, 1461 bp, Yersinia pestis; identical to SEQ ID NO: 14741
  CDS (1)..(1461): transl_table=11

SEQ ID NO: 42659 - protein, 486 aa, Yersinia pestis; identical to SEQ ID NO: 14742

SEQ ID NO: 42660 - DNA, 1509 bp, Helicobacter pylori J99; identical to SEQ ID NO: 14743
  CDS (1)..(1509): transl_table=11

SEQ ID NO: 42661 - protein, 502 aa, Helicobacter pylori J99; identical to SEQ ID NO: 14744

SEQ ID NO: 42662 - DNA, 1509 bp, Helicobacter pylori; identical to SEQ ID NO: 14745
  CDS (1)..(1509): transl_table=11

SEQ ID NO: 42663 - protein, 502 aa, Helicobacter pylori; identical to SEQ ID NO: 14746

SEQ ID NO: 42664 - DNA, 1242 bp, Escherichia coli; identical to SEQ ID NO: 14747
  CDS (1)..(1242): transl_table=11

SEQ ID NO: 42665 - protein, 413 aa, Escherichia coli; identical to SEQ ID NO: 14748

SEQ ID NO: 42666 - DNA, 1242 bp, Salmonella typhimurium; identical to SEQ ID NO: 14749
  CDS (1)..(1242): transl_table=11

SEQ ID NO: 42667 - protein, 413 aa, Salmonella typhimurium; identical to SEQ ID NO: 14750

SEQ ID NO: 42668 - DNA, 1242 bp, Shigella flexneri; identical to SEQ ID NO: 14751
  CDS (1)..(1242): transl_table=11

SEQ ID NO: 42669 - protein, 413 aa, Shigella flexneri; identical to SEQ ID NO: 14752

SEQ ID NO: 42670 - DNA, 23 bp, Artificial sequence
  Primer sequence
atgatgaagaaaacgcccacctc

SEQ ID NO: 42671 - DNA, 24 bp, Artificial sequence
  Primer sequence
ttacaataaccattccacgggcaa

SEQ ID NO: 42672 - protein, 736 aa, Artificial sequence; identical to SEQ ID NO: 14755
  Consensus
  Variant (3)..(4): Xaa in position 3 to 4 is any amino acid
  Variant (6)..(7): Xaa in position 6 to 7 is any amino acid
  Variant (9)..(10): Xaa in position 9 to 10 is any amino acid
  Variant (12)..(16): Xaa in position 12 to 16 is any amino acid
  Variant (18)..(19): Xaa in position 18 to 19 is any or no amino acid
  Variant (21)..(21): Xaa in position 21 is any amino acid
  Variant (22)..(93): Xaa in position 22 to 93 is any or no amino acid
  Variant (95)..(105): Xaa in position 95 to 105 is any amino acid
  Variant (106)..(109): Xaa in position 106 to 109 is any or no amino acid
  Variant (111)..(111): Xaa in position 111 is any amino acid
  Variant (113)..(113): Xaa in position 113 is any amino acid
  Variant (116)..(117): Xaa in position 116 to 117 is any amino acid
  Variant (119)..(119): Xaa in position 119 is any or no amino acid
  Variant (121)..(121): Xaa in position 121 is any amino acid
  Variant (123)..(123): Xaa in position 123 is any amino acid
  Variant (127)..(128): Xaa in position 127 to 128 is any amino acid
  Variant (130)..(131): Xaa in position 130 to 131 is any amino acid
  Variant (133)..(135): Xaa in position 133 to 135 is any amino acid
  Variant (137)..(137): Xaa in position 137 is any amino acid
  Variant (139)..(139): Xaa in position 139 is any amino acid
  Variant (144)..(145): Xaa in position 144 to 145 is any amino acid
  Variant (147)..(147): Xaa in position 147 is any amino acid
  Variant (150)..(151): Xaa in position 150 to 151 is any amino acid
  Variant (153)..(154): Xaa in position 153 to 154 is any amino acid
  Variant (158)..(158): Xaa in position 158 is any amino acid
  Variant (161)..(161): Xaa in position 161 is any amino acid
  Variant (165)..(165): Xaa in position 165 is any amino acid
  Variant (172)..(172): Xaa in position 172 is any amino acid
  Variant (176)..(183): Xaa in position 176 to 183 is any amino acid
  Variant (184)..(190): Xaa in position 184 to 190 is any or no amino acid
  Variant (192)..(194): Xaa in position 192 to 194 is any amino acid
  Variant (197)..(197): Xaa in position 197 is any amino acid
  Variant (199)..(200): Xaa in position 199 to 200 is any amino acid
  Variant (202)..(202): Xaa in position 202 is any amino acid
  Variant (204)..(209): Xaa in position 204 to 209 is any amino acid
  Variant (210)..(229): Xaa in position 210 to 229 is any or no amino acid
  Variant (233)..(233): Xaa in position 233 is any amino acid
  Variant (235)..(235): Xaa in position 235 is any amino acid
  Variant (245)..(245): Xaa in position 245 is any amino acid
  Variant (252)..(252): Xaa in position 252 is any amino acid
  Variant (259)..(261): Xaa in position 259 to 261 is any amino acid
  Variant (262)..(286): Xaa in position 262 to 286 is any or no amino acid
  Variant (288)..(288): Xaa in position 288 is any or no amino acid
  Variant (290)..(291): Xaa in position 290 to 291 is any amino acid
  Variant (295)..(295): Xaa in position 295 is any amino acid
  Variant (298)..(298): Xaa in position 298 is any amino acid
  Variant (300)..(301): Xaa in position 300 to 301 is any amino acid
  Variant (303)..(305): Xaa in position 303 to 305 is any amino acid
  Variant (307)..(308): Xaa in position 307 to 308 is any amino acid
  Variant (311)..(313): Xaa in position 311 to 313 is any amino acid
  Variant (315)..(327): Xaa in position 315 to 327 is any amino acid
  Variant (328)..(382): Xaa in position 328 to 382 is any or no amino acid
  Variant (384)..(384): Xaa in position 384 is any or no amino acid
  Variant (388)..(388): Xaa in position 388 is any amino acid
  Variant (391)..(396): Xaa in position 391 to 396 is any amino acid
  Variant (398)..(400): Xaa in position 398 to 400 is any amino acid
  Variant (401)..(413): Xaa in position 401 to 413 is any or no amino acid
  Variant (415)..(415): Xaa in position 415 is any or no amino acid
  Variant (418)..(419): Xaa in position 418 to 419 is any amino acid
  Variant (423)..(423): Xaa in position 423 is any or no amino acid
  Variant (425)..(425): Xaa in position 425 is any or no amino acid
  Variant (427)..(427): Xaa in position 427 is any or no amino acid
  Variant (434)..(436): Xaa in position 434 to 436 is any amino acid
  Variant (439)..(439): Xaa in position 439 is any amino acid
  Variant (442)..(443): Xaa in position 442 to 443 is any amino acid
  Variant (446)..(446): Xaa in position 446 is any amino acid
  Variant (450)..(454): Xaa in position 450 to 454 is any or no amino acid
  Variant (456)..(456): Xaa in position 456 is any amino acid
  Variant (461)..(463): Xaa in position 461 to 463 is any amino acid
  Variant (465)..(466): Xaa in position 465 to 466 is any amino acid
  Variant (469)..(470): Xaa in position 469 to 470 is any amino acid
  Variant (472)..(474): Xaa in position 472 to 474 is any amino acid
  Variant (476)..(477): Xaa in position 476 to 477 is any amino acid
  Variant (478)..(488): Xaa in position 478 to 488 is any or no amino acid
  Variant (491)..(491): Xaa in position 491 is any amino acid
  Variant (498)..(498): Xaa in position 498 is any amino acid
  Variant (500)..(503): Xaa in position 500 to 503 is any amino acid
  Variant (504)..(608): Xaa in position 504 to 608 is any or no amino acid
  Variant (613)..(613): Xaa in position 613 is any amino acid
  Variant (618)..(618): Xaa in position 618 is any amino acid
  Variant (619)..(626): Xaa in position 619 to 626 is any or no amino acid
  Variant (629)..(629): Xaa in position 629 is any amino acid
  Variant (637)..(637): Xaa in position 637 is any amino acid
  Variant (640)..(641): Xaa in position 640 to 641 is any amino acid
  Variant (644)..(644): Xaa in position 644 is any amino acid
  Variant (647)..(647): Xaa in position 647 is any amino acid
  Variant (651)..(651): Xaa in position 651 is any amino acid
  Variant (653)..(653): Xaa in position 653 is any amino acid
  Variant (654)..(655): Xaa in position 654 to 655 is any or no amino acid
  Variant (658)..(659): Xaa in position 658 to 659 is any amino acid
  Variant (661)..(666): Xaa in position 661 to 666 is any amino acid
  Variant (669)..(669): Xaa in position 669 is any amino acid
  Variant (670)..(670): Xaa in position 670 is any or no amino acid
  Variant (672)..(672): Xaa in position 672 is any amino acid
  Variant (673)..(673): Xaa in position 673 is any or no amino acid
  Variant (675)..(678): Xaa in position 675 to 678 is any amino acid
  Variant (680)..(681): Xaa in position 680 to 681 is any amino acid
  Variant (683)..(684): Xaa in position 683 to 684 is any amino acid
  Variant (685)..(722): Xaa in position 685 to 722 is any or no amino acid
  Variant (725)..(727): Xaa in position 725 to 727 is any amino acid
  Variant (729)..(729): Xaa in position 729 is any amino acid
  Variant (734)..(734): Xaa in position 734 is any amino acid

SEQ ID NO: 42673 - protein, 17 aa, Artificial sequence
  Consensus
  Variant (2)..(3): Xaa in position 2 to 3 is any amino acid
  Variant (4)..(4): Xaa in position 4 is any or no amino acid
  Variant (6)..(7): Xaa in position 6 to 7 is any amino acid
  Variant (8)..(8): Xaa in position 8 is any or no amino acid
  Variant (10)..(10): Xaa in position 10 is Ile or Val
  Variant (11)..(11): Xaa in position 11 is any amino acid
  Variant (12)..(12): Xaa in position 12 is Ala, Cys, Thr or Val
  Variant (13)..(16): Xaa in position 13 to 16 is any amino acid
LXXXAXXXGXXXXXXXD

SEQ ID NO: 42674 - protein, 20 aa, Artificial sequence
  Consensus
  Variant (2)..(2): Xaa in position 2 is any amino acid
  Variant (4)..(4): Xaa in position 4 is Asn or Arg
  Variant (6)..(8): Xaa in position 6 to 8 is any amino acid
  Variant (9)..(9): Xaa in position 9 is Ala, Ile or Val
  Variant (11)..(13): Xaa in position 11 to 13 is any amino acid
  Variant (14)..(14): Xaa in position 14 is Ala, Gly, Ser, Thr or Val
  Variant (15)..(16): Xaa in position 15 to 16 is any amino acid
  Variant (18)..(18): Xaa in position 18 is Gly or Ser
  Variant (19)..(19): Xaa in position 19 is any amino acid
RXHXKXXXXDXXXXXXGXXN

SEQ ID NO: 42675 - protein, 22 aa, Artificial sequence
  Consensus
  Variant (2)..(2): Xaa in position 2 is Phe or Leu
  Variant (3)..(3): Xaa in position 3 is Phe, Ile, Leu or Val
  Variant (5)..(11): Xaa in position 5 to 11 is any amino acid
  Variant (12)..(12): Xaa in position 12 is Phe, Ile, Leu, Met or Val
  Variant (13)..(18): Xaa in position 13 to 18 is any amino acid
  Variant (20)..(21): Xaa in position 20 to 21 is any or no amino acid
YXXPXXXXXXXXXXXXXXGXXV

SEQ ID NO: 42676 - protein, 29 aa, Artificial sequence
  Consensus
  Variant (2)..(2): Xaa in position 2 is Ala, Gly, Gln, Ser or Thr
  Variant (4)..(7): Xaa in position 4 to 7 is any amino acid
  Variant (9)..(13): Xaa in position 9 to 13 is any amino acid
  Variant (14)..(14): Xaa in position 14 is any or no amino acid
  Variant (16)..(16): Xaa in position 16 is Ser or Thr
  Variant (17)..(17): Xaa in position 17 is any amino acid
  Variant (19)..(19): Xaa in position 19 is any amino acid
  Variant (20)..(20): Xaa in position 20 is Asp, Asn or Thr
  Variant (21)..(21): Xaa in position 21 is any amino acid
  Variant (24)..(28): Xaa in position 24 to 28 is any amino acid
HXKXXXXDXXXXXXGXXNXXXRSXXXXXE

SEQ ID NO: 42677 - DNA, 291 bp, Escherichia coli K12; identical to SEQ ID NO: 18608
  CDS (1)..(291): transl_table=11

SEQ ID NO: 42678 - protein, 96 aa, Escherichia coli K12; identical to SEQ ID NO: 18609

SEQ ID NO: 42679 - DNA, 216 bp, Bacteriophage 933W; identical to SEQ ID NO: 18610
  CDS (1)..(216): transl_table=11

SEQ ID NO: 42680 - protein, 71 aa, Bacteriophage 933W; identical to SEQ ID NO: 18611

SEQ ID NO: 42681 - DNA, 291 bp, Bacteriophage VT2-Sa; identical to SEQ ID NO: 18612
  CDS (1)..(291): transl_table=11

SEQ ID NO: 42682 - protein, 96 aa, Bacteriophage VT2-Sa; identical to SEQ ID NO: 18613

SEQ ID NO: 42683 - DNA, 315 bp, Escherichia coli O157:H7 EDL933; identical to SEQ ID NO: 18614
  CDS (1)..(315): transl_table=11

SEQ ID NO: 42684 - protein, 104 aa, Escherichia coli O157:H7 EDL933; identical to SEQ ID NO: 18615

SEQ ID NO: 42685 - DNA, 315 bp, Escherichia coli O157:H7 EDL933; identical to SEQ ID NO: 18616
  CDS (1)..(315): transl_table=11

SEQ ID NO: 42686 - protein, 104 aa, Escherichia coli O157:H7 EDL933; identical to SEQ ID NO: 18617

SEQ ID NO: 42687 - DNA, 273 bp, Escherichia coli O157:H7 EDL933; identical to SEQ ID NO: 18618
  CDS (1)..(273): transl_table=11

SEQ ID NO: 42688 - protein, 90 aa, Escherichia coli O157:H7 EDL933; identical to SEQ ID NO: 18619

SEQ ID NO: 42689 - DNA, 216 bp, Escherichia coli O157:H7; identical to SEQ ID NO: 18620
  CDS (1)..(216): transl_table=11

SEQ ID NO: 42690 - protein, 71 aa, Escherichia coli O157:H7; identical to SEQ ID NO: 18621

SEQ ID NO: 42691 - DNA, 207 bp, Escherichia coli O157:H7; identical to SEQ ID NO: 18622
  CDS (1)..(207): transl_table=11

SEQ ID NO: 42692 - protein, 68 aa, Escherichia coli O157:H7; identical to SEQ ID NO: 18623

SEQ ID NO: 42693 - DNA, 216 bp, Escherichia coli O157:H7; identical to SEQ ID NO: 18624
  CDS (1)..(216): transl_table=11

SEQ ID NO: 42694 - protein, 71 aa, Escherichia coli O157:H7; identical to SEQ ID NO: 18625

SEQ ID NO: 42695 - DNA, 216 bp, Escherichia coli O157:H7; identical to SEQ ID NO: 18626
  CDS (1)..(216): transl_table=11

SEQ ID NO: 42696 - protein, 71 aa, Escherichia coli O157:H7; identical to SEQ ID NO: 18627

SEQ ID NO: 42697 - DNA, 216 bp, Escherichia coli O157:H7; identical to SEQ ID NO: 18628
  CDS (1)..(216): transl_table=11

SEQ ID NO: 42698 - protein, 71 aa, Escherichia coli O157:H7; identical to SEQ ID NO: 18629

SEQ ID NO: 42699 - DNA, 207 bp, Escherichia coli O157:H7; identical to SEQ ID NO: 18630
  CDS (1)..(207): transl_table=11

SEQ ID NO: 42700 - protein, 68 aa, Escherichia coli O157:H7; identical to SEQ ID NO: 18631

SEQ ID NO: 42701 - DNA, 207 bp, Escherichia coli O157:H7; identical to SEQ ID NO: 18632
  CDS (1)..(207): transl_table=11

SEQ ID NO: 42702 - protein, 68 aa, Escherichia coli O157:H7; identical to SEQ ID NO: 18633

SEQ ID NO: 42703 - DNA, 216 bp, Shigella flexneri 2a str. 301; identical to SEQ ID NO: 18634
  CDS (1)..(216): transl_table=11

SEQ ID NO: 42704 - protein, 71 aa, Shigella flexneri 2a str. 301; identical to SEQ ID NO: 18635

SEQ ID NO: 42705 - DNA, 216 bp, Shigella flexneri 2a str. 301; identical to SEQ ID NO: 18636
  CDS (1)..(216): transl_table=11

SEQ ID NO: 42706 - protein, 71 aa, Shigella flexneri 2a str. 301; identical to SEQ ID NO: 18637

SEQ ID NO: 42707 - DNA, 321 bp, Escherichia coli CFT073; identical to SEQ ID NO: 18638
  CDS (1)..(321): transl_table=11

SEQ ID NO: 42708 - protein, 106 aa, Escherichia coli CFT073; identical to SEQ ID NO: 18639

SEQ ID NO: 42709 - DNA, 216 bp, Escherichia coli CFT073; identical to SEQ ID NO: 18640
  CDS (1)..(216): transl_table=11

SEQ ID NO: 42710 - protein, 71 aa, Escherichia coli CFT073; identical to SEQ ID NO: 18641

SEQ ID NO: 42711 - DNA, 216 bp, Shigella flexneri 2a str. 2457T; identical to SEQ ID NO: 18642
  CDS (1)..(216): transl_table=11

SEQ ID NO: 42712 - protein, 71 aa, Shigella flexneri 2a str. 2457T; identical to SEQ ID NO: 18643

SEQ ID NO: 42713 - DNA, 180 bp, Shigella flexneri 2a str. 2457T; identical to SEQ ID NO: 18644
  CDS (1)..(180): transl_table=11

SEQ ID NO: 42714 - protein, 59 aa, Shigella flexneri 2a str. 2457T; identical to SEQ ID NO: 18645

SEQ ID NO: 42715 - DNA, 213 bp, Yersinia pseudotuberculosis IP 32953; identical to SEQ ID NO: 18646
  CDS (1)..(213): transl_table=11

SEQ ID NO: 42716 - protein, 70 aa, Yersinia pseudotuberculosis IP 32953; identical to SEQ ID NO: 18647

SEQ ID NO: 42717 - DNA, 216 bp, Shigella sonnei Ss046; identical to SEQ ID NO: 18648
  CDS (1)..(216): transl_table=11

SEQ ID NO: 42718 - protein, 71 aa, Shigella sonnei Ss046; identical to SEQ ID NO: 18649

SEQ ID NO: 42719 - DNA, 216 bp, Shigella sonnei Ss046; identical to SEQ ID NO: 18650
  CDS (1)..(216): transl_table=11

SEQ ID NO: 42720 - protein, 71 aa, Shigella sonnei Ss046; identical to SEQ ID NO: 18651

SEQ ID NO: 42721 - DNA, 207 bp, Bacteriophage H19B; identical to SEQ ID NO: 18652
  CDS (1)..(207): transl_table=11

SEQ ID NO: 42722 - protein, 68 aa, Bacteriophage H19B; identical to SEQ ID NO: 18653

SEQ ID NO: 42723 - DNA, 291 bp, Stx1; identical to SEQ ID NO: 18654
  CDS (1)..(291): transl_table=11

SEQ ID NO: 42724 - protein, 96 aa, Stx1; identical to SEQ ID NO: 18655

SEQ ID NO: 42725 - DNA, 150 bp, Escherichia coli; identical to SEQ ID NO: 18656
  CDS (1)..(150): transl_table=11

SEQ ID NO: 42726 - protein, 49 aa, Escherichia coli; identical to SEQ ID NO: 18657

SEQ ID NO: 42727 - DNA, 216 bp, Escherichia coli; identical to SEQ ID NO: 18658
  CDS (1)..(216): transl_table=11

SEQ ID NO: 42728 - protein, 71 aa, Escherichia coli; identical to SEQ ID NO: 18659

SEQ ID NO: 42729 - DNA, 216 bp, Shigella dysenteriae; identical to SEQ ID NO: 18660
  CDS (1)..(216): transl_table=11

SEQ ID NO: 42730 - protein, 71 aa, Shigella dysenteriae; identical to SEQ ID NO: 18661

SEQ ID NO: 42731 - DNA, 216 bp, Escherichia coli O6; identical to SEQ ID NO: 18662
  CDS (1)..(216): transl_table=11

SEQ ID NO: 42732 - protein, 71 aa, Escherichia coli O6; identical to SEQ ID NO: 18663

SEQ ID NO: 42733 - DNA, 216 bp, Bacteriophage P21; identical to SEQ ID NO: 18664
  CDS (1)..(216): transl_table=11

SEQ ID NO: 42734 - protein, 71 aa, Bacteriophage P21; identical to SEQ ID NO: 18665

SEQ ID NO: 42735 - DNA, 24 bp, Artificial sequence
  Primer sequence
atgctgtcaaaactaccccgtaga

SEQ ID NO: 42736 - DNA, 23 bp, Artificial sequence
  Primer sequence
ttactctcctctcgcagccttac

SEQ ID NO: 42737 - protein, 71 aa, Artificial sequence; identical to SEQ ID NO: 18668
  Consensus
  Variant (2)..(3): Xaa in position 2 to 3 is any amino acid
  Variant (14)..(14): Xaa in position 14 is any amino acid
  Variant (18)..(20): Xaa in position 18 to 20 is any amino acid
  Variant (24)..(24): Xaa in position 24 is any amino acid
  Variant (27)..(27): Xaa in position 27 is any amino acid
  Variant (30)..(30): Xaa in position 30 is any amino acid
  Variant (37)..(37): Xaa in position 37 is any amino acid
  Variant (47)..(47): Xaa in position 47 is any amino acid
  Variant (49)..(49): Xaa in position 49 is any amino acid
  Variant (67)..(67): Xaa in position 67 is any amino acid

SEQ ID NO: 42738 - protein, 10 aa, Artificial sequence
  Consensus
  Variant (2)..(2): Xaa in position 2 is Asp or Glu
  Variant (5)..(5): Xaa in position 5 is Ser or Thr
  Variant (7)..(7): Xaa in position 7 is Gly or Ser
  Variant (8)..(8): Xaa in position 8 is Ile or Val
  Variant (9)..(9): Xaa in position 9 is Ala or Ser
MXKIXTXXXY

SEQ ID NO: 42739 - protein, 6 aa, Artificial sequence
  Consensus
  Variant (2)..(2): Xaa in position 2 is Phe or Leu
  Variant (5)..(5): Xaa in position 5 is any amino acid
WXLQXL

SEQ ID NO: 42740 - protein, 14 aa, Artificial sequence
  Consensus
  Variant (5)..(5): Xaa in position 5 is any or no amino acid
  Variant (7)..(7): Xaa in position 7 is any or no amino acid
PSQWXAXIGVLGSL

SEQ ID NO: 42741 - DNA, 2262 bp, Escherichia coli
  CDS (1)..(2262)
atgtcgcaacataacgaaaagaacccacatcagcaccagtcaccactacacgattccagcgaagcgaaaccggggatggactcactggcacctgaggacggctctcatcgtccagcggctgaaccaacaccgccaggtgcacaacctaccgccccagggagcctgaaagcccctgatacgcgtaacgaaaaacttaattctctggaagacgtacgcaaaggcagtgaaaattatgcgctgaccactaatcagggcgtgcgcatcgccgacgatcaaaactcactgcgtgccggtagccgtggtccaacgctgctggaagattttattctgcgcgagaaaatcacccactttgaccatgagcgcattccggaacgtattgttcatgcacgcggatcagccgctcacggttatttccagccatataaaagcttaagcgatattaccaaagcggatttcctctcagatccgaacaaaatcaccccagtatttgtacgtttctctaccgttcagggtggtgctggctctgctgataccgtgcgtgatatccgtggctttgccaccaagttctataccgaagagggtatttttgacctcgttggcaataacacgccaatcttctttatccaggatgcgcataaattccccgattttgttcatgcggtaaaaccagaaccgcactgggcaattccacaagggcaaagtgcccacgatactttctgggattatgtttctctgcaacctgaaactctgcacaacgtgatgtgggcgatgtcggatcgcggcatcccccgcagttaccgcaccatggaaggcttcggtattcacaccttccgcctgattaatgccgaagggaaggcaacgtttgtacgtttccactggaaaccactggcaggtaaagcctcactcgtttgggatgaagcacaaaaactcaccggacgtgacccggacttccaccgccgcgagttgtgggaagccattgaagcaggcgattttccggaatacgaactgggcttccagttgattcctgaagaagatgaattcaagttcgacttcgatcttctcgatccaaccaaacttatcccggaagaactggtgcccgttcagcgtgtcggcaaaatggtgctcaatcgcaacccggataacttctttgctgaaaacgaacaggcggctttccatcctgggcatatcgtgccgggactggacttcaccaacgatccgctgttgcagggacgtttgttctcctataccgatacacaaatcagtcgtcttggtgggccgaatttccatgagattccgattaaccgtccgacctgcccttaccataatttccagcgtgacggcatgcatcgcatggggatcgacactaacccggcgaattacgaaccgaactcgattaacgataactggccgcgcgaaacaccgccggggccgaaacgcggcggttttgaatcataccaggagcgcgtggaaggcaataaagttcgcgagcgcagcccatcgtttggcgaatattattcccatccgcgtctgttctggctaagtcagacgccatttgagcagcgccatattgtcgatggtttcagttttgagttaagcaaagtcgttcgtccgtatattcgtgagcgcgttgttgaccagctggcgcatattgatctcactctggcccaggcggtggcgaaaaatctcggtatcgaactgactgacgaccagctgaatatcaccccacctccggacgtcaacggtctgaaaaaggatccatccttaagtttgtacgccattcctgacggtgatgtgaaaggtcgcgtggtagcgattttacttaatgatgaagtgagatcggcagaccttctggccattctcaaggcgctgaaggccaaaggcgttcatgccaaactgctctactcccgaatgggtgaagtgactgcggatgacggtacggtgttgcctatagccgctacctttgccggtgcaccttcgctgacggtcgatgcggtcattgtcccttgcggcaatatcgcggatatcgctgacaacggcgatgccaactactacctgatggaagcctacaaacaccttaaaccgattgcgctggcgggtgacgcgcgcaagtttaaagcaacaatcaagatcgctgaccagggtgaagaagggattgtggaagctgacagcgctgacggtagttttatggatgaactgctaacgctgatggcagcacaccgcgtgtggtcacgcattcctaagattgacaaaattcctgcctga

SEQ ID NO: 42742 - protein, 753 aa, Escherichia coli
MSQHNEKNPHQHQSPLHDSSEAKPGMDSLAPEDGSHRPAAEPTPPGAQPTAPGSLKAPDTRNEKLNSLEDVRKGSENYALTTNQGVRIADDQNSLRAGSRGPTLLEDFILREKITHFDHERIPERIVHARGSAAHGYFQPYKSLSDITKADFLSDPNKITPVFVRFSTVQGGAGSADTVRDIRGFATKFYTEEGIFDLVGNNTPIFFIQDAHKFPDFVHAVKPEPHWAIPQGQSAHDTFWDYVSLQPETLHNVMWAMSDRGIPRSYRTMEGFGIHTFRLINAEGKATFVRFHWKPLAGKASLVWDEAQKLTGRDPDFHRRELWEAIEAGDFPEYELGFQLIPEEDEFKFDFDLLDPTKLIPEELVPVQRVGKMVLNRNPDNFFAENEQAAFHPGHIVPGLDFTNDPLLQGRLFSYTDTQISRLGGPNFHEIPINRPTCPYHNFQRDGMHRMGIDTNPANYEPNSINDNWPRETPPGPKRGGFESYQERVEGNKVRERSPSFGEYYSHPRLFWLSQTPFEQRHIVDGFSFELSKVVRPYIRERVVDQLAHIDLTLAQAVAKNLGIELTDDQLNITPPPDVNGLKKDPSLSLYAIPDGDVKGRVVAILLNDEVRSADLLAILKALKAKGVHAKLLYSRMGEVTADDGTVLPIAATFAGAPSLTVDAVIVPCGNIADIADNGDANYYLMEAYKHLKPIALAGDARKFKATIKIADQGEEGIVEADSADGSFMDELLTLMAAHRVWSRIPKIDKIPA

SEQ ID NO: 42743 - DNA, 1584 bp, Canis familiaris
  CDS (1)..(1584)
atggcggacagccgggacccagccagcgaccagatgaagctctggaaggagcagcgcgccgcgcagaaacctgatgtcctgaccaccgggggcggtaatccaataggagacaaacttaatgtgatgacagcagggcctcgggggccccttcttgttcaggatgtggttttcactgatgaaatggctcactttgaccgggagagaatccctgagagagtcgtgcacgctaaaggagcaggggcttttggctacttcgaggtcacacatgacattaccaaatactccaaagcaaaggtgtttgagcatattggaaagaggacccccattgcagttcgattctccactgttgctggagaatcaggctcggctgacacagttcgtgaccctcgtgggtttgcagtgaaattttacacagaggatggtaattgggatcttgttggaaataacacccccattttcttcatcagagatgccatattgtttccgtcctttatccatagtcaaaagagaaaccctcaaacacacctgaaggatccggacatggtctgggacttctggagcctgcgccctgagtctctgcaccaggtttccttcttgttcagtgatcgagggattccagatggacacaggcacatgaatggatatggatcacatacttttaagctggttaatgcagcgggagaggcggtttattgcaaattccattataagactgaccagggcatcaaaaacctttctgttgaagacgcagcaagactttctcatgaagatcctgactacggcctccgggatcttttcaatgccattgccacaggcaactacccctcctggacattttatatccaagtcatgacttttagtcaggcagaaacttttccattcaatccatttgatcttaccaagatttggcctcaccaagactaccctcttatcccagttggtaaactggtcttaaaccggaatccagttaattacttcgctgaggttgaacagatggcatttgacccaagcaacatgccacctggcattgagcccagccctgacaaaatgcttcagggtcgtctttttgcctatcctgacactcaccgccaccgcctgggacccaactatcttcagatacctgtgaactgtcctttccgggctcgagtggccaactaccaacgggatggccccatgtgcatgctcgacaatcagggtggtgctccaaattactaccccaatagctttagtgctcctgaacaacagcgttgtgtcctagagcatagcagccaatgttcgccagatgtgcagcgcttcaacagtgccaatgaagataatgtcactcaggtgcggaccttctatttgaaggtacttggtgaagaggagaggaaacgcctgtgcgagaacattgctggccatctgaaggacgcacaacttttcatccagaagaaagcggtcaagaacttcagtgatgtccaccctgactacggggcccgcattcaggctcttttggacaaatacaatgctgagaaacctaagaacgcgattcacacctttatgcagcatgggtctcacctggctgccagggaaaaagccaatctgtga

SEQ ID NO: 42744 - protein, 527 aa, Canis familiaris
MADSRDPASDQMKLWKEQRAAQKPDVLTTGGGNPIGDKLNVMTAGPRGPLLVQDVVFTDEMAHFDRERIPERVVHAKGAGAFGYFEVTHDITKYSKAKVFEHIGKRTPIAVRFSTVAGESGSADTVRDPRGFAVKFYTEDGNWDLVGNNTPIFFIRDAILFPSFIHSQKRNPQTHLKDPDMVWDFWSLRPESLHQVSFLFSDRGIPDGHRHMNGYGSHTFKLVNAAGEAVYCKFHYKTDQGIKNLSVEDAARLSHEDPDYGLRDLFNAIATGNYPSWTFYIQVMTFSQAETFPFNPFDLTKIWPHQDYPLIPVGKLVLNRNPVNYFAEVEQMAFDPSNMPPGIEPSPDKMLQGRLFAYPDTHRHRLGPNYLQIPVNCPFRARVANYQRDGPMCMLDNQGGAPNYYPNSFSAPEQQRCVLEHSSQCSPDVQRFNSANEDNVTQVRTFYLKVLGEEERKRLCENIAGHLKDAQLFIQKKAVKNFSDVHPDYGARIQALLDKYNAEKPKNAIHTFMQHGSHLAAREKANL

SEQ ID NO: 42745 - DNA, 2109 bp, Mesorhizobium loti MAFF303099
  CDS (1)..(2109): transl_table=11
atggcgaagcaagcatccaaattggccggaacggccgcgaccatccacgatcagaaactgcagcgcggcgaaggcggcgaactgcaccagaccgcgtccggttcgacagccgtactgaccaccgcacagggcggccctgtctcggacgaccagaactcgctgaggatcggtgcgcgtgggccaaccgtgctcgaggacttccacttccgcgaaaagatcttccatttcgatcacgagcgcattcccgagcgcgtcgtccatgcgcgtggctatggcgcgcacggctatttcgaaacctatgaatcgctggccaaatacacccgcgccgacatcttccagcgcgccggcgaaaagacgccggctttcgtgcgcttctccaccgttgccggcaataagggctccgccgatcttgcccgcgacgtccgtggcttcgccgtaaaactctacacgcaggaaggcaattgggacattgtcggcaacaacatgccggtgttcttcatccaggatgcgatcaagtttcccgacctgatccatgccgcgaaggccgagcccaacagcgatttcccgcaggcacagaccgcgcacgacaatttctgggatttcatctcgctcacgccggaaagcatgcacatgatcatgtgggcgatgtccgaccgcgccatcccgcgctcgctgcgcttcatggaagggttcggcgtccacactttccggctgctcaacgcgaaggatgaatcgaccttcgtcaaattcctctggaagccgaagctcggcctccagtcggtcgcctggaacgaggcggtcaagatcaacggcgccgaccccgacttccatcgccgcgacctctgggacgcgatccacgccgggaatttccccgaatgggaactgcagctgcagctcttcgaccaggccttcgccgacagcttcgacttcgacatcctcgatccgaccaaactcatccccgaggaggtgctgccgccgatcgcggtcggccgactggtcctcgatcgcatgcccgacaatttcttcgccgagaccgagcaggtggcgttcatgacgcagaacgtgccgcccggcgtcgacttctccaacgacccgctgctgcagggccgcaatttttcctatctcgacacgcagatcaaacggctgggcagcaccaacttcacccacctcccgatcaacgcgccgaaatgccccttccacactttccagcaggacgggcacatggcgatgcgcaacccggtgggccgcgccaactaccagcccaattcatgggatgaaggcccgcgcgaatctccgcaaaagggcttccgatcctttgccgaagccgaagccggaccgaaggcccgcctgcgggcggaaagctttgccgatcactacagccaggcacgccaattctacatcagccagcaccccgtggaacaaggccacatcgcctcggcgctgaccttcgaactgagcaaggtgcacaccccggtcatccgcgagcgcatcgtatcccacctcctcaatatcgatgatgcgttggctcgcaaggtggcggatgcgctgggcctgaaggcgatgccgaagcccgccgatgcgggggcgccgacgcgcaccgaccttcccgcgtccgacgcgctcagcatcctcaagaacggccccggccgcttcgagggacgcaagctcggcatcctggtgaccgacggcaccgacgcagctctgctcaatgctctgaagcaggcgctgaccaaggccggcgccaagttcgagatcatcgcgccgaaggtcggcggcgccaaggccagcgacggcagctggatggacgcgcagcagatgatcgccggcgcgccgtctgttctctacgacgccattgcgctgctggcggcaaagcctgcaatggccgggctgctgagggaatcgaccgcccgcgacttcgtcgccgacgcctttgcgcactgcaaattcatcggcttcgtcgaggcggcggcaccactgctggacaaggccggagttgtcgaggacgaggcggtgatcccgcttgcatccgccaaggatgtcgcgggcttcatcaccaggctcggcgacctgcgcctctgggcacgcgagccgaaggtgaagctgggctga

SEQ ID NO: 42746 - protein, 702 aa, Mesorhizobium loti MAFF303099
MAKQASKLAGTAATIHDQKLQRGEGGELHQTASGSTAVLTTAQGGPVSDDQNSLRIGARGPTVLEDFHFREKIFHFDHERIPERVVHARGYGAHGYFETYESLAKYTRADIFQRAGEKTPAFVRFSTVAGNKGSADLARDVRGFAVKLYTQEGNWDIVGNNMPVFFIQDAIKFPDLIHAAKAEPNSDFPQAQTAHDNFWDFISLTPESMHMIMWAMSDRAIPRSLRFMEGFGVHTFRLLNAKDESTFVKFLWKPKLGLQSVAWNEAVKINGADPDFHRRDLWDAIHAGNFPEWELQLQLFDQAFADSFDFDILDPTKLIPEEVLPPIAVGRLVLDRMPDNFFAETEQVAFMTQNVPPGVDFSNDPLLQGRNFSYLDTQIKRLGSTNFTHLPINAPKCPFHTFQQDGHMAMRNPVGRANYQPNSWDEGPRESPQKGFRSFAEAEAGPKARLRAESFADHYSQARQFYISQHPVEQGHIASALTFELSKVHTPVIRERIVSHLLNIDDALARKVADALGLKAMPKPADAGAPTRTDLPASDALSILKNGPGRFEGRKLGILVTDGTDAALLNALKQALTKAGAKFEIIAPKVGGAKASDGSWMDAQQMIAGAPSVLYDAIALLAAKPAMAGLLRESTARDFVADAFAHCKFIGFVEAAAPLLDKAGVVEDEAVIPLASAKDVAGFITRLGDLRLWAREPKVKLG

SEQ ID NO: 42747 - DNA, 1602 bp, Bacillus halodurans C-125
  CDS (1)..(1602): transl_table=11
atgaaagatcaaaatcaagatcccaataagcgatctgacaatgaaacagatgaaacgttaacgaacagacagggtcatcctgtcacgaacaaccagcatgttcgaacagtgggagatcgggggccaactactttagagaattatgattttcttgagaaaattagccattttgaccgagaacgtattccagagcgtgtcgttcatgccagaggggcgggggcacacggttattttgaaagctatggtacatatggggatgaacccatttcgaagtatactcgtgcgaaagtgttcacggaaaaaggcaagcaaacaccggtttttgttcgtttttcctcggtcattcacggtgggcattcaccagagacattacgagaccctaggggatttgcggtgaagttttataccgaagatggtaactgggatttagtagggaacaacttaaaaatcttctttatccgtgatccgttgaaatttcctgatttggttcatgcgttcaagccagatccggttacgaatgtacaagatggagaacggatctttgattttatttcacaaacaccagaggccatgcacatgatcacattcttgttctcaccgtggggcatacctgctaactatcgaatgatgcaaggatctggcgtaaacacctacaaatgggtaaatgaagaggggaatgcggttctcgttaaataccattgggaaccgaagcaaggaatcaaaaatttaacgcagaaggaagcagaggccattcaagcgaaaaactttaaccatgcaactttggatttgtacgaagcgattgaggacggagattatccagagtgggaattgtatgtgcaaattatgagtgatgatgcccatccagagcttgattttgatccgctagatcccacgaaattgtggtataaagatcaattcccatgggtacccgttggcagaatggtgttaaataaaaatcctgaaaactactttgcagaggtggaacaagccgcctttgggacgggtgtactcgtcgatggccttgatttctcagacgataagctattgcagggccgaacgttttcttattctgatacacaacggtatcgggtaggggcaaattatttacagttacctatcaatgccccaaaaaaacgggtagcaacgaatcagcgagatggacaaatggaataccatgtggacataggaccaaagcaaaacccccatgtaaactatgagccatctttattaaatgggctaaaagaagcaaagcaagatggccaggaccataccccgtatgttgaaggtgaactgcaacgggcgagcatcgataggcaaaacgattatggacaggcaggtgaaacctatcgccggttgtcagactgggagcgagatgatcttattttgaatcttgtgaacacactcgcaccttgtcatgaagatattcaaaagcaaatgattgatcactttagccaatgtgaccctgagtatggacgaagggtgaaggaagggttagagaaacaaaagggagcagatactcataggcagccacaaggcggtgcagatggggatgcggcgatgcatgcggcagaagctctgggacatccttcagatccttattaa

SEQ ID NO: 42748 - protein, 533 aa, Bacillus halodurans C-125
MKDQNQDPNKRSDNETDETLTNRQGHPVTNNQHVRTVGDRGPTTLENYDFLEKISHFDRERIPERVVHARGAGAHGYFESYGTYGDEPISKYTRAKVFTEKGKQTPVFVRFSSVIHGGHSPETLRDPRGFAVKFYTEDGNWDLVGNNLKIFFIRDPLKFPDLVHAFKPDPVTNVQDGERIFDFISQTPEAMHMITFLFSPWGIPANYRMMQGSGVNTYKWVNEEGNAVLVKYHWEPKQGIKNLTQKEAEAIQAKNFNHATLDLYEAIEDGDYPEWELYVQIMSDDAHPELDFDPLDPTKLWYKDQFPWVPVGRMVLNKNPENYFAEVEQAAFGTGVLVDGLDFSDDKLLQGRTFSYSDTQRYRVGANYLQLPINAPKKRVATNQRDGQMEYHVDIGPKQNPHVNYEPSLLNGLKEAKQDGQDHTPYVEGELQRASIDRQNDYGQAGETYRRLSDWERDDLILNLVNTLAPCHEDIQKQMIDHFSQCDPEYGRRVKEGLEKQKGADTHRQPQGGADGDAAMHAAEALGHPSDPY

SEQ ID NO: 42749 - DNA, 2136 bp, Bacillus halodurans C-125
  CDS (1)..(2136): transl_table=11
gtggacaaagaccaacaaggaaccgaatcatctgaaaataagaagaatgaacagctagaaccattcaaggtggatcacaaaaacacgaagctcacaacgaatcaaggggtgagggtatctgacacggacgattcccttaaagcaggggatcgaggccctaccttaatggaagacttccattttcgggaaaaaatgactcattttgatcatgaacggattcctgagcgtgtcgttcatgcgcgaggtttcggtgcccacggctactttcaagtgtatgagccaatgaccgaatatacgaaagcatcatttttacaggaccctaatgtaaagacaccggtgtttgtccgtttttctacagtggtcggttcgcgcgggtcagccgatacggttcgtgacgtaaggggatttgcgacgaagttttacacagaggacggaaactatgacctagtagcaaacaacatcccgatcttttttattcaggacgctattaagttcccagatgtggttcacgccttaaaacctgaaccgcacaatgaaatcccgcaagcttctgcagcgcacgacacgttctgggattttgtcgttagcaacacagaaaccgctcatatgattatgtggctcctttcagacagagcaatcccgcgcagctttcgaatgatggaagggtttggcgtcaacacgttccggttcgtgaacgaacaagggaaggcccgattcgtaaaattccattggaagccgaagctcggagttcattcgctcgtttgggatgaagcgcaaaagcttgccgggaaagatcctgacttccatcgtcgcgatttgtgggaagcgattaacatgggagaataccctgaatacgagttaggcgtgcaaatgattgaggaagaagatgagttttcgtttgatttcgatatccttgatccgacgaagttttggccagaggaaatggttccggtaaagcttatcgggaaaatgacattgaatcgaaatcaggacaatttcttcgccgaaaccgaacaagtcgcatttcatgcagggaatgtcgtcccagggattgatttcagcaatgacccgctcttacaaggtcggcttttctcttatcttgacacccaactgcttcgcttaagtggtccgaactttcacgaaatcccgatcaatcgaccaattgcccctgtcaacaacaaccagcgagatggattccatcggatgacgattgacaagggggctgttagctactcgccaaatacgcttcgcaataactcgcctgaaccagcatcggatcaagaacacggatacgttcattatatggaaaaggtcgaaggacaaaaaattcgcaggcgcagtgagagctttaacgatcatttcagccaagccactttgttttggaacagtttgtcgacagcggaaaaacaacacctgatcaaggcgttccattttgaagtcggaagtgtaaaggataaaaacctcaaacaacgtgttgttgagatgtttaatcaagtcgatggaaagttagcggcagagatcgcgaaaggaatcggtgtcaaccctccgaccacacctgggggaacgggagtaacagcgtcatctccagccgtcagtcaagaaaatacgatcaaactggcaagaacgcgaaaagtggccgttctaattgatcatggctttgctttcgacgaggtgtcacaagtggtcactgcgctacaatccgctggtctcggagtagatctcgtgagtaagcagttagggatgatttccagcgctgaaggggagcaactagaagcaaacaaaagcttcgccactaccggtgccatcatgtacgacgcactttacatcggcggtggtgcccaatccattagtagcctcaatttgtacagtgaatcgaaaacctttgttgatgaagcatttaaacatgcgaaaacaatcggagctacaaatgaaggcattgaactactaatagctgcacaagttcaaggaattacattcgcaggtcctgattcgaacgatcatgttgtgaacgacctagggattattacgattcaaacagataaagattttaaggcatttactgatgaaatgatccacgccattgcccagcaccgccattggatgcgggaatttaaggatggcaaattgtccggttaa

SEQ ID NO: 42750 - protein, 711 aa, Bacillus halodurans C-125
MDKDQQGTESSENKKNEQLEPFKVDHKNTKLTTNQGVRVSDTDDSLKAGDRGPTLMEDFHFREKMTHFDHERIPERVVHARGFGAHGYFQVYEPMTEYTKASFLQDPNVKTPVFVRFSTVVGSRGSADTVRDVRGFATKFYTEDGNYDLVANNIPIFFIQDAIKFPDVVHALKPEPHNEIPQASAAHDTFWDFVVSNTETAHMIMWLLSDRAIPRSFRMMEGFGVNTFRFVNEQGKARFVKFHWKPKLGVHSLVWDEAQKLAGKDPDFHRRDLWEAINMGEYPEYELGVQMIEEEDEFSFDFDILDPTKFWPEEMVPVKLIGKMTLNRNQDNFFAETEQVAFHAGNVVPGIDFSNDPLLQGRLFSYLDTQLLRLSGPNFHEIPINRPIAPVNNNQRDGFHRMTIDKGAVSYSPNTLRNNSPEPASDQEHGYVHYMEKVEGQKIRRRSESFNDHFSQATLFWNSLSTAEKQHLIKAFHFEVGSVKDKNLKQRVVEMFNQVDGKLAAEIAKGIGVNPPTTPGGTGVTASSPAVSQENTIKLARTRKVAVLIDHGFAFDEVSQVVTALQSAGLGVDLVSKQLGMISSAEGEQLEANKSFATTGAIMYDALYIGGGAQSISSLNLYSESKTFVDEAFKHAKTIGATNEGIELLIAAQVQGITFAGPDSNDHVVNDLGIITIQTDKDFKAFTDEMIHAIAQHRHWMREFKDGKLSG

SEQ ID NO: 42751 - DNA, 1455 bp, Pasteurella multocida subsp. multocida str. Pm70
  CDS (1)..(1455): transl_table=11
atgtctaaatgcccatttgaccatggttcaaaaaccttaacgaatgcagctggtgcacctattgttgaaaacgacaacaccatgtctgcgggtcctaaaggtccattacttttacaagatgtttggttccaagagaaattagcacactttgcacgtgagcgtattcctgagcgtgttgttcatgcaaaaggttcagcagcgtacggtacattcactgtgacacacgatatcagcaaatacaccaaagcggatttattcaatggtatcggtaaacaaacacaagtcttattacgtttctcaacagtagcgggtgagcgcggtgcggcagacgctgagcgtgatgtgcgtggtttcgcattaaaattctacactgaacaaggtaactgggacttagtgggtaacaacacacccgtattctttatccgtgatccattgaaattcccagatttcattcatactcaaaaacgtaatccacaaactaacttgcgtgatgcaaacgcggcatgggatttctggtcacgtcatcctgaatcattacaccaaatcatgattcttttcagtgatcgtggtattccaactgacttacgtcatatgaacggttacggtagccatacatatagctttattaacgcacaaaatgagcgtttctgggtgaaattccacttcaaaacacaacaaggtcacaaattctatactaatgaagaagcggctaaagtggtgggtgaaaaccgtgagtcaagccaacaagatttatacgaagcgattgagcgtggcgaattcccacgttggaatgttcaagtgcaaatcatgccagaagcagatgcacacaaacataactatgcgtttgacttaactaaagtatggccacacaaagattatccgatgatcgaagtgggtgtattagagttaaaccaaaacccaattaactacttcgcagaagtggaacaagctgcgtttgcaccttctaacatcgtaccgggaattggtttctcaccagaccgtatgttacaaggtcgtcttttctcataccaagacgcgcaacgttatcgtttaggggttaaccatcaccaaatcccagtgaacgcaccaaaatgcccataccacaccactcaccgtgatggcgcaatgcgtgtagataacaatggtggtacacaccctaactatgcaccgaaccgttttgatacttatgtgccgactcaccaacaagagcctgcattagagttagagcgttcagcagcacactttaacttccgtgagtatgatgaagactactacacacaacctgccgcactttacaacttattcgatgtggatcaaaaagcacgtgtggcagccaacttcgcagcgggcttagcaggtgttacagaacctgcgattgttgaaagacaattagcccacttcgacaaagtaagcaaagaattagctgatgcaattcgtgcgaacttagcgaaataa

SEQ ID NO: 42752 - protein, 484 aa, Pasteurella multocida subsp. multocida str. Pm70
MSKCPFDHGSKTLTNAAGAPIVENDNTMSAGPKGPLLLQDVWFQEKLAHFARERIPERVVHAKGSAAYGTFTVTHDISKYTKADLFNGIGKQTQVLLRFSTVAGERGAADAERDVRGFALKFYTEQGNWDLVGNNTPVFFIRDPLKFPDFIHTQKRNPQTNLRDANAAWDFWSRHPESLHQIMILFSDRGIPTDLRHMNGYGSHTYSFINAQNERFWVKFHFKTQQGHKFYTNEEAAKVVGENRESSQQDLYEAIERGEFPRWNVQVQIMPEADAHKHNYAFDLTKVWPHKDYPMIEVGVLELNQNPINYFAEVEQAAFAPSNIVPGIGFSPDRMLQGRLFSYQDAQRYRLGVNHHQIPVNAPKCPYHTTHRDGAMRVDNNGGTHPNYAPNRFDTYVPTHQQEPALELERSAAHFNFREYDEDYYTQPAALYNLFDVDQKARVAANFAAGLAGVTEPAIVERQLAHFDKVSKELADAIRANLAK

SEQ ID NO: 42753 - DNA, 1515 bp, Neisseria meningitidis MC58
  CDS (1)..(1515): transl_table=11
atgactacctccaaatgccctgtaacccatctgaccatgaacaacggcgcgcctgttgccgacaatcaaaacagcctgaccgccggtcctcgcggccctctgctggcgcaggatttgtggctgaatgaaaaactcgccgacttcgtgcgcgaagtcatccccgaacgccgtatgcacgccaaaggttcgggcgcgttcggtacgtttaccgtaacgcacgacatcaccaaatacacccgcgccaaaatcttcagcgaagtcggcaaaaaaaccgagatgttcgcccgtttcaccaccgtggcaggcgaacgcggcgcagccgatgcagaacgcgacatccgcggttttgccttgaaattttataccgaagaaggcaactgggatgtggtcggcaacaacacgcccgtgttcttcctgcgcgacccgcgtaagttccccgacctgaacaaagccgtcaaacgcgacccgcgcaccaatatgcgctctgccacaaacaactgggacttctggacgctgctgcccgaagcactgcaccaagttaccatcgtgatgagcgaccgcggcatccccgccggctaccgccatatgcacggcttcggttcgcatacctacagcttctggaacgaagcaggcgagcgtttttgggtgaaattccatttccgcacccaacaaggcattaaaaacctgaccaacgaagaagccgccaaaatcatcgccgacgaccgcgaaagccatcagcgcgacttatacgaagccatcgaacgcggcgagtttccgaaatggacgatgtacatccaagtcatgcctgaagcagacgcggaaaaagtaccttatcatccgtttgacttgaccaaagtttggccgaaaaaagactatccgctgattgaagtgggcgaattcgagttgaaccgcaatcccgaaaacttcttcgccgatgtggaacaatccgccttcgcaccgagcaacctcgttcccggtgtcggcgccagcccagataaaatgctgcaagcgcgtttgttcaattacgccgacgcacaacgctaccgtttgggcgtaaacttccgccaaattcccgtcaatcgtccgcgttgccctgttcacagcaaccagcgcgacgggcaaggccgcgccgacggcaactacggcagcctgccgcactacgaacccaacagcttcggccaatggcagcaacaacccgacttcgccgaaccgcctttgaaaatcaacggcgacgcggcacactgggactaccgccaagacgatgacgactatttcagccaaccgcgcgccctgttcaacctgatgaacgacgcgcagaaacaggcattgttcggcaacaccgccgccgcaatgggcgacgcgcccgacttcatcaaataccgccatatccgcaactgctaccgttgcgacccggcatacggcgaaggcgtggccaaagcccttggactgactgtcgaagatgcccaagccgcccgcgcgaccgatcccgcactgggtcaggctggtttgctgtaa

SEQ ID NO: 42754 - protein, 504 aa, Neisseria meningitidis MC58
MTTSKCPVTHLTMNNGAPVADNQNSLTAGPRGPLLAQDLWLNEKLADFVREVIPERRMHAKGSGAFGTFTVTHDITKYTRAKIFSEVGKKTEMFARFTTVAGERGAADAERDIRGFALKFYTEEGNWDVVGNNTPVFFLRDPRKFPDLNKAVKRDPRTNMRSATNNWDFWTLLPEALHQVTIVMSDRGIPAGYRHMHGFGSHTYSFWNEAGERFWVKFHFRTQQGIKNLTNEEAAKIIADDRESHQRDLYEAIERGEFPKWTMYIQVMPEADAEKVPYHPFDLTKVWPKKDYPLIEVGEFELNRNPENFFADVEQSAFAPSNLVPGVGASPDKMLQARLFNYADAQRYRLGVNFRQIPVNRPRCPVHSNQRDGQGRADGNYGSLPHYEPNSFGQWQQQPDFAEPPLKINGDAAHWDYRQDDDDYFSQPRALFNLMNDAQKQALFGNTAAAMGDAPDFIKYRHIRNCYRCDPAYGEGVAKALGLTVEDAQAARATDPALGQAGLL

SEQ ID NO: 42755 - DNA, 1425 bp, Campylobacter jejuni subsp. jejuni NCTC 11168
  CDS (1)..(1425): transl_table=11
atgaaaaaattgactaacgattttggaaacattatagctgataaccaaaattcattaagcgcaggcgcaaaaggacctttacttatgcaagattatcttttgcttgaaaaacttgctcatcaaaatagagaaagaattccagaaagaaccgttcatgctaagggaagtggagcttatggcgaaataaaaattacagcagacttaagtgcttataccaaagctaaaatttttcaaaaaggcgaagttactccattatttttacgcttttcaacagtagcaggtgaagcaggtgcagcagatgctgaacgcgatgtgagaggttttgctattaaattttacactaaagaaggaaactgggacttggtaggaaataacactccgacattcttcatccgcgatgcttataaattccctgatttcatccatactcaaaaaagagatccaagaactcatctaagaagtaataatgctgcttgggatttttggagtttatgtcctgaaagtttacatcaagtaaccattcttatgagcgatagaggaattcctgcaagttatcgtcatatgcatggatttggaagccatacttatagttttattaatgataaaaatgaaagattttgggtgaaattccattttaaaacccaacaagggattaaaaatcttaccaaccaagaagctgccgagcttatagcaaaagatagagaaagtcatcaaagagatctctataatgctatagaaaataaagattttccaaaatggaaagttcaagttcaaattcttgctgaaaaagatatagaaaaacttggatttaatccttttgatttaacaaaaatttggcctcatagttttgtacctttgatggatataggcgaaatgattctaaacaaaaatcctcaaaattattttaatgaagttgaacaagctgcctttagtccaagcaatatcgttcctggaattggctttagccctgataaaatgttgcaagctagaattttttcatatcctgatgcacaaagatatagaataggaactaattatcatcttttaccagtaaatcgtgcaaaaagcgaagtgaatacttacaatgtcgctggtgctatgaattttgatagttataaaaatgatgctgcttattatgaaccaaacagctatgataatagcccaaaagaagacaaaagctatcttgaacctgatttagtcttagaaggcgtagcacaaagatatgctccactagataatgacttttatactcaaccaagagctttatttaatcttatgaatgatgatcaaaaaactcaactttttcataatatcgccgcttctatggaaggagttgatgaaaaaattatcactagagctttaaaacattttgaaaaaatttcacctgattatgcaaaaggaattaaaaaagctttagaaaaataa

SEQ ID NO: 42756 - protein, 474 aa, Campylobacter jejuni subsp. jejuni NCTC 11168
MKKLTNDFGNIIADNQNSLSAGAKGPLLMQDYLLLEKLAHQNRERIPERTVHAKGSGAYGEIKITADLSAYTKAKIFQKGEVTPLFLRFSTVAGEAGAADAERDVRGFAIKFYTKEGNWDLVGNNTPTFFIRDAYKFPDFIHTQKRDPRTHLRSNNAAWDFWSLCPESLHQVTILMSDRGIPASYRHMHGFGSHTYSFINDKNERFWVKFHFKTQQGIKNLTNQEAAELIAKDRESHQRDLYNAIENKDFPKWKVQVQILAEKDIEKLGFNPFDLTKIWPHSFVPLMDIGEMILNKNPQNYFNEVEQAAFSPSNIVPGIGFSPDKMLQARIFSYPDAQRYRIGTNYHLLPVNRAKSEVNTYNVAGAMNFDSYKNDAAYYEPNSYDNSPKEDKSYLEPDLVLEGVAQRYAPLDNDFYTQPRALFNLMNDDQKTQLFHNIAASMEGVDEKIITRALKHFEKISPDYAKGIKKALEK

SEQ ID NO: 42757 - DNA, 2319 bp, Deinococcus radiodurans R1
  CDS (1)..(2319): transl_table=11
gtggctgactttcacttcgctcttctcaaaggaaggtggctcatggctcccaaacgtaccctctccaccccgctgtctcttgacgacgcccagaagcaggtcgacgacctgagcaaggcccaggacctcagtgccaacaccaccgaccccggcaccaccctgactgacaacatggggcacgtcgtcagcgacgaccagaactcgctgcgggcgggcgagcgcggcccgaccctgatggaagacttcctcttccgcgagaagatcacccacttcgaccacgagcgcatccccgagcgcgtggtgcacgcccgtggcgccggtgcgcacgggtacttccaactcgacaagagcctggaaaagtacacccatgccaaggtgctgaccgaagtgggcgtcaagaccccggtgttcgcgcgcttttccacggtggccggctcgcgtggctcggcggacacggcgcgtgacgtgcgcggcttcgccgtgaagatgtacaccaaggaaggcaactgggacatcgtgggcaacaacattccggtgttcttcattcaggacgctatcaagttccctgacctgatccactcggtcaagcccgagccgcacaacgagattcctcaggcggcctcggcgcacgacaccttctacgacttcatcgccgagacgcccgaagcgatgcacatgctgatgtggattcactccgaccgcgccattccccgcgcctacaacatgatggaaggcttcggcgtgcacaccttccgtctggtcaacgcccagggcaaggctcacctcgtcaagttccactggaagccggtgctcggcgtcaagagcctggtgtgggacgaagcgcagaagattgccggtaaggacgccgacttccaccgccgcagcatgtgggagaccattgaccagggcggcacgctggaatgggacttcggggtgcaagtgttcaccgaagaagaggcgatgaagtgggacttcgatgtgctcgacgccaccaagatcgtgcccgaagacctcgtgccggtacagcgcgtgggcaagatggtcctcgaccgcaacgtggacaacttcttcgccgaaaccgagcaggtcgccttcatgacccagaacgtagttcctggcattgatttcaccaacgacccgctgctccagggccgcaacttctcatacctagacacccagctttcgcgcctgggcagccccaactggcaggaactgcccatcaaccgccccatcatccgcgtgagcaacaaccagcgcgacggccacatgcgccacaccatcaacaagggccgcgtggcgtacttccccaaccagatggccgccaacaagccggcccaggcgggcgcggcgggcttcgtcacctaccccgacaaggtggaaggcaccaagctgcgcgtgcgcgccgagagcttcagcgaccactacggtcaggcgcgactgttctggaactcgatgagcccggtggaaaaggagcacatcgccaagtcgctgcgcttcgagctgagcaagtgcgaaacccgcgacgtgcgtgtgcggatgctcgggcatctggcaaaaatcaacgaggtgctcgccgcgcaggtcgccaagggcctcggcgagaagttgccctccacgagcgacgccaaacccggcggccagcaggacagcgcctctgaaactgcgctgctcgctgcggccatctcgcccaccaccgcttcgggcgggctgcaaaaggccaagggcctgagccaggaagaaggccagcccaagagtgccaagggccgcaaggtggccgtgctcgtcgccgacggtgtggacgctgccggagtgaaggcgctgcaagacgccctgaagaaggccgatgtcaagtacgacatcgtggcgccccacctcggtgaaatcgcttccggcgtgatggcgacggcgaccctgtccaacaccgaccccgtggtctacgacggcgtggtcgtggcgggcggcgcggcggcggtgcgcgaactcgcgcagcaccccgaaagcttcaacttcgtggtggggtcttaccgccacgccaagcccatcggcagcctcggcgaaggcgccgaaatcgtgaccggctcgggcatcggcaacgtgctgcgccgcgtggccgccgactcccccgccaaggacggcgccacggctccggtgcagaacctctccgaagtcgcgggcgtgcgtctcgcagcgggcgaagggggcgccaagctcgccgccctcggcgtaatcgtgggccaggacaagggggccagcgccgccgccgacagcttcgtgcaggcgctcgccgagcaccgcttctggggccgtccgcagctctaa

SEQ ID NO: 42758 - protein, 772 aa, Deinococcus radiodurans R1
MADFHFALLKGRWLMAPKRTLSTPLSLDDAQKQVDDLSKAQDLSANTTDPGTTLTDNMGHVVSDDQNSLRAGERGPTLMEDFLFREKITHFDHERIPERVVHARGAGAHGYFQLDKSLEKYTHAKVLTEVGVKTPVFARFSTVAGSRGSADTARDVRGFAVKMYTKEGNWDIVGNNIPVFFIQDAIKFPDLIHSVKPEPHNEIPQAASAHDTFYDFIAETPEAMHMLMWIHSDRAIPRAYNMMEGFGVHTFRLVNAQGKAHLVKFHWKPVLGVKSLVWDEAQKIAGKDADFHRRSMWETIDQGGTLEWDFGVQVFTEEEAMKWDFDVLDATKIVPEDLVPVQRVGKMVLDRNVDNFFAETEQVAFMTQNVVPGIDFTNDPLLQGRNFSYLDTQLSRLGSPNWQELPINRPIIRVSNNQRDGHMRHTINKGRVAYFPNQMAANKPAQAGAAGFVTYPDKVEGTKLRVRAESFSDHYGQARLFWNSMSPVEKEHIAKSLRFELSKCETRDVRVRMLGHLAKINEVLAAQVAKGLGEKLPSTSDAKPGGQQDSASETALLAAAISPTTASGGLQKAKGLSQEEGQPKSAKGRKVAVLVADGVDAAGVKALQDALKKADVKYDIVAPHLGEIASGVMATATLSNTDPVVYDGVVVAGGAAAVRELAQHPESFNFVVGSYRHAKPIGSLGEGAEIVTGSGIGNVLRRVAADSPAKDGATAPVQNLSEVAGVRLAAGEGGAKLAALGVIVGQDKGASAAADSFVQALAEHRFWGRPQL

SEQ ID NO: 42759 - DNA, 2253 bp, Salmonella typhimurium LT2
  CDS (1)..(2253): transl_table=11
atgtcgcataatgagaaatccccccatcagtcccccgtgcatgatacccgtgaatcacagcccggcctggactccctggcgccgtcagacggttcacatcgccccacgccagaaacgacgccgccgggcgcgcaaccgacggcccccggcagcttaaaagcgcccgagaccgcgaatgataagctcactgccctcgacgcctttcgtaaaggcagcgaaaattatgcgctgaccaccaatcagggcgtgcgcatcgccgacgatcaaaattctcttcgcgccggcagccgcggccctacgctgttggaagattttatcctgcgcgagaaaattacccactttgaccatgagcgcatcccggagaggatcgttcacgcccgcggatctgcagcgcacggctatttccagccatataaagacctgagcgacatcacgaaagccgcgtttctgtgcgatccacagaaaattaccccggtctttgttcgcttttcgacagtacagggcggcgcggggtctgctgataccgtacgtgatatccgcggttttgcgaccaaattttataccgaagagggaattttcgatctcgtcggtaataacacgccgatcttttttatccaggatgcgcataagtttccggattttgtgcacgccgttaagcccgaaccacattgggctattccgcaagggcagagtgcgcacgacaccttctgggactatgtttccttacagcctgagacgctgcacaacgtcatgtgggcaatgtcggatcgcggtattccacgcagttatcggacgatggaagggttcggcattcacaccttccgtctgatcaatgcacaagggaaagcgacctttgtccgtttccactggaaaccgttggcaggtaaagcctcgctggtatgggatgagtcacaaaaactgaccggtcgcgatccggattttcaccgccgggatctgtgggaggccatcgaagcgggcgatttcccggaatacgagctgggcctacaactcattgccgaagaggatgaatttaaattcgattttgatctgctcgatccgaccaaactgattccggaagagttggtgccagtacaacgcgtcggcaaaatggtgttaaaccgtaatccggataactttttcgctgaaaacgaacaggcggcatttcatccaggacatattgttcccggcattgattttaccaacgatccgctgttacaggggcgtctgttctcttataccgacacgcaaatcagtcgtctgggcgggccaaacttccacgaaattccgattaaccgccctacctgcccctaccataacttccagcgtgacggtatgcaccggatggatatcgacaccaatccggcgaactatgaaccaaactccattaatgacaactggccacgcgaaacgccgccagcgccaaaacgcggcggcttcgaatcataccaggaacgcgtggatggcaataaaatccgcgaacgcagcccctctttcggtgaatattactcgcatcctcgcctgttctggctcagtcagacgccgatagaacagcagcatattattgacgcgttcagctttgaactgggtaaagtcgcccgcgcgtatattcgggagcgggtggtcgatcagttagcgcatattgatgtcacgctggctcagggcgtcgcgcataatctcggttttgcactcacccatgagcaaacgcaaattgccccgcctcctgatgtcaacggtctgaaaaaagatccggcgctcagcctgtatgcggtgccggacggcgatgttaaaggccgagtggtcgctattctgctgaacgacaaagttaacgccgccgaactgttgaccattttgcaggctttaaaagccaaaggcgtccacgcaaaactgctctattcacggatgggtgaagtaacggctgatgatggttcaacattaacgattgcggcaacctttgccggcgcgccgtcgctaacggtcgatgcggtaatagtaccgtgcggcaatattgccgatatcgagagttgcggcgatgcccgttactaccttctggaagcctacaaacatctgaagcccatcgcactggcaggcgacgcccgacggtttaaggcgcttttaaacattgatagccagggggaagaaggacttgttgaggcagataacgttgaccaccactttatggacactctgctgacgctgatggcggcacaccgtgtctggtcgcgtgcggggaaaattaacgcgattcctgcataa

SEQ ID NO: 42760 - protein, 750 aa, Salmonella typhimurium LT2
MSHNEKSPHQSPVHDTRESQPGLDSLAPSDGSHRPTPETTPPGAQPTAPGSLKAPETANDKLTALDAFRKGSENYALTTNQGVRIADDQNSLRAGSRGPTLLEDFILREKITHFDHERIPERIVHARGSAAHGYFQPYKDLSDITKAAFLCDPQKITPVFVRFSTVQGGAGSADTVRDIRGFATKFYTEEGIFDLVGNNTPIFFIQDAHKFPDFVHAVKPEPHWAIPQGQSAHDTFWDYVSLQPETLHNVMWAMSDRGIPRSYRTMEGFGIHTFRLINAQGKATFVRFHWKPLAGKASLVWDESQKLTGRDPDFHRRDLWEAIEAGDFPEYELGLQLIAEEDEFKFDFDLLDPTKLIPEELVPVQRVGKMVLNRNPDNFFAENEQAAFHPGHIVPGIDFTNDPLLQGRLFSYTDTQISRLGGPNFHEIPINRPTCPYHNFQRDGMHRMDIDTNPANYEPNSINDNWPRETPPAPKRGGFESYQERVDGNKIRERSPSFGEYYSHPRLFWLSQTPIEQQHIIDAFSFELGKVARAYIRERVVDQLAHIDVTLAQGVAHNLGFALTHEQTQIAPPPDVNGLKKDPALSLYAVPDGDVKGRVVAILLNDKVNAAELLTILQALKAKGVHAKLLYSRMGEVTADDGSTLTIAATFAGAPSLTVDAVIVPCGNIADIESCGDARYYLLEAYKHLKPIALAGDARRFKALLNIDSQGEEGLVEADNVDHHFMDTLLTLMAAHRVWSRAGKINAIPA

SEQ ID NO: 42761 - DNA, 1503 bp, Caenorhabditis elegans
  CDS (1)..(1503)
atgccaaacgatccatcggataatcaactgaaaacctacaaggagacgtatccaaaaccccaagtgatcacaacttcaaatggagctccgatctactcgaagaccgccgtgctcaccgccgggcggcgtggcccaatgctcatgcaagatgtagtttatatggatgagatggctcatttcgatcgtgaacgtatccccgagcgtgtcgttcatgccaagggagccggagcccatggatacttcgaggtcacccatgacatctccaagtactgtaaggccgatatcttcaacaaggtcgggaagcagaccccactgctaattagattctctacagtcggtggtgagagcggatccgccgacaccgctcgtgatccacgtggatttgcgatcaagttctacaccgaggagggaaactgggatctggttggaaataacactccgatcttcttcatccgtgaccctatccacttcccgaactttatccatacccagaagcgtaatccacagactcacctgaaggatcccaacatgatctttgacttctggcttcatagaccagaggctttgcatcaagtgatgttcctgttttccgatcgaggactcccagatgggtaccgtcatatgaatggatacggatcccatacattcaagatggttaacaaggacggaaaggctatctatgtgaaattccatttcaagccaactcaaggagtgaagaatctcaccgtggagaaggccggtcaacttgcctcttcggacccagactattccatccgtgacctgttcaatgctattgagaagggagactttccagtatggaagatgttcattcaagtgatgacattcgaacaagctgagaaatgggagttcaatccatttgatgtcactaaagtttggccacacggtgattacccactgatcgaggtcggcaagatggtgctgaacagaaatccaaggaactacttcgctgaggttgaacaatccgccttctgcccggcccacatcgtcccaggaatcgagttctcgccagacaagatgctccaaggacgtatcttctcgtacaccgacactcatttccaccgccttggaccaaactacatccagcttccagtcaactgcccgtaccgctcccgtgctcataacacccagcgtgatggtgcaatggcttatgacaatcagcaacatgctccaaacttcttcccgaacagcttcaactatggaaagactcgtccggatgtcaaggataccacattcccagccactggagatgttgatcgttatgaaagtggagatgacaacaactatgatcaaccccgtcaattctgggagaaggtgttggataccggggctcgggagagaatgtgccagaactttgcagggccgctcggggaatgtcatgatttcattattaagggaatgatcgatcacttttcaaaggttcatccagattttggagctcgtgtcaaggcactcatccagaaacaggctcgctctcatatctaa

SEQ ID NO: 42762 - protein, 500 aa, Caenorhabditis elegans [sequence omitted]

SEQ ID NO: 42763 - DNA, 2142 bp, Agrobacterium tumefaciens str. C58
  CDS (1)..(2142): transl_table=11
atggccagaaaaccaaattccacctcgtccattaccgccaccatccatgaccagcagcttatccggggagcaggtggcgagctgcaccagattgccaccggcgacgaacccgttttgacgaccgctcaaggggctccagttgcagacgaccagaattcgcttcggatcggtcctcgcgggccgctcgtggtggatgacttccattttcgcgagaagatcttccatttcgatcacgagagaattcccgagcgcgtcgtccacgcccgcggatatggcgcgcacggctatttcgagacttatgattcccttgccacccataccaaggcggatttgtttcaacgggcaggggaaagaaccccggcctttgtgcggttctcgactgttgccggcaacaagggctcggccgatctcgcacgggatgtccgcggttttgccgtgaagctctataccaaggagggcaactgggatctcgtcggaaacaacatcccggtatttttcattcaggatgcgatcaagtttccggatctcgtccatgcggccaagcaggagcccgatcgcgcctttccacaagctcaaacggcacatgacaccttctgggatttcatcagtctcacgcccgaaagcatgaacatggtgatgtggatcatgtccgaccgcaccattccgcgttccttccgcttcatggaaggcttcggtgtgcacaccttccgcttcatcaatgcgaaggagcaatcaacctttgtgaagtttcactggaagccaaaacttgggttgcagtcggtggcgtggaacgaggcggtcaagatcaatggtgccgatcccgattttcaccggcgtgatctctggaccgcaatccagtcgggaaatttcccggaatgggagttgcaggtccagctcttcgatcaggatttcgccgacagcttcgatttcgacgttcttgatcctaccaagatcattcctgaagagatattggctccgaagcctgtcggccggctcgtgctcgaccgtatgccggacaatttcttcgccgagacggaacaggtggcgttcatgacacaaaacgtcccgccaggcatcgatttcagcaatgacccactgctgcagggtagaaatttttcctatctcgatacgcagttgaagcgtcttggcggtcccaacttcacgcatttgccgatcaatgcgccaaagtgtcctttcgcgcatttccagcaggacggtcacatggcgatgcgaaatccgacaggacgggccaattatcagccgaattcattcggggaaggccagcgggaatcgccgacgcgtggtttccagcatttcgcggctgaggagcagggggtcaaggcaaggttgcggccggaaagttttgccgatcactatagtcaagcacggcagttctacatcagccagacgccacccgaacaacgtcatatcgcatcggccctgactttcgaactcagcaaggtcgaaacggtggagattcgagagaggatggtttcacatcttcttaatatcgacgaaaccctcgctacgacggtggcgcagaagctcggccttcagacaatgccggagccggcgaatacggccattcctacccgtcaggatctggagccgtcgcccgcgctcagcatcgttgaacggggtcccaaacgcttcgaaggccgaaagcttggcattctcatcacggatggcgtggacgcaaaactgctgaaggggctgacccaggcagtaacagccgaaaaagccgtcttcgagttcatcgcgcccaaggtcgggggcgtaacggcgtcgaacggcacccttatcgaggcacatcacatgattgatggaggcccttcggtgcttttcgatgcggttgctctgctgacatcggaggcggccatcgctgagctgaccgaggaggcaactgcccgggatttcgttgcagacgcgttccagcactgcaaattcatcggatacgaccggtcagcgttgccgttgctggaaattgccggaattgccgacgccatggatgaaggcgtgctgcccttgcccggcgaggaagggcttgcggccttcgtggcagaacttgggaaattgcgtgtctgggctcgggaaccctcgctgaaactcggcaaggcatccgttccagtcaacaaggaataa

SEQ ID NO: 42764 - protein, 713 aa, Agrobacterium tumefaciens str. C58
MARKPNSTSSITATIHDQQLIRGAGGELHQIATGDEPVLTTAQGAPVADDQNSLRIGPRGPLVVDDFHFREKIFHFDHERIPERVVHARGYGAHGYFETYDSLATHTKADLFQRAGERTPAFVRFSTVAGNKGSADLARDVRGFAVKLYTKEGNWDLVGNNIPVFFIQDAIKFPDLVHAAKQEPDRAFPQAQTAHDTFWDFISLTPESMNMVMWIMSDRTIPRSFRFMEGFGVHTFRFINAKEQSTFVKFHWKPKLGLQSVAWNEAVKINGADPDFHRRDLWTAIQSGNFPEWELQVQLFDQDFADSFDFDVLDPTKIIPEEILAPKPVGRLVLDRMPDNFFAETEQVAFMTQNVPPGIDFSNDPLLQGRNFSYLDTQLKRLGGPNFTHLPINAPKCPFAHFQQDGHMAMRNPTGRANYQPNSFGEGQRESPTRGFQHFAAEEQGVKARLRPESFADHYSQARQFYISQTPPEQRHIASALTFELSKVETVEIRERMVSHLLNIDETLATTVAQKLGLQTMPEPANTAIPTRQDLEPSPALSIVERGPKRFEGRKLGILITDGVDAKLLKGLTQAVTAEKAVFEFIAPKVGGVTASNGTLIEAHHMIDGGPSVLFDAVALLTSEAAIAELTEEATARDFVADAFQHCKFIGYDRSALPLLEIAGIADAMDEGVLPLPGEEGLAAFVAELGKLRVWAREPSLKLGKASVPVNKE

SEQ ID NO: 42765 - DNA, 1551 bp, Corynebacterium glutamicum ATCC 13032
  CDS (1)..(1551): transl_table=11
atgtctgagaagtcagcagcagaccagatcgtagatcgcggaatgcgtccaaagctttctggaaacactacccgccacaacggagcaccagttccatctgagaacatctccgcaaccgcaggcccacagggtccaaacgttctcaatgacattcacctcattgaaaagctcgcacactttaaccgcgagaacgttccagagcgtatccctcacgcaaagggccacggcgctttcggtgagctgcacatcaccgaggacgtatccgaatacaccaaggcagacctgttccagcctggtaaggtcaccccgctggctgttcgcttctctactgttgctggtgagcagggctccccagatacctggcgcgacgtccacggcttcgctcttcgcttctacaccgaagagggcaactacgacatcgtgggtaacaacaccccaaccttcttccttcgtgacggcatgaagttcccggacttcatccactcacagaagcgtctcaacaagaacggtctgcgcgatgcagacatgcagtgggatttctggacccgcgcacctgaatctgcacaccaggtgacctacctgatgggtgaccgcggtacccctaagacctcccgccaccaggacggcttcggctcccacaccttccagtggattaacgctgaaggtaagccagtttgggttaagtaccacttcaagacccgccagggctgggattgcttcaccgatgcagaagcagcaaaggttgcaggcgagaacgctgactaccagcgcgaagacctctacaacgctattgaaaacggcgacttcccaatctgggacgtcaaggttcagatcatgcctttcgaggatgcagagaactaccgctggaacccattcgacctgaccaagacctggtcccagaaggattacccactgatcccagtcggttacttcatcctgaaccgcaacccacgcaacttcttcgctcagatcgagcagcttgcactggatccaggcaacatcgttcctggcgtcggcctgtccccagaccgcatgctccaggcacgtatcttcgcatacgctgaccagcagcgttaccgcatcggcgctaactaccgcgacctgccagtgaaccgtccaatcaacgaggtcaacacctacagccgcgaaggttccatgcagtacatcttcgacgctgagggcgagccttcctacagccctaaccgctacgacaagggcgcaggctacctggataacggtacggattcctcctccaaccacacctcctacggccaggctgatgacatctacgtcaacccagacccacacggcaccgacctggttcgtgctgcttacgtcaagcaccaggatgatgacgacttcatccagccaggcatcctataccgcgaggtcctggatgagggcgagaaggagcgattggcagacaacatctccaacgcaatgcagggcatctctgaggcaaccgagccacgcgtctacgactactggaacaacgttgatgagaacctcggcgctcgcgtcaaggagctttacctccagaagaaggcttaa

SEQ ID NO: 42766 - protein, 516 aa, Corynebacterium glutamicum ATCC 13032
MSEKSAADQIVDRGMRPKLSGNTTRHNGAPVPSENISATAGPQGPNVLNDIHLIEKLAHFNRENVPERIPHAKGHGAFGELHITEDVSEYTKADLFQPGKVTPLAVRFSTVAGEQGSPDTWRDVHGFALRFYTEEGNYDIVGNNTPTFFLRDGMKFPDFIHSQKRLNKNGLRDADMQWDFWTRAPESAHQVTYLMGDRGTPKTSRHQDGFGSHTFQWINAEGKPVWVKYHFKTRQGWDCFTDAEAAKVAGENADYQREDLYNAIENGDFPIWDVKVQIMPFEDAENYRWNPFDLTKTWSQKDYPLIPVGYFILNRNPRNFFAQIEQLALDPGNIVPGVGLSPDRMLQARIFAYADQQRYRIGANYRDLPVNRPINEVNTYSREGSMQYIFDAEGEPSYSPNRYDKGAGYLDNGTDSSSNHTSYGQADDIYVNPDPHGTDLVRAAYVKHQDDDDFIQPGILYREVLDEGEKERLADNISNAMQGISEATEPRVYDYWNNVDENLGARVKELYLQKKA

SEQ ID NO: 42767 - DNA, 2280 bp, Streptomyces coelicolor A3(2)
  CDS (1)..(2280)
atgagcgaggccaaccccctcaagcgagtagcccgcaaggtgaccgagggcctgcacggcgaggccggcgggccgccggacgggatccccggcaggccaggccccgagtcgccctccgccgccgaacccaccgagccccgcgagccgctgcccccgaagccggaccagaccggtccggacaccgtgtccccgaccggtcagcccacgggcgccgaccaggcccgggtggcgcagtccggcagctacctgacgaacgcccaggggacccggctgtacgacaccgaccactcgctgaaggccgggccgcgcggtcccgtgctgctccaggaccaccacctgcgcgagaaggtcatgcacttcgaccacgagcgcatcccggagcgcgtggtccacgcgcggggcgcgggcgcccacggggtcttccagagctacggcacggcggcctcggtgaccaaggccgggttcctggccgcggacgtggagacgccggtgttcacccggttctccacggtggtcggctcgcgcggttcgtcggacaccgtgcgggacacccgggggttcgcgacgaagttctacaccagtgagggcgtcttcgacctggtcggcaacaacatcccggtcttcttcatccaggacgccatcaagttcccggacgtggtgcacgcggcgaagccgcacccggaccgggagatcccgcaggcgcagagcgcgcacgacaccttctgggacttcgtctcgctgcacaccgaggcgacgaaccacaccatcttcttcatgggcgaccggggtatcccgcgctcgttccggatgatggagggcttcggcgtccacaccttccggctggtgaacgcggagggcgccacgacgctggtgaagttccactggaagccgaagctgggtgtgcactccctggtgtgggacgaggcgcagctgatcaacggcgtcgacccggacttccaccgccgggacctcgcggacgcgatcgaggcgggcgcgtacccgcagtgggagctgggcatccagaccttcccggacaacccggagcagaccttcgagggcatcgacctgctggacccgaccaacttcgtgccggaggagctggcgccggtgcagccggtcgggctgctgaccctgaaccgcaacccgtccaacttcttcgccgagaccgagcaggtcgccttccacgtcggtcacctggtgcccggtatcgacgtcaccgacgacccgctgctcgcggggcggctgttctcgtacctggacacgcagatcacgcggctgggcggtcccaacttcccgcagctgccgatcaaccggccgcaggcgccggtcaacgacatgctgcgtgacggcatgcaccagagcgccgtgcaccggggcgtggcgccgtaccggcccaactccctggacggcggctgcccgttcaccgcgggcgcggacaccagcgcgttcgtcgaggccccggtgcgggtgccggaggggcgcaaggtccgcgaggcctccgagtcgttcgcggaccacttcagccagccgcgccgcttctggctgagcatgagcccggtggagcgcgagcacatcatcggcgcctacaccttcgagctgggcaagtgctacgagcaggcgatccgggagcgcacgctccaggtcctggccaacatcgaccccgagctgtgcgcgggggtcgccgagggcctcggcctgcccgccccggaaccgacggtcccgctggccgaggtcgagcccagcccggcgctgtcccaggtgggcggcgtctggccgctggacggcagggtcgtcggcatcgtgaccggcggggcggacctggagggcgtgggcgcggtacgggaggccgtgctgaacgccgggatggtgccgctggtcgtggcgccgaccggcggcaccctgggctccggcgacgccgcgctgaccgtgcagcgcagctatgtcaccgcgcggtcggtcgagttcgacgcggtgctgatcgcggggacgcccgacatgggcggcgacgcgtacacgccgcgcgactacaaggccgggccggcgcccgcggggccggggacggtcgacccgcgggtgagcctgctgctgtcggaggcgttccggcacggcaaggcgatcggcgtctgggccggtggcacgccggcgctggaggcgtcgggggtgcccgccgacgccccgggtgtgatcgtcgccgactccggcaccgccgccctggaacgggtgacggagctgatgggctcgcaccgggtgtgggaacgcttcaccacgccgcggggctga

SEQ ID NO: 42768 - protein, 759 aa, Streptomyces coelicolor A3(2)
MSEANPLKRVARKVTEGLHGEAGGPPDGIPGRPGPESPSAAEPTEPREPLPPKPDQTGPDTVSPTGQPTGADQARVAQSGSYLTNAQGTRLYDTDHSLKAGPRGPVLLQDHHLREKVMHFDHERIPERVVHARGAGAHGVFQSYGTAASVTKAGFLAADVETPVFTRFSTVVGSRGSSDTVRDTRGFATKFYTSEGVFDLVGNNIPVFFIQDAIKFPDVVHAAKPHPDREIPQAQSAHDTFWDFVSLHTEATNHTIFFMGDRGIPRSFRMMEGFGVHTFRLVNAEGATTLVKFHWKPKLGVHSLVWDEAQLINGVDPDFHRRDLADAIEAGAYPQWELGIQTFPDNPEQTFEGIDLLDPTNFVPEELAPVQPVGLLTLNRNPSNFFAETEQVAFHVGHLVPGIDVTDDPLLAGRLFSYLDTQITRLGGPNFPQLPINRPQAPVNDMLRDGMHQSAVHRGVAPYRPNSLDGGCPFTAGADTSAFVEAPVRVPEGRKVREASESFADHFSQPRRFWLSMSPVEREHIIGAYTFELGKCYEQAIRERTLQVLANIDPELCAGVAEGLGLPAPEPTVPLAEVEPSPALSQVGGVWPLDGRVVGIVTGGADLEGVGAVREAVLNAGMVPLVVAPTGGTLGSGDAALTVQRSYVTARSVEFDAVLIAGTPDMGGDAYTPRDYKAGPAPAGPGTVDPRVSLLLSEAFRHGKAIGVWAGGTPALEASGVPADAPGVIVADSGTAALERVTELMGSHRVWERFTTPRG

SEQ ID NO: 42769 - DNA, 2133 bp, Methanosarcina mazei Go1
  CDS (1)..(2133): transl_table=11
atggataaaaagatgattaacgaaaaaagcaaagaggagcagttggaaaagtttcatgaagatccggaacgtgagtttttaactacaaaccagggagtcagggtaaataatacggacatctcactcaaagcaggagaaagaggacccacccttcttgaggactttcacttcagagaaaaattaactcattttgaccatgaaagaattcctgaaagagtcgttcacgccagaggctcaggtgcacatggtttcttccaggtatatgaacccatgacagaatatacaagtgcgaaattcctgcaggaccctaataaaaaaaccccggtttttgttcgtttttctaccgttgtagggttcaggggctcggcagatactgtcagggatgtccggggttttgctgttaaattctacactgaggacggaaactatgaccttgtcggcaacaacatgcctgtttttttcattcaggatgcaataaagtttcccgacctggttcatgcgatcaagcctgagcaggataaccagattccccaggcttctgcagcgcatgatactttctgggactttgtgtcatgtcaccatgaaaatgcgcatatgatcatgtgggttctttcagaccgtgcacttccaagaagctaccggatgatggagggttttggggttaacaccttccgttttgtcaatgccgaaggtaagggcaggtttataaaattccactggaagcccatgcttggaattcattcccttgtctgggacgaaactcagaaaatagcaggaaaagaccctgattttaaccgtcgtgatctctgggatgccattgagatgggagcctatcctgagtttgagttaggggtgcagatcctggaggaagaggatgaattcaaatttgactttgatattctcgaccctacaaagttatggccggaagaggatgtaccaataaaatggatagggaaaatgaccctggaccgcaaccctgataatttctttgctgagaccgagcaggttgcgttttgccctgcgaatgtggttccgggaattgacttttccaatgaccctctcctgcagggacggcttttctcgtatcttgatacacaactgatccgccttggaggtcctaacttccaggagattccagttaatcgagcgctagcaccggtggctaacaatcagagggaaggatataaccgtatgacaataaacaagggcaaaacgagttatttcccgaatactgtaggagatggcaagccaaggccagcttctgcagaagaaggcggttatgtccattatatggaaaaagtggaaggcaagataatccgttcccgcagcgaaaagttcaaagattttttcagccaggcaaaattattctggaacagcatgtcgcaacctgaaaaagaacatattatagaggctttccatttcgaaataggaaaggtcaaggacaagaaaatcaggcaggcagttgttgatatgttcaataacgtcgatggtgacctggcagtagagattgcaaagggggtcggtgtctctgctccggcacagaaaggaggttctcctgtagctaaagaatcgccaaatttgagccaggaacgcagtgaacgtaatgtgaaaaatactatcaaaaccaggaaaatcgccatcattgtcgcggacggatatgaccacaaagacctgagccaggtaatgcaggctctggaagccggtggagcaagagccgacattatctcaaaattccagggcatgctgaagagctcggacggtcaggaaattgaagttgacaaaaattaccgcactacagaatcggttctgtatgatgctgtatacatccccggaggaaaagaaaatgtggaaaccctgaaaaagcatggggatgctatccacttcgtcaatgaagctttcaggcactgcaagcctctgggtgcaacaggcgaaggagtcgaattatttaaagctgcccatcttccggatataaaactcgcaggaaagagttctgctgataaggtggtttccgataaaggggtggtgaccgccagaaatgaaggggacagaagctcttttaatgagtcttttaccatcgcaattgcacagcaccgccactggaacagggagaaaaaggaacaggttcctgcctga

SEQ ID NO: 42770 - protein, 710 aa, Methanosarcina mazei Go1
MDKKMINEKSKEEQLEKFHEDPEREFLTTNQGVRVNNTDISLKAGERGPTLLEDFHFREKLTHFDHERIPERVVHARGSGAHGFFQVYEPMTEYTSAKFLQDPNKKTPVFVRFSTVVGFRGSADTVRDVRGFAVKFYTEDGNYDLVGNNMPVFFIQDAIKFPDLVHAIKPEQDNQIPQASAAHDTFWDFVSCHHENAHMIMWVLSDRALPRSYRMMEGFGVNTFRFVNAEGKGRFIKFHWKPMLGIHSLVWDETQKIAGKDPDFNRRDLWDAIEMGAYPEFELGVQILEEEDEFKFDFDILDPTKLWPEEDVPIKWIGKMTLDRNPDNFFAETEQVAFCPANVVPGIDFSNDPLLQGRLFSYLDTQLIRLGGPNFQEIPVNRALAPVANNQREGYNRMTINKGKTSYFPNTVGDGKPRPASAEEGGYVHYMEKVEGKIIRSRSEKFKDFFSQAKLFWNSMSQPEKEHIIEAFHFEIGKVKDKKIRQAVVDMFNNVDGDLAVEIAKGVGVSAPAQKGGSPVAKESPNLSQERSERNVKNTIKTRKIAIIVADGYDHKDLSQVMQALEAGGARADIISKFQGMLKSSDGQEIEVDKNYRTTESVLYDAVYIPGGKENVETLKKHGDAIHFVNEAFRHCKPLGATGEGVELFKAAHLPDIKLAGKSSADKVVSDKGVVTARNEGDRSSFNESFTIAIAQHRHWNREKKEQVPA

SEQ ID NO: 42771 - DNA, 1698 bp, Methanosarcina mazei Go1
  CDS (1)..(1698): transl_table=11
atgaaaggcgacaactgtaaaaatcctatggataaaaatcaattaggtgagccgcttccaagcagaaaccagacagtgggagacactcctgaattaactacagtagcaggagctcctgtggaaagcaatcaggatagcatgacaagcggtagacgcggaccccttatgcttcaggatatctggtttctggaaaaactggcacattttgacagagaagtcattcctgagcgcagaatgcatgcaaaaggctcgggagcatttgggacgtttaccgtaactcatgatataaccagttacaccaaagcagccatattttctgaaataggaaaacaaaccaaaatgtttgcacgcttttctactgtagctggtgagcgtggagcggctgatgcagagcgtgatattcgtggttttgctttgaagttttacactgaagaaggcaactgggacatggtagggaataacacgcctgtgttctttttcagagacccgttaaagtttcccgacctgaaccacgctattaaacgtgacccgcgtaccaatatgcgcagcccaaatactaactgggacttctggacatctttaccagaagctctgctacagctgactattattatgggtgaccgcggactaccttcttcattcaggcacatgcatggatttagcagtcatgcttacagtttgataaacaaaaataatgagcgtgtatgggtaaggttccacttcaggtcacagcagggtataagaaacctcacagaccaggaagctgtaatagttgtcggaatggaccgtgaaagccatcaaagagacctctacgaagccattgaaaaaggcatgttcccaaaatggaaaatgtatatccaggttatgacagaggaacaggcaaattctatgaagaataacccctttgacctgaccaaaatgtggcataaaaaggattttccactgatgcctgttggtgaatttgagttaaacaaaaatcctgaaaactactttgcagacgtggaacaggctgctttttcaccggctaacgtagtcccgggaatcagtttctccccggaccgcatgttgcaggggcgtttgttctcttatggggatgcacacaggtatagattaggtgtaaaccaccaccagatacctgtgaattctcctcagggcgttaaaaactatcacagcttccatagagatggacagatgagagttgatggcaatagaggaagccagctgcattatgaacccaatagctatggaaactggaaagaccagcctcaatatgcacttccggttgaaaaaacaggttcaacagacatcctgagatatgatttcagagaagatgacagtgattattatacccagccaggagagttattcagagctatgactcctgatcagcaacaggttctgtttgaaaataccgccagaaatatgggcgattccactctccagatcaagcacaggcatatttacaattgctatcaggcagatcctaaatatggtgaaggtgttgcaaaagcattggagattgatatctcaaccgtagatttaaatttgccagcgcgtacttcaagaaaagccaattatgaagcaaacaataaacaccctgaattaaatcaacctacaatgaaaaaagattcgggcagggaaattgatactaacggcgatccttacattgaacccgaaaacgatccctggcttttgtaa

SEQ ID NO: 42772 - protein, 565 aa, Methanosarcina mazei Go1
MKGDNCKNPMDKNQLGEPLPSRNQTVGDTPELTTVAGAPVESNQDSMTSGRRGPLMLQDIWFLEKLAHFDREVIPERRMHAKGSGAFGTFTVTHDITSYTKAAIFSEIGKQTKMFARFSTVAGERGAADAERDIRGFALKFYTEEGNWDMVGNNTPVFFFRDPLKFPDLNHAIKRDPRTNMRSPNTNWDFWTSLPEALLQLTIIMGDRGLPSSFRHMHGFSSHAYSLINKNNERVWVRFHFRSQQGIRNLTDQEAVIVVGMDRESHQRDLYEAIEKGMFPKWKMYIQVMTEEQANSMKNNPFDLTKMWHKKDFPLMPVGEFELNKNPENYFADVEQAAFSPANVVPGISFSPDRMLQGRLFSYGDAHRYRLGVNHHQIPVNSPQGVKNYHSFHRDGQMRVDGNRGSQLHYEPNSYGNWKDQPQYALPVEKTGSTDILRYDFREDDSDYYTQPGELFRAMTPDQQQVLFENTARNMGDSTLQIKHRHIYNCYQADPKYGEGVAKALEIDISTVDLNLPARTSRKANYEANNKHPELNQPTMKKDSGREIDTNGDPYIEPENDPWLL

SEQ ID NO: 42773 - DNA, 2106 bp, Xanthomonas campestris pv. campestris str. ATCC 33913
  CDS (1)..(2106): transl_table=11
atggccaagtcccccagcaagcccgcacagattccttctgtcggcagttccgcaagcgcgcatgagttgcgcggcaccggcgacgaactgcaccagaaggctggcggctcgcatccgcaactgaccaccaaccagggcattcccgttggcgacaaccagaactcgctccgcgccacaccgcgcggcccgacgttgctggaagatttcatcctgcgcgaaaagatcacgcacttcgaccatgaacgcattcccgagcgcatcgtgcatgcgcgcggcagcgcggcgcacggctacttcgagctgaccaagtcgctgagccagtacaccacggccaagctgctcaccgaagtgggcgaaaaaaccccgctattcacgcgtttttccaccgtggccggcggcgccggttcggtcgatacgccgcgtgacgtacgcggcttcgcggtgaagttctataccaaggaaggcaactgggatctggtcggcaacaacatcccggtgttcttcatccaggatgcaatgaaatttccagacctcatccacgcggtgaagatggaaccggaccgcggctttccgcaggccgccagcgcgcacgacacgttctgggatttcatctcgctcacccccgagtcgatgcacatgatcatgtgggcgatgagcgatcgcaccattccgcgttcgctgcgcatgatcgaaggcttcggcatccacagcttccgcctgctcaacgaaaacggcgacagtacctttgtcaaattccattggcgccccaagctgggcctgcagtccaccatctgggacgaggcagtcaaacttgccggtgccgacccggacttccagcgtcgcgatctgttcgaggcgatccagaagggcgacttccccgagtgggaattgggcgtgcagctgtttaccgaagccgaggccgaagcattcccgttcgaccacctggattcgaccaaggtcattccggaagagctggtgcccttgcagatcgtcgggcgcatggtgctggaccgctggccggacaacttcttcgccgaaaccgagcaggtggcctactgcccggccaacatcgtgccggggatcgacttcagcaacgacccgctgctgcagggccggctgttctcctacctggacacgcagctgagccgcctgggcgggcccaacttccatcagattccgatcaacgcgccgaagtgcccgttcgccaacaatcagcgcgatggtcacatgcagatgggcgtgccgaagggccgcgtggcgtacgaacccagctcgttgcaggccgatgcgccacgcgaagcgctgcgcggtttccccagccatgccacaccggccgaggatggcgccaagggccgcgtgcgtgcggaaagttttgccgaccattacagccaggcacgcatgttcttccgcagccagaccgcgccggagcaagcgcatcttgcatctgcactggtgtttgaactctccaaggtggaaaccgcgcacgtgcgcgaggccatcgtgggacatctgcggcatatcgatgaagcgctggccaagcgcgtggccgatggcatgggcatgaccagcctgccgccggcaccgccggccgccgttgcaccgaccgacatgcagttgtcgcctgcgctgcagttgatcggcaagatgaaggacacgctgcagggccgcaccgtgggcatcctgatccacgacggctccgacgccgcggcaatcaaggctgtgcgcaaggcggccgaagcggccggtgcaacggtcaagatcgtggcccccaagctgggcggcgccaagctcagcgatggcaagcaactggcggccgatggccagctggccggcacgccgtcgatcgtgttcgacgcggtggcggtgttgctgtcttcggaagcggccaaggcgttgacgcgcgaatcggcggcgctggattttgtcagcaatgcctgggcgcatctgaaggcgattgctttcgacgacggcgcgcaactgctgctcaaggccggcaatgtcggcaaggaccccggcgtggtcgatgcggccgacaccaaggccttcattaccgccgccaagacccgccaatgggcacgtgagccgaaggtgcgcatgctggcgtaa

SEQ ID NO: 42774 - protein, 701 aa, Xanthomonas campestris pv. campestris str. ATCC 33913
MAKSPSKPAQIPSVGSSASAHELRGTGDELHQKAGGSHPQLTTNQGIPVGDNQNSLRATPRGPTLLEDFILREKITHFDHERIPERIVHARGSAAHGYFELTKSLSQYTTAKLLTEVGEKTPLFTRFSTVAGGAGSVDTPRDVRGFAVKFYTKEGNWDLVGNNIPVFFIQDAMKFPDLIHAVKMEPDRGFPQAASAHDTFWDFISLTPESMHMIMWAMSDRTIPRSLRMIEGFGIHSFRLLNENGDSTFVKFHWRPKLGLQSTIWDEAVKLAGADPDFQRRDLFEAIQKGDFPEWELGVQLFTEAEAEAFPFDHLDSTKVIPEELVPLQIVGRMVLDRWPDNFFAETEQVAYCPANIVPGIDFSNDPLLQGRLFSYLDTQLSRLGGPNFHQIPINAPKCPFANNQRDGHMQMGVPKGRVAYEPSSLQADAPREALRGFPSHATPAEDGAKGRVRAESFADHYSQARMFFRSQTAPEQAHLASALVFELSKVETAHVREAIVGHLRHIDEALAKRVADGMGMTSLPPAPPAAVAPTDMQLSPALQLIGKMKDTLQGRTVGILIHDGSDAAAIKAVRKAAEAAGATVKIVAPKLGGAKLSDGKQLAADGQLAGTPSIVFDAVAVLLSSEAAKALTRESAALDFVSNAWAHLKAIAFDDGAQLLLKAGNVGKDPGVVDAADTKAFITAAKTRQWAREPKVRMLA

SEQ ID NO: 42775 - DNA, 1524 bp, Xanthomonas campestris pv. campestris str. ATCC 33913
  CDS (1)..(1524): transl_table=11
atgcgccctggatccctcatggtgctagccctgctagcccccacgctgatcgccccgccggtcttcgcccaatccgtcctgacccgcgacaacggcgccaaggtcggcgacaaccagaattcgcagaccgccggtgccaccggcccgacgttgctgcaggacgtgcaactgatccagaagcttcagcgcttcgatcgcgagcgcattcccgagcgcgtggtgcatgcgcgcggcaccggcgtcaaaggcgagttcaccgccactgccgatctgtccaacctgaccaaggccaaggtgttcagcgccggcgaaaagaccccggtgttcgtgcggttctcctcggtggtgcatggcaaccattcgccggaaacgctgcgcgacccgcacggcttcgccaccaagttctacaccagcgaaggcaactgggatctggtcggcaacaacttccccaccttcttcattcgcgatgcgatcaagttccccgacatggtccacgcgttcaagccggatccgcgcaccaacctggacgatgattcgcgtcgtttcgatttcttctcgcacgtgcccgaatccacccgcacgctgaccctgctgtattccaatgaaggcaccccggccggctatcgcttcatggatggcaacggcgtgcacgcctacaagctggtcaacgcgcaaggcgaggtgcattacgtcaagttccactggaagacgctgcagggcatcaagaatctcgaccccaagcaggtcgccgcggtgcaggccaaggactacagccatctgaccaacgatctagtcggtgcgatcaagaagggcgactacccgaagtgggacctgtacgtgcaggtgctcaagccggacgacctggccaagtttgacttcgacccgctcgatgccaccaagatctggccggatgtgccggagcagaaggttggccagatggtgttgaacaagaacgtcgacaacttcttccaggagaccgaacaggtcgcgatggcgccggccaatctggtgccgggtatcgaaccgtcggaagaccgcctgctgcagggccgtatcttttcgtacgccgacacgcagctgtaccgcatcggtaccaatggcctgagcctgccggtcaaccgtccgcgtgtggccgtcaacaatggcaaccaggacggcgaagccaacaccgggcacaccaccagcggcgtgaactacgagccgagccgtcttgaaccgcgtccgcaggacaccgccgcccgttacagcgagctgccgttgtcgggcaccacccagcaggccaagatcaccctcgagcagaacttcaagcaggccggtgagttgtatcggtcctacagcaagaaggatcgcgccgatctggtgcagagttttggcgagtcgctggccaccaccgacaccgagagcaagcacctggtgctgtcgttcctgtacaaggccgaccccgagtacggcgcaggcgtcacccgcgtggccaagggcgatctggcacgcgtgaagcagctcgcgtcgaccctgcaggactga

SEQ ID NO: 42776 - protein, 507 aa, Xanthomonas campestris pv. campestris str. ATCC 33913
MRPGSLMVLALLAPTLIAPPVFAQSVLTRDNGAKVGDNQNSQTAGATGPTLLQDVQLIQKLQRFDRERIPERVVHARGTGVKGEFTATADLSNLTKAKVFSAGEKTPVFVRFSSVVHGNHSPETLRDPHGFATKFYTSEGNWDLVGNNFPTFFIRDAIKFPDMVHAFKPDPRTNLDDDSRRFDFFSHVPESTRTLTLLYSNEGTPAGYRFMDGNGVHAYKLVNAQGEVHYVKFHWKTLQGIKNLDPKQVAAVQAKDYSHLTNDLVGAIKKGDYPKWDLYVQVLKPDDLAKFDFDPLDATKIWPDVPEQKVGQMVLNKNVDNFFQETEQVAMAPANLVPGIEPSEDRLLQGRIFSYADTQLYRIGTNGLSLPVNRPRVAVNNGNQDGEANTGHTTSGVNYEPSRLEPRPQDTAARYSELPLSGTTQQAKITLEQNFKQAGELYRSYSKKDRADLVQSFGESLATTDTESKHLVLSFLYKADPEYGAGVTRVAKGDLARVKQLASTLQD

SEQ ID NO: 42777 - DNA, 1518 bp, Staphylococcus aureus subsp. aureus MW2
  CDS (1)..(1518): transl_table=11
atgtcacaacaagacaaaaagttaactggtgtttttgggcatccagtatcagaccgagaaaatagtatgacagcagggcctaggggacctcttttaatgcaagatatttactttttagagcaaatgtctcaatttgatagagaagtaataccagaacgtcgaatgcatgccaaaggttctggtgcatttgggacatttactgtaactaaagatataacaaaatatacgaatgctaaaatattctctgaaataggtaagcaaaccgaaatgtttgcccgtttctctactgtagcaggagaacgtggtgctgctgatgcggagcgtgacattcgaggatttgcgttaaagttctacactgaagaagggaactgggatttagtagggaataacacaccagtattcttctttagagatccaaagttatttgttagtttaaatcgtgcggtgaaacgagatcctagaacaaatatgagagatgcacaaaataactgggatttctggacgggtcttccagaagcattgcaccaagtaacgatcttaatgtcagatagagggattcctaaagatttacgtcatatgcatgggttcggttctcacacatactctatgtataatgattctggtgaacgtgtttgggttaaattccattttagaacgcaacaaggtattgaaaacttaactgatgaagaagctgctgaaattatagctacagatcgtgattcatctcaacgcgatttattcgaagccattgaaaaaggtgattatccaaaatggacaatgtatattcaagtaatgactgaggaacaagctaaaaaccataaagataatccatttgatttaacaaaagtatggtatcacgatgagtatcctctaattgaagttggagagtttgaattaaatagaaatccagataattactttatggatgttgaacaagctgcgtttgcaccaactaatattattccaggattagatttttctccagacaaaatgctgcaagggcgtttattctcatatggcgatgcgcaaagatatcgattaggagttaatcattggcagattcctgtaaaccaacctaaaggtgttggtattgaaaatatttgtccttttagtagagatggtcaaatgcgcgtagttgacaataatcaaggtggaggaacacattattatccaaataaccatggtaaatttgattctcaacctgaatataaaaagccaccattcccaactgatggatatggctatgaatataatcaacgtcaagatgatgataattattttgaacaaccaggtaaattgtttagattacaatcagaggacgctaaagaaagaatttttacaaatacagcaaatgcaatggaaggcgtaacggatgatgttaaacgacgtcatattcgtcattgttacaaagctgacccagaatatggtaaaggtgttgcaaaagcattaggtattgatataaattctattgatcttgaaactgaaaatgatgaaacatacgaaaactttgaaaaataa

SEQ ID NO: 42778 - protein, 505 aa, Staphylococcus aureus subsp. aureus MW2
MSQQDKKLTGVFGHPVSDRENSMTAGPRGPLLMQDIYFLEQMSQFDREVIPERRMHAKGSGAFGTFTVTKDITKYTNAKIFSEIGKQTEMFARFSTVAGERGAADAERDIRGFALKFYTEEGNWDLVGNNTPVFFFRDPKLFVSLNRAVKRDPRTNMRDAQNNWDFWTGLPEALHQVTILMSDRGIPKDLRHMHGFGSHTYSMYNDSGERVWVKFHFRTQQGIENLTDEEAAEIIATDRDSSQRDLFEAIEKGDYPKWTMYIQVMTEEQAKNHKDNPFDLTKVWYHDEYPLIEVGEFELNRNPDNYFMDVEQAAFAPTNIIPGLDFSPDKMLQGRLFSYGDAQRYRLGVNHWQIPVNQPKGVGIENICPFSRDGQMRVVDNNQGGGTHYYPNNHGKFDSQPEYKKPPFPTDGYGYEYNQRQDDDNYFEQPGKLFRLQSEDAKERIFTNTANAMEGVTDDVKRRHIRHCYKADPEYGKGVAKALGIDINSIDLETENDETYENFEK

SEQ ID NO: 42779 - DNA, 1443 bp, Yersinia pestis KIM
  CDS (1)..(1443): transl_table=11
atgatgagcaagaagaaaggattaaccaccgcggcaggcgctcccgttgtcgataataataatgttattacggctggccgccgtggcccgatgctactgcaagatgtttggttcctggaaaaattagcccattttgaccgtgaagtgatccctgagcgccgcatgcatgctaaaggctccggtgcatacggtacgttcaccgtgactcatgatattacccaatatactcgcgcaaaaattttctcagagatcggtaaaaaaacagacatgtttgtccgcttctccactgtggccggtgaacgcggtgctgcagatgctgaacgtgatatccgtggttttgccatgaagttttataccgaggaaggcaactgggatttggttggtaacgatacaccggtcttctatttacgtgatccactgaagttcccggacctgaaccacgtggtcaaacgcgaccctcgtaccaacctgcgtaacccggtttataaatgggatttcttctctcaactgccagaggcgctgcatcagttaaccatcgatttcagtgaccgtggcttgccaaaatcttaccgtcatatgcacggtttcggtagccatacctttagcctaatcaatgccaataatgaacgtttttgggttaaattccatttccgttgccagcaaggcattgaaaacctgatggacgatgaagccgaaaaactgattggttctgatagagaaagctcgcagcgtgatctgtatgaagcgattgagcgcggtgacttcccgcgttggaaactacagattcaggtaatgccggagcacgaagcatcacaaacaccttataacccatttgatctgactaaagtctggccgcacggtgattacccgctgatcgatgtcggctacttcgaattgaatcgcaacccggaaaactacttcgctgaagtggaacaatcctcattcaatccagctaacgttgtccctgggatcagtttctccccagaccgcatgttacaaggccgcctgttctcatacggtgatgccgcccgctatcgtttaggggttaaccatcatcagatcccggtgaacagtgctaaatgtccgttccataattatcatcgtgacggcgcaatgcgcgttgatggtaacagtggtaatggcgcaacctatgagccaaacagctttggcctgttccaagaacagcctgatttcagcgaaccgccactgacattggaaggggcggcagatcattggaatcaccgcgaagacaccgactatttctctcaaccacgggcgctgtttaacctgctcagtgaagaagagcatcaacgcatgttcacccgtattgcgggtgagttatcgcaagttcctgaagctatccaacgccgccagatagcgttgtttacgcaggttgacccggcttatggcgccggtgtgaaaaaagcacttggcctgaattaa

SEQ ID NO: 42780 - protein, 480 aa, Yersinia pestis KIM
MMSKKKGLTTAAGAPVVDNNNVITAGRRGPMLLQDVWFLEKLAHFDREVIPERRMHAKGSGAYGTFTVTHDITQYTRAKIFSEIGKKTDMFVRFSTVAGERGAADAERDIRGFAMKFYTEEGNWDLVGNDTPVFYLRDPLKFPDLNHVVKRDPRTNLRNPVYKWDFFSQLPEALHQLTIDFSDRGLPKSYRHMHGFGSHTFSLINANNERFWVKFHFRCQQGIENLMDDEAEKLIGSDRESSQRDLYEAIERGDFPRWKLQIQVMPEHEASQTPYNPFDLTKVWPHGDYPLIDVGYFELNRNPENYFAEVEQSSFNPANVVPGISFSPDRMLQGRLFSYGDAARYRLGVNHHQIPVNSAKCPFHNYHRDGAMRVDGNSGNGATYEPNSFGLFQEQPDFSEPPLTLEGAADHWNHREDTDYFSQPRALFNLLSEEEHQRMFTRIAGELSQVPEAIQRRQIALFTQVDPAYGAGVKKALGLN

SEQ ID NO: 42781 - DNA, 1599 bp, Oceanobacillus iheyensis HTE831
  CDS (1)..(1599): transl_table=11
atggcaaaaaaagatgaatccatgaataaaagtaatctagaaaatgatatgtcacttacaaaccgtcaaggtcaccctgtaacaaacaatcaaaacatacgtacagtaagtaaccgtggtcccgctacattagaaaactatgacttcattgagaaaatcagtcattttgaccgtgagaaagtgccagaaagaatcgtacatgcacgcggagctggagcccatggatattttgaaacatacggcactgtcggaaatgatccagtatccaaatatactagagcaaaagtatttcaagataaaggtaaacaaactcctgtatttgtacgtttttcaacagtagtacatggcaatcactctccagaaacagttcgtgacccacgtgggtttgcggtgaaattttatactgaggatggaaactgggatttagtaggaaataacctcaaaatattttttattcgtgatgcaatgaaattcccagatatgattcacgccttccgtcctgatccagtaactaacatccaagattctgaaagattctttgatttttgtgcaaactctcctgaatcctttcatatggtgacctttgtatattcaccttggggaatcccagcaaattaccggatgatgcaaggttctggagtgaatacgtataagtgggttaataaagatggtgaagctgttcttgtaaagtatcactgggaacccaagcaagggattaaaaatttaactaccaaagaagctgaagaaattcaagctaccaacttcaaccatgcaacacaagatttatatgatgcaattgaaaacggagactatccagaatgggaattatttgttcaaattatgagtgatgatgaacatccagaactagactttgatccattagacgatacaaaattatggccagaggatcagttcccatggcatccagtcggtaaaatggtattaaataagaaccctgaaaattactttacagaagtagaacaagccgcatttggtactggtgttttagtggatggattagatttctctgacgataaaatgcttcaaggaagaacgttctcttattctgatactcaacgctatcgtgtaggagcaaactacctgcaagttcctgttaatgaatccaaaaaacgtgtcgcaacgaatcatgaaggtggtcagatgcgtcagaaaaatgataaagcacctagtcaaaacccacatattaactacgagccatctgtacttggcggcttagaagaaaatgaacagaccggtaaagaatacacacctcatatcgagggtaatcttgtacgtgaatccattgatcggaatgataacacgaagcaagctggacatactttccgtgaatttgaagaatgggaaaaagcagaattaatttccaatcttgtcggcgacctttctgtaagtgatcagcgaatccaagataagatgattgctttagcagaagaagctgatgatgaatatggtagacgtttacgagaaggattagaacaggcgaagaagatgggaacaccacataatcctttaggtgcaaaagatgctgaacaagcaccgaaaaaagcaatagataaaggacatgacgcagacccgtattaa

SEQ ID NO: 42782 - protein, 532 aa, Oceanobacillus iheyensis HTE831
MAKKDESMNKSNLENDMSLTNRQGHPVTNNQNIRTVSNRGPATLENYDFIEKISHFDREKVPERIVHARGAGAHGYFETYGTVGNDPVSKYTRAKVFQDKGKQTPVFVRFSTVVHGNHSPETVRDPRGFAVKFYTEDGNWDLVGNNLKIFFIRDAMKFPDMIHAFRPDPVTNIQDSERFFDFCANSPESFHMVTFVYSPWGIPANYRMMQGSGVNTYKWVNKDGEAVLVKYHWEPKQGIKNLTTKEAEEIQATNFNHATQDLYDAIENGDYPEWELFVQIMSDDEHPELDFDPLDDTKLWPEDQFPWHPVGKMVLNKNPENYFTEVEQAAFGTGVLVDGLDFSDDKMLQGRTFSYSDTQRYRVGANYLQVPVNESKKRVATNHEGGQMRQKNDKAPSQNPHINYEPSVLGGLEENEQTGKEYTPHIEGNLVRESIDRNDNTKQAGHTFREFEEWEKAELISNLVGDLSVSDQRIQDKMIALAEEADDEYGRRLREGLEQAKKMGTPHNPLGAKDAEQAPKKAIDKGHDADPY

SEQ ID NO: 42783 - DNA, 2064 bp, Oceanobacillus iheyensis HTE831
  CDS (1)..(2064): transl_table=11
atgtcagatcaagataatcaacaagaaaaacgaaaacaagatgacaataagaaaatcgatcaattaaagaaattctatcgggataatactgacaagataatgactacagatgaaggggtaaagatatccaatgatgagaatacgttaagtgcaggagacagaggtcctcaattattagaagattttatgtatcgtgaaaaactggctcacttcgatcgagaacgtatccctgaacgaaacgttcacgcacggggctatggtgcacatggagtatttgaatgttatgaatctcaatcagatttaacgaaggcacatttcttacaaaaagctgggcaacaaacacctgtatttgtccgattctcacaagtagccggttcaaaaggagccaatgaaacactacgtgacgttcggggttttgctacaaaattttatacgaatgagggaaattttgatttagttggaaataatattcctatatttttcattcaagatggtattaagtttccagacttaattcacgcactgaaacctgaaccgaacaatgaaatccctcaaggacaaacagcgcatgatacattctgggattttatcggtagtaatgaagaatcggcagctatgatgatgtggattatgtcagatcggaccatccctagaagtttccgtactatacaaggattcggagtacatacatttcggcttgttaatgcggaaggtaaatccgtcttttgtaaatttcattggcggcctgttctagggatacattcattaatttggaatgaagcgcaaaaaattggcggtgctgatcctgactttcaccgaagagacctttgggaaaatattgaacaaggattttatccagaatatgagctaggagttcaggtcatcgaggaagggcaagaatttgattttgatttcgatatactagatgcaacaaagctctggccagaagaagaagtaccattacaaatgattggaaaaatgactttaaataaaaacgtagagaatgtttttgctgagactgaacaagtcgcactacacccaggcaacattgtaccaggtattgatttcacgaatgatcctctactacaaggaaggctattctcctatacggatacgcaaatttatcgagttggtactaacttcaaacaacttcctattaatcgtcccgtatgcccttttcacaataatcatcgcgatggatctcaacgttatattattgataagggccaagtagcctaccatcagaattatttagctggtaatactccatacaccgtacctggttctcaaggtggttttgttacgtacccatctttagtagaaggattaaaagtacgaaaaactgcgcctagttttctcgatcacttctcacaagcaagactattttggaacagtatgacagatgttgaacaaagtcatatacttcaagcatttagttttgaattaggtaaagttaatgttccagaggtacgccaacgtgttgtaaatcttatcggtcatataagccgaccgctcgctactgcagtagcagaacaagttggtgtggaaccaccagataagagcataaaacaatcagatgtcactaaatcctcccctactttaagtttaatgaatacaaaattccttcctaatacattaaaagttgctattattgttggtaatggatatggtggcaacgctttagaatcattattagaatctttaaaggaagtcgaacttaaaccatatataataagcgagcgcttaggagaaataactgcagataatggtgataccttaaatgtagatgctaccttcttaacaacttcaccagttctgtacgatgggttacttgttgttggtggagatcatatcaatgatcagtttgcttatgaagctggcaactttattactgagcaatttaaccattataaaccaattggaggcatggaagaaggtgctactttaattcaacagttaggaattgctaatcgaccaggagtgttcataagtcaatcaggcagcagacaattcactagacaatttatagacggaatggcaaaacaacgattttgggatagataa

SEQ ID NO: 42784 - protein, 687 aa, Oceanobacillus iheyensis HTE831
MSDQDNQQEKRKQDDNKKIDQLKKFYRDNTDKIMTTDEGVKISNDENTLSAGDRGPQLLEDFMYREKLAHFDRERIPERNVHARGYGAHGVFECYESQSDLTKAHFLQKAGQQTPVFVRFSQVAGSKGANETLRDVRGFATKFYTNEGNFDLVGNNIPIFFIQDGIKFPDLIHALKPEPNNEIPQGQTAHDTFWDFIGSNEESAAMMMWIMSDRTIPRSFRTIQGFGVHTFRLVNAEGKSVFCKFHWRPVLGIHSLIWNEAQKIGGADPDFHRRDLWENIEQGFYPEYELGVQVIEEGQEFDFDFDILDATKLWPEEEVPLQMIGKMTLNKNVENVFAETEQVALHPGNIVPGIDFTNDPLLQGRLFSYTDTQIYRVGTNFKQLPINRPVCPFHNNHRDGSQRYIIDKGQVAYHQNYLAGNTPYTVPGSQGGFVTYPSLVEGLKVRKTAPSFLDHFSQARLFWNSMTDVEQSHILQAFSFELGKVNVPEVRQRVVNLIGHISRPLATAVAEQVGVEPPDKSIKQSDVTKSSPTLSLMNTKFLPNTLKVAIIVGNGYGGNALESLLESLKEVELKPYIISERLGEITADNGDTLNVDATFLTTSPVLYDGLLVVGGDHINDQFAYEAGNFITEQFNHYKPIGGMEEGATLIQQLGIANRPGVFISQSGSRQFTRQFIDGMAKQRFWDR

SEQ ID NO: 42785 - DNA, 2022 bp, Oceanobacillus iheyensis HTE831
  CDS (1)..(2022): transl_table=11
atgagtaatcaagaacaaaacaaaaagaatcagcagctagatcaattccgagttaatgataaagataaatctcttacaaccaatcaaggattaaaaatgaatgaagatgagttttcactaaaagcaggtgaacgtggcccgtcattattagaagactttcatctgcgagagaagatcacccactttgaccatgaacgcattccggaacgtgttgtccatgcaagaggttttgctgcccatggggaatttgaagtttatgaatcacttgccccatatacaaaagcaaatttcctaggtgaagcaggaaagaagacaccagtatttgtacgtttttctaccgtagcaggttctcgtggatcaggtgatatggcacgtgacgtcagaggttttgcaacaaaattttacacagatgaaggaaactatgacttagttggaaataacattcccgtcttctttatacaagacggcattaaatttcctgacttgatccacgcagttaaacccgaaccacataatgaaataccacaagcacaatctgctcatgatacattttgggattttgttgccaataaccaggaaactgcacatatgattatgtggcatctgtccgaccgggcaattccgcgaagctttcgaatgatggaaggctttggtgtccatacattccgttttgttaatgaggaaggacaagctttctttgtaaaattccactggaaacctgtcttaggtgtacattcggtcatttgggatgaagcattaaaattaaacggtaatgaccctgatttccaacgccgtgacctgtatgacgcgattgaaaatggtcaatatcctgagtacgagttaggattacaaattataaaagaagaagatgaatttaactttgattttgatgttctagacccaaccaagatatggccagaagaagatgtacctgtgaaaattgttggtaaaatgacattgaatcagaatatagataattattttgcagaaaccgaacaagttgcctttcatccaggtcatgtcgtaccagggattgattttacgaatgatccgttgttacaagcacgtctcttttcatatacagacacgcagctcattcgtttaggtggacctaactttcatgaaatcccaattaaccgacctgtctgcccattccataataatcaacgtgatggctatggaagacaaacgattaattctggacaagtaagctaccataaaaactccttggcagataatacaccaacacctgtaagtgaggaaaatggtggctataaacactatcaagagaaggttgaaggcaagaaagtacgagctcgcagtattagttttgaggatcacttcacacaagctgcattattctggaatagtatgagcgatgtcgagaaaaaccacatcattgatgcgtttagctttgaacttggaaagtgtaaggaagtagcgattcgcgaacaagttctcgatatgttctccaatgtcagccatgaccttgtcacaggaattgcggagaacttaggcttagcgataccaaagaaaaaagaaatcgactatacgaaatcgtcaccagccttaagccaagccaacacaaagaaaaaagcggacacgcgtaaagttggcattattgtcgctgatggattcgatgaagaattattctctcatataaaagcattaaatgaagcaaacattaatccggaaatcattagtgatcaccaaggatccatttcaagtaaagaaggaaataaaattccggtacaccatacctttaagacggcagactctgtactctttgattccatactaatcgctagtaaagaggggactaaaccattattcacaaaagaagctccaaacttcgtgaaagaagcttacatgcactataaaccaattagtgcgcttcaagatggcgcttctgtgcttcatgatttaggactaacagatgaaaaaggtgtagttaccaataatgcaagtcaatttgtagaagcagttgccgaagcgagattctggaatcgtgacgggaagtaa

SEQ ID NO: 42786 - protein, 673 aa, Oceanobacillus iheyensis HTE831
MSNQEQNKKNQQLDQFRVNDKDKSLTTNQGLKMNEDEFSLKAGERGPSLLEDFHLREKITHFDHERIPERVVHARGFAAHGEFEVYESLAPYTKANFLGEAGKKTPVFVRFSTVAGSRGSGDMARDVRGFATKFYTDEGNYDLVGNNIPVFFIQDGIKFPDLIHAVKPEPHNEIPQAQSAHDTFWDFVANNQETAHMIMWHLSDRAIPRSFRMMEGFGVHTFRFVNEEGQAFFVKFHWKPVLGVHSVIWDEALKLNGNDPDFQRRDLYDAIENGQYPEYELGLQIIKEEDEFNFDFDVLDPTKIWPEEDVPVKIVGKMTLNQNIDNYFAETEQVAFHPGHVVPGIDFTNDPLLQARLFSYTDTQLIRLGGPNFHEIPINRPVCPFHNNQRDGYGRQTINSGQVSYHKNSLADNTPTPVSEENGGYKHYQEKVEGKKVRARSISFEDHFTQAALFWNSMSDVEKNHIIDAFSFELGKCKEVAIREQVLDMFSNVSHDLVTGIAENLGLAIPKKKEIDYTKSSPALSQANTKKKADTRKVGIIVADGFDEELFSHIKALNEANINPEIISDHQGSISSKEGNKIPVHHTFKTADSVLFDSILIASKEGTKPLFTKEAPNFVKEAYMHYKPISALQDGASVLHDLGLTDEKGVVTNNASQFVEAVAEARFWNRDGK

SEQ ID NO: 42787 - DNA, 1488 bp, Leptospira interrogans serovar Lai str. 56601
  CDS (1)..(1488): transl_table=11
ttggatcttatatatcgttcaatttacaaaaggagaaaaataatgagtagaaaaacccttactacagctggaggtcatccggtttcacaaaatcaacattctttaaccgccggacctcgagggccggttttaattcaggatacacatctgatcgaaaaactagctcacttcaatcgagaaagaattccagagagagtagttcatgcaaaaggtgctggggcttatggaactctgaccattactcaagatcttacaaaatattctagagcttctatcttttccaaaaagggaaaacaaacttctctttttctacgtttttctacagtggcaggggaaaagggttctgcggatacggaaagagatccgagaggttttgcggttaaattttatacggacgaaggaatttgggatcttgtaggaaacaatactcctgtattttttgctagagatcctttgaagtttcctgattttatacattcacaaaaaagagatcctgtcaccggttataaaaacccaattcgtatgtgggactattgggctgggtctcccgaggcatttcatcaaatcaccattctttttggagatagaggaatcccggacggctatcgttttatgaacggttatggaagtcatacttttggactttggaattctaaaggagaacgtttttggactaagtttcactttaaatctatgcaaggaattaggaatctaagtatggaaaaagcatctgcgttagccggaactgatccagattacgcgactagagatttatttgaggcgattgaaagaaaggaatttccaaaatggaagttttgtgttcagatcatgcctgaaaaagaagctacaaaatataaattcaatccatttgatcttactaaggtttggtctcataaagattatcctttgatagaagtaggggttttggaattgaattctaatcctaagaattactttgaagaagtagagcaggccgcattttccccttctaatatgcctcctggaattggtgcttctccagataaaatgttacaaggaagattattcgcatatccggatgctcataggtatcgtttgggaattcaataccagcaacttcctgtaaatagacctaaaaattctgtaaacgtttatcatagagatggtcgtactcgatttcagtgtgacgggaattatgataattatgagccaaacggttttgaaggacctgtgcaggattcttcttatgcggaacctcctttgagtatttctggagatatggatcgttataattctcatataggaaatgacgattattctcaagcgggagatttatatagattgatgagtgttgaggaaagggaaagattgacttctgcgatcgcttctacgatgcataatcttcctaaacctttactagaagccaatctaaaacatttccatctttgtgatccggagtatggagagcaattggctgcaaaagtaggtcttgctctgagtcgagtttaa

SEQ ID NO: 42788 - protein, 495 aa, Leptospira interrogans serovar Lai str. 56601
MDLIYRSIYKRRKIMSRKTLTTAGGHPVSQNQHSLTAGPRGPVLIQDTHLIEKLAHFNRERIPERVVHAKGAGAYGTLTITQDLTKYSRASIFSKKGKQTSLFLRFSTVAGEKGSADTERDPRGFAVKFYTDEGIWDLVGNNTPVFFARDPLKFPDFIHSQKRDPVTGYKNPIRMWDYWAGSPEAFHQITILFGDRGIPDGYRFMNGYGSHTFGLWNSKGERFWTKFHFKSMQGIRNLSMEKASALAGTDPDYATRDLFEAIERKEFPKWKFCVQIMPEKEATKYKFNPFDLTKVWSHKDYPLIEVGVLELNSNPKNYFEEVEQAAFSPSNMPPGIGASPDKMLQGRLFAYPDAHRYRLGIQYQQLPVNRPKNSVNVYHRDGRTRFQCDGNYDNYEPNGFEGPVQDSSYAEPPLSISGDMDRYNSHIGNDDYSQAGDLYRLMSVEERERLTSAIASTMHNLPKPLLEANLKHFHLCDPEYGEQLAAKVGLALSRV

SEQ ID NO: 42789 - DNA, 1461 bp, Shewanella oneidensis MR-1
  CDS (1)..(1461): transl_table=11
atgagtcaacagtatttaaccagccagagcggttccccgattgcggatgatcaaaactcattgtcagcgggtgaacgtggtcctttactcctgcaagattggcatttaattgaaaagcttgctcattttaaccgtgagcgtattccagagcgtgtggtacatgctaaagggactggcgtatacgggactttcactctgaccaaagacttgagtgattacaccattgccgatcacttcaatggtgtgggtaagcaaactgaaacttttgtgcgtttctccaccgtaggcggtgaaatgggctctgccgatgccgagcgtgatccacgtggttttggtctgcgcttttataccgctcgcggtaatcacgacatcgtgggtaataacacgccgacattctttttgcgtgatggcattaagttcccagactttattcatacccaaaagcgtaacccattgactaaccttaaagatccacaagcgatgtgggatttttggtcgctcaaccctgaagctatgcatcaggtgactattctgatgtcagatcgtggtattccggcaaactatcgccaaatgcacggttatggttcgcataccttctctttttggaatgctaaaggtgagcgtttctgggtgaagttccacttcaaatcgcagcaaggcgtagtgaacttaagcaacgaacaagctgacaagttaaaaggcattgatcctgattcttctcagcgcgatatggtggtagctatcactgatggtaacttccctcgttggacggtgaatgtgcagatcatgcctgaggccgatgctaatacttaccatatcaatccgtttgatttaactaaggtttggccacatggcgattatccgttaattgagattggtgtattagaactgaaccgtttaccgcaaaactattttgcggaagtcgagcaagtggccttagcaccgagcaacttagtaccaggtgtgggtgcatcgcctgataagatgttacaagcgcgtttattcgcctatgctgatgcgcagcgttaccgtattggcgcgaattacaaccaattgccagtaaactgtccacatgcggctaaagccaatcatcatcaacgtgcaggcgcaatggcaggaactcaatgtccttaccatggcagtcaaacaggtggtgatgcttctgccaactatggccctaatagcacaataggcgccttggtagaaccggcaaactttgccgagccaccactgcgtttagacggagaaacggcgcgttacagccgttacaatcaggatgattacactcaagcgggtaatttgtaccgtatcttcagtgaagaggaaaaagctcgcttagtggcaaccatctcaggttcgttgcgtcaggcaagcatggatgtacagcaacgtatgctggcacatttccaaaaagctgatgctgattatggtcaacgtatcaaaatggcgctggggttataa

SEQ ID NO: 42790 - protein, 486 aa, Shewanella oneidensis MR-1
MSQQYLTSQSGSPIADDQNSLSAGERGPLLLQDWHLIEKLAHFNRERIPERVVHAKGTGVYGTFTLTKDLSDYTIADHFNGVGKQTETFVRFSTVGGEMGSADAERDPRGFGLRFYTARGNHDIVGNNTPTFFLRDGIKFPDFIHTQKRNPLTNLKDPQAMWDFWSLNPEAMHQVTILMSDRGIPANYRQMHGYGSHTFSFWNAKGERFWVKFHFKSQQGVVNLSNEQADKLKGIDPDSSQRDMVVAITDGNFPRWTVNVQIMPEADANTYHINPFDLTKVWPHGDYPLIEIGVLELNRLPQNYFAEVEQVALAPSNLVPGVGASPDKMLQARLFAYADAQRYRIGANYNQLPVNCPHAAKANHHQRAGAMAGTQCPYHGSQTGGDASANYGPNSTIGALVEPANFAEPPLRLDGETARYSRYNQDDYTQAGNLYRIFSEEEKARLVATISGSLRQASMDVQQRMLAHFQKADADYGQRIKMALGL

SEQ ID NO: 42791 - DNA, 2133 bp, Corynebacterium efficiens YS-314
  CDS (1)..(2133): transl_table=11
atgtcagcgaacccaggaatcccctcctccggaaccccggaggtcaacgagccgaccaccccggtcccgccactgccccgcaagcccgatcaggccacggcggagccctattcccccaccggctgcccgatgcatatcagccccgatgtcaatgcgcagcagggtgaatacctcaccaccgcgcagggcgggcgtctacgtgacaccgaccattcgctgaaagccggtgagcgtggtcccctgctcatgcaggatcaccacttccgcgagaagatcacccacttcgaccacgagcgcatcccggagcgtgtggtccacgcccgcggtgccgcggcccacggtgtgttcaaggccaatggtgccgcctcctccatctgccgcgccggtgtgttcgccgagggtaaggaaaccccggtgttcacccggttctccacggtgctgggcaaccgcggttccgccgacaccgtgcgtgacacccgtggtttcgccgtgaagttctacaccgatgagggcacctgggacctggtgggtaacaacatcccggtgttcttcatccaggacggcatcaagttccccgatgtcatccacgccgccaagccccacccggaccgcgacatcccgcaggcccagagcgcgcatgacaccttctgggattttgtcaccctgcacaccgaggccacccaccacaccatctggaacatgtcggaccgcggcatcccgcggtcctaccgcatgatggagggcttcggtgtcaacaccttccgcatgatcaacgacaagggcgagaccagcctggtgaaattccactggaagccgaaactcggtgtgcattcccaggtgtgggaggaagcccagatcaccggtggtgtggaccccgatttccaccgccgtgatctggcggatgcgattgaaagtggtgccttccccgagtgggatctgggcctgcaggtcttccccgataataaggagcagatgtttgagggcattgacctgctggatcccaccaagatcgtccccgaggaactcgccccggtgcagatcgtgggcaccatgaccctgaacaagaatgtctccaacttccatgaggagaccgagcaggtcgccttccaccccggccacctgcccccgggtatcgatgtcaccgccgatcccctgctgcagggtcgcctgttctcctacctggacacccagatcagccgtttgggtgggccgaacttcgcgcagctgccgatcaaccgtccgcatgcaccggtcaatgacatgttccgtgagggcatgcaccagcagggccagcacatcggcgttgccccctaccagccgaactcgctcgacggcggcaaccccttccccgccgagccgagcaacggggcgcttatcgacgtccccgtccccgtcgaaggcgagatcacccgcagtgcccccgccagcttcgatgaccactactcccaggcccgcctgttctacgtgagcctctcgcccatcgaacagaagcacgtggccgacgcctacactttcgaactgggcaaatgctacgagaaggccatcaaggaacgcgcagtgcacgttctgtccaacgtcgatcacgacctggccagcaccgtggccaagggcctgggtgtgcccgccccggagaagaaggacctgcccgagcccaccccgagcccggcgctgtcccaggtgggcaagacctggcccatcgacggccgccagatcggcatcctggtcaccgatgatctgcccgaggatcaggtcgccgacgtcgcctccctgtccaaggccatcgaggacgccggcatggtacccctggtgacctccacctccggtggcaccatcggcgaacccgaggaagccaccggcgtggcggtctcccgcacctacgtcaccgtgcgttccatcgaattcgatgccgccgtggtcgtggagacccccgagcagcccgaggtgagcatcctgctgtccgagatgatccgccacggcaaggccgtcgccctcgtcggcgatgccaccgcgcaggtacccgatcgcatgggtgatgcacccggcgtggtcaccgtcaacgctgccgccgacgcgctcgatgtgctgaccccgatgctcaagggccaccgcacctgggccgccaacccggcctga

SEQ ID NO: 42792 - protein, 710 aa, Corynebacterium efficiens YS-314
MSANPGIPSSGTPEVNEPTTPVPPLPRKPDQATAEPYSPTGCPMHISPDVNAQQGEYLTTAQGGRLRDTDHSLKAGERGPLLMQDHHFREKITHFDHERIPERVVHARGAAAHGVFKANGAASSICRAGVFAEGKETPVFTRFSTVLGNRGSADTVRDTRGFAVKFYTDEGTWDLVGNNIPVFFIQDGIKFPDVIHAAKPHPDRDIPQAQSAHDTFWDFVTLHTEATHHTIWNMSDRGIPRSYRMMEGFGVNTFRMINDKGETSLVKFHWKPKLGVHSQVWEEAQITGGVDPDFHRRDLADAIESGAFPEWDLGLQVFPDNKEQMFEGIDLLDPTKIVPEELAPVQIVGTMTLNKNVSNFHEETEQVAFHPGHLPPGIDVTADPLLQGRLFSYLDTQISRLGGPNFAQLPINRPHAPVNDMFREGMHQQGQHIGVAPYQPNSLDGGNPFPAEPSNGALIDVPVPVEGEITRSAPASFDDHYSQARLFYVSLSPIEQKHVADAYTFELGKCYEKAIKERAVHVLSNVDHDLASTVAKGLGVPAPEKKDLPEPTPSPALSQVGKTWPIDGRQIGILVTDDLPEDQVADVASLSKAIEDAGMVPLVTSTSGGTIGEPEEATGVAVSRTYVTVRSIEFDAAVVVETPEQPEVSILLSEMIRHGKAVALVGDATAQVPDRMGDAPGVVTVNAAADALDVLTPMLKGHRTWAANPA

SEQ ID NO: 42793 - DNA, 1602 bp, Corynebacterium efficiens YS-314
  CDS (1)..(1602): transl_table=11
atgactgagaactcagcagcagatcagatcatcgaccgtggcatgcgtccgaaggtggccggaaacaccacccgccacaacggtgcaccggttgcctccgagaacatctccgtaaccgccggcccgcagggcccgaacattctcaatgacatccacctcattgagaagctcgcacacttcaaccgtgagaacgttcctgagcgtatcccccacgccaagggtcatggcgccttcggtgagctgcacatcaccgaggatgtgtcccagtacaccaaggctgatctgttccagccgggtaaggtcaccccgatgggtgtccgtttctccaccgttgccggtgagcagggctcccctgacacctggcgcgatgtccacggtttcgcactccgcttctacacccaggagggcaactacgacatcgtcggtaacaataccccgaccttcttcgtccgcgacggcatgaagttccccgacttcatccactcccagaagcgtctgaacaagaacggcctgcgcgacgccgacatgcagtgggatttctggacccgcgcacccgaatccgcacaccaggtgacctacctgatgggtgaccgcggtaccccgaagaccacccgccacatgaacggctatggctcccacaccttccagtgggtgaacaaggacggcgaggcattctgggtcaagtaccacttcatctcccgtcagggcgtggagaacttcaccgacgccgaggcagctgagatggccggcatcaatgccgactaccaccgcgaggacctctacaacgctattgagcgtggcgactacccgatctgggacgtcaaggttcagatcatgccgttcgcagaggcagagaactaccgctggaaccccttcgacctgaccaaggtctggtccaagaaggattacccacgcattgatgtcggttacttcatcctgaaccgcaacccacgcaacttcttcgcgcagatcgagcagatcgccctggacccgggcaacatcgtcccaggtgtcggactgtccccggaccgcatgctccaggcccgtgcattcgcctacgccgaccagcagcgttaccgcatcggaccgaactaccgcgacctgccgatcaaccgtccgatcaacgaggtcaacacctacagccgcgaaggccacatgcagtacgtcttcgatgccgagggtgagccctcctacagcccgaaccgctacaccaagggtgcaggctacctggatgacggcgagacctcctcctccaaccacacctcctacggccaggcttccgacatctacgtcaacccggatccgcacggcaccgacctggtccgcgcagcctacgtcaagcaccaggatgatgacgacttcatgcaggccggcatcctctaccgcgaggtgtacaacgacgaggagaaggcacgtctcgcagacaacatctccaacgcgatgcagggcatctccgaggagaccgagccacgcgtctacgagtactggaccaacgtggacgagaacctcggcgcacgcgtcaaggagctctacctgcagaagaaggcagccggcgcagccgagcacacctcttccaccggtgacgacatcgacaagaagtag

SEQ ID NO: 42794 - protein, 533 aa, Corynebacterium efficiens YS-314
MTENSAADQIIDRGMRPKVAGNTTRHNGAPVASENISVTAGPQGPNILNDIHLIEKLAHFNRENVPERIPHAKGHGAFGELHITEDVSQYTKADLFQPGKVTPMGVRFSTVAGEQGSPDTWRDVHGFALRFYTQEGNYDIVGNNTPTFFVRDGMKFPDFIHSQKRLNKNGLRDADMQWDFWTRAPESAHQVTYLMGDRGTPKTTRHMNGYGSHTFQWVNKDGEAFWVKYHFISRQGVENFTDAEAAEMAGINADYHREDLYNAIERGDYPIWDVKVQIMPFAEAENYRWNPFDLTKVWSKKDYPRIDVGYFILNRNPRNFFAQIEQIALDPGNIVPGVGLSPDRMLQARAFAYADQQRYRIGPNYRDLPINRPINEVNTYSREGHMQYVFDAEGEPSYSPNRYTKGAGYLDDGETSSSNHTSYGQASDIYVNPDPHGTDLVRAAYVKHQDDDDFMQAGILYREVYNDEEKARLADNISNAMQGISEETEPRVYEYWTNVDENLGARVKELYLQKKAAGAAEHTSSTGDDIDKK

SEQ ID NO: 42795 - DNA, 1539 bp, Caenorhabditis elegans
  CDS (1)..(1539)
atgccaatgcttccccacatggtcaatctaacggtcaacgacacaaaacccggaccaatggctgaggatcagctgaaagcttatagagatagaaatcaggaaccccacctgctcaccacatccaatggagctccgatctactcgaagaccgccgtgctcaccgccggacgacgtggtccaatgctaatgcaggacatcgtttatatggacgagatggctcatttcgatcgtgaacgcatcccggagcgtgtcgtccatgccaaaggtggtggtgctcatggatacttcgaggtcacccatgacatcaccaagtactgtaaggccgatatgttcaacaaggtcggaaaacagacaccacttctcgttcgtttttcaacggtcgctggagaatcgggatccgctgatactgtccgcgatccacgtggattctctctcaaattctataccgaggagggtaactgggatctggttggaaataacactccgatcttcttcattcgtgacgcaatccactttccgaatttcattcatgccctgaagcgcaatccacagactcacatgagggatccgaatgcgctcttcgatttctggatgaatcgccctgaatccattcatcaggtgatgttcctctactcggatcgtggaattcctgatggattccgttttatgaatggatacggagcgcatactttcaagatggtcaacaaggagggaaatccgatttattgtaaattccatttcaagcctgctcaaggttccaagaatctcgatccaactgacgctggaaagctcgcctcttcggatccagactatgcgatccgcgacctgttcaatgccattgagtcaagaaatttcccggaatggaagatgttcattcaagtgatgacattcgaacaagctgagaaatgggagttcaatccatttgatgtcactaaagtttggccacacggtgattacccactgatcgaggtcggcaagatggtgctgaacaggaatgtgaagaattatttcgctgaggtcgaacaagccgccttctgcccggcccacatcgtcccaggaatcgagttctcgccagacaagatgctccaagggcgtatcttctcctacacggacacgcattaccatcgccttggaccaaactacattcagcttccagtcaactgcccgtaccgctcccgtgctcataccactcaacgcgatggtgcaatggcttatgaaagccagggagatgcgccgaattacttcccgaacagtttccgcggataccgtactcgtgatgatgtgaaggagtcgacatttcagacgactggagatgttgatcgttatgagactggagacgatcacaactacgagcagccacgtcagttctgggagaaagtgctcaaggaggaggagagagatcggctcgttgggaatttggctagtgatttgggtggctgtttggaggaaattcaaaatggaatggtcaaagagttcacgaaagttcatccggatttcggaaatgctcttcgccatcagctctgccagaagaagcattaa

SEQ ID NO: 42796 - protein, 512 aa, Caenorhabditis elegans
MPMLPHMVNLTVNDTKPGPMAEDQLKAYRDRNQEPHLLTTSNGAPIYSKTAVLTAGRRGPMLMQDIVYMDEMAHFDRERIPERVVHAKGGGAHGYFEVTHDITKYCKADMFNKVGKQTPLLVRFSTVAGESGSADTVRDPRGFSLKFYTEEGNWDLVGNNTPIFFIRDAIHFPNFIHALKRNPQTHMRDPNALFDFWMNRPESIHQVMFLYSDRGIPDGFRFMNGYGAHTFKMVNKEGNPIYCKFHFKPAQGSKNLDPTDAGKLASSDPDYAIRDLFNAIESRNFPEWKMFIQVMTFEQAEKWEFNPFDVTKVWPHGDYPLIEVGKMVLNRNVKNYFAEVEQAAFCPAHIVPGIEFSPDKMLQGRIFSYTDTHYHRLGPNYIQLPVNCPYRSRAHTTQRDGAMAYESQGDAPNYFPNSFRGYRTRDDVKESTFQTTGDVDRYETGDDHNYEQPRQFWEKVLKEEERDRLVGNLASDLGGCLEEIQNGMVKEFTKVHPDFGNALRHQLCQKKH

SEQ ID NO: 42797 - DNA, 1440 bp, Pseudomonas putida KT2440
  CDS (1)..(1440): transl_table=11
atgagcaagattctcaccaccgctagcggtgcacctgtagccgacaaccagaactcccgctccgccggcccgcgcggtccgctgctgctcgacgacttccacctgatcgagaagctcgcccatttcaaccgcgagaacattcctgagcgccgcgtccatgccaaaggctcgggcgcctacggtacctttaccgttactcacgatatcaccggctataccagcgccaagctgttcgaagaggtcggtaaacaaaccgagactttcttacgcttctccaccgttggtggtgagcgcggttcggctgataccgagcgtgacccgcgcggcttcgcggtgaagttctacaccgaggaaggcaactgggacattgtcggtaacaacactccagtattcttcattcgcgacccacttaagttcccggactttatccacacccagaagcgccacccgcagtccaacctgaagaatgctcagatgatgtgggacttctggtcgcactctccagaagcgctgcatcaggtcaccatcctgttttccgatcgtggcattccggacggctaccgtcacatgcatggctttggcagccacacctacagcctgatcaatgcaaagggtgagcgcacttgggtcaagtggcacttcaagacccagcaaggcatcaagaacctcaccccggcagacgctgcacgcctggcaggtaccgacccggactacgctcagcgcgacctcttcgaggccatcgagcgtggcgactacccgcgctggactgtctgcattcaggtgatgagcgaagccgaggctgccagccgcgacgagaacccattcgacgtgaccaagacctggtcgcagaaggattatccactcatcgaggtgggtgtgctggagctcaaccgtaacccgctcaactattttgcggaggtcgagcaggccgcgttcgggccgagcaatatggtgcccggcgtcggtctttcgccggaccgcatgctgcaaggccgtgtattcgcctacgccgacgcgcaccgctatcgcgtggggaccaaccaccagcaattgccagtcaacgcgccacgctgcccggtgaacagctaccagcgtgatggctcgatggccaccggcagttacggtagtgcaccgaactacgagccaaacagctacagcgatgccccgaaacagtcgccacgtcatgctgagccagcattggccatgaatggttcggctgatcgctacgatcaccgcgaggataccgactacttcagccatgccggcgctttgttccgtttgatgaacgatgagcagaaggccctgctgatcagtaacatcgccggtaccatggcgggcgtcagcgaagatgtcattcagcgtcagctacagtacttcttcaaggcggatccggcttacggcgaagggattgcaaaggctttgggcatcaatctcgcctaa

SEQ ID NO: 42798 - protein, 479 aa, Pseudomonas putida KT2440
MSKILTTASGAPVADNQNSRSAGPRGPLLLDDFHLIEKLAHFNRENIPERRVHAKGSGAYGTFTVTHDITGYTSAKLFEEVGKQTETFLRFSTVGGERGSADTERDPRGFAVKFYTEEGNWDIVGNNTPVFFIRDPLKFPDFIHTQKRHPQSNLKNAQMMWDFWSHSPEALHQVTILFSDRGIPDGYRHMHGFGSHTYSLINAKGERTWVKWHFKTQQGIKNLTPADAARLAGTDPDYAQRDLFEAIERGDYPRWTVCIQVMSEAEAASRDENPFDVTKTWSQKDYPLIEVGVLELNRNPLNYFAEVEQAAFGPSNMVPGVGLSPDRMLQGRVFAYADAHRYRVGTNHQQLPVNAPRCPVNSYQRDGSMATGSYGSAPNYEPNSYSDAPKQSPRHAEPALAMNGSADRYDHREDTDYFSHAGALFRLMNDEQKALLISNIAGTMAGVSEDVIQRQLQYFFKADPAYGEGIAKALGINLA

SEQ ID NO: 42799 - DNA, 1455 bp, Lactobacillus plantarum WCFS1
  CDS (1)..(1455): transl_table=11
atgacggaaaaattaacgacggaaaccggccaaccatgggctaacaatgaacattcccaaacggcaggagctcgtggtcccgtattaatgcaagactataatcttttggaaaaactagcccattttgatcgtgaacgaattccagaacgggtcgttcatgctaagggggccggagcaaaaggtttttttgaacttgaaaacgacatgggggaatatactaaggcagacttatttaatggtgtcggtaagaaaactcccgtaatcttaaggttctcacaagttgccggtgaaaaaggttatcctgacaccgttcgagacgtgcgcggttttgccttaaaattttatactcagcaaggcaattatgatctcgttggaaacaacacaccggtcttttttgtaaacgaccctttaaaatttcctgacttcatccattcacaaaaacgggatcctaaaacgaaccgtcgtacgcaaaatatgcaatgggatttttgggctcattctccagaatcattgcaccaggtcacttatttaatgggcgaccgaggacttcctgcgtcctatcgaaccatgaatggttacggttcccatacttttaaatgggttaatcagaatggcgaacagttttgggttaagtatcacttcatctcagaccaaggcgttaaaaatatgactgctcaagcagctgaaaaagcaatgagccaagatttagattatttacaagatgacttatatgatgcaattcaagaaaaaaattacccatcatggacgatgtatgtccaaatcttgccatatgaggaaggtctaaactataaatgggacatttttgatgtcactaaagtcatctcccacaaagactatccactaattaaagtcggcaaactaactttaaatgagaatcccactaataactttaccgatattgaagaggcggccatgtcgccagcaaattttgttcctggtatcgaaccatctcccgacaaattactacaaggtcgcctattctcctataaagatgcacagcgatatcggttaggtgccaactttgaagatttacccgtgaacaagccggttgttccagttcataattatgaacgtgatggttacatgaaaattaataatcaaggtgctgaggtcaactacgagcctaatgcactgcatgggccagaagaggtgccggatgccgcattttcacctgattctgttcgtggtgaaacacgcgcacagccttatcgctatcaagttgattacacaactcaagcaggcgacctatatcgcttaatgtcagaacccgagcaagaacgcttaattaatactatcaaagatgcgttaggccaagttactttgcctggtgtcaaagaactcgaaatcaagcaattttatgaggccgacaaaaactacggtacacgcgtggctaatgctctgggaatgaatattgctgatattatcagtgattaa

SEQ ID NO: 42800 - protein, 484 aa, Lactobacillus plantarum WCFS1
MTEKLTTETGQPWANNEHSQTAGARGPVLMQDYNLLEKLAHFDRERIPERVVHAKGAGAKGFFELENDMGEYTKADLFNGVGKKTPVILRFSQVAGEKGYPDTVRDVRGFALKFYTQQGNYDLVGNNTPVFFVNDPLKFPDFIHSQKRDPKTNRRTQNMQWDFWAHSPESLHQVTYLMGDRGLPASYRTMNGYGSHTFKWVNQNGEQFWVKYHFISDQGVKNMTAQAAEKAMSQDLDYLQDDLYDAIQEKNYPSWTMYVQILPYEEGLNYKWDIFDVTKVISHKDYPLIKVGKLTLNENPTNNFTDIEEAAMSPANFVPGIEPSPDKLLQGRLFSYKDAQRYRLGANFEDLPVNKPVVPVHNYERDGYMKINNQGAEVNYEPNALHGPEEVPDAAFSPDSVRGETRAQPYRYQVDYTTQAGDLYRLMSEPEQERLINTIKDALGQVTLPGVKELEIKQFYEADKNYGTRVANALGMNIADIISD

SEQ ID NO: 42801 - DNA, 1467 bp, Bacteroides thetaiotaomicron VPI-5482
  CDS (1)..(1467): transl_table=11
atggaagaaaaaaaactaactgccgcgaacggtcgtcccattgccgacaatcagaattcgcaaaccgcaggtcaacgcggacctgtcatgttacaagatccatggcttattgaaaaactggctcattttgaccgtgaagtgattccggaaagacgtatgcacgccaaaggttcgggagctttcggtacatttaccgtcactcacgacattacgaagtacacccgtgcagctattttcagcgaagtcggaaagcaaactgagtgtttcgtccgtttctctaccgtagccggagagcgtggggcggcagatgccgaacgtgatatccgcggttttgccatgaaattctacaccgaagagggcaactgggatttagtcggaaacaacactcctgtctttttcttacgtgatccgcttaaatttccggatttgaatcatgccatcaagcgcgacccgaaaacgaacatgcgcagccctaacagcaactgggacttctggacacttctgcccgaagcgcttcatcaggtgacaatcactatgagccctcgcggcattccttactcctatcgccatatgcacggattcggaagccacacctatagttttatcaatgcggacaaccagcgtatctgggtgaaattccacctgcgcaccttgcagggaatcaaaaacctgacagatcaggaagcggaagcgatcatcgccaaagaccgcgaatctcatcaacgcgacctttttgaaagcatcgaaaagggagattacccgaaatggttattccagattcagttaatgacggaagaggaagcagaccattaccgcatcaacccgttcgacctgaccaaagtatggccgcacaaagacttcccgctacaagacgtcggaatccttgaactgaaccgtaatccggaaaactatttcgcagaagtagaacaagctgctttcaacccgatcaataccgtagacggcatcggattctcaccggacaagatgttacagggacgtctgttctcttacggcgatgcacagcgttatcgtctcggagtgaactccgaacagattccggtgaataaaccccgttgcccgttccatgcttaccaccgtgacggagccatgcgtgtagacggcaactacggtgcaaccaaaggctacgaacccaacagctacggagaatggaaagactctcctcacatgaaagaaccgcctctcaaagcatccggcaacggagagatatacaattataatgaacgcgaatacgatgatgattactacagccagccgggcgatctgttccgactgatgccggcagacgagcagcaacttctgtttgaaaacacggcacgtgctatgggagactccgaattattcatcaaacagcgtcacacccgcaactgctacaaagcagaccccgcatacggtgccggagtcgccaaagcattgggcattgatctgcaagaagcattgaaagaataa

SEQ ID NO: 42802 - protein, 488 aa, Bacteroides thetaiotaomicron VPI-5482
MEEKKLTAANGRPIADNQNSQTAGQRGPVMLQDPWLIEKLAHFDREVIPERRMHAKGSGAFGTFTVTHDITKYTRAAIFSEVGKQTECFVRFSTVAGERGAADAERDIRGFAMKFYTEEGNWDLVGNNTPVFFLRDPLKFPDLNHAIKRDPKTNMRSPNSNWDFWTLLPEALHQVTITMSPRGIPYSYRHMHGFGSHTYSFINADNQRIWVKFHLRTLQGIKNLTDQEAEAIIAKDRESHQRDLFESIEKGDYPKWLFQIQLMTEEEADHYRINPFDLTKVWPHKDFPLQDVGILELNRNPENYFAEVEQAAFNPINTVDGIGFSPDKMLQGRLFSYGDAQRYRLGVNSEQIPVNKPRCPFHAYHRDGAMRVDGNYGATKGYEPNSYGEWKDSPHMKEPPLKASGNGEIYNYNEREYDDDYYSQPGDLFRLMPADEQQLLFENTARAMGDSELFIKQRHTRNCYKADPAYGAGVAKALGIDLQEALKE

SEQ ID NO: 42803 - DNA, 1437 bp, Enterococcus faecalis V583
  CDS (1)..(1437): transl_table=11
gtgaaaaatcaacatttaactacgtcacaaggaagtccagttggcgataatcaaaattcgctaactgcaggagaatttggtcctgtcctaatccaagacgttcatttattagaaaaattagctcattttaatcgtgagcgcgtaccagaacgggttgttcatgccaaaggtgctggtgctcatgggattttcaaggtgagccaatcaatggcacaatatactaaagccgattttttatctgaagttggcaaagaaacacctttattcgctcgtttttcaactgtagctggagagttaggttcatcagatacattgcgtgatcctcgcggttttgcgcttaaattctatacagacgaaggaaattacgacttagttggcaataatacgcccatttttttcattcgtgatgcaattaagtttccagattttattcatagccaaaaaagaaatccgcggacgcatttgaaaagtccagaagctgtttgggatttttggtctcattcaccggaaagtcttcatcaagtaacaattttaatgagtgatcgtggcattccgttgtcgttccgtcatatgcatggttttggtagccatacattcaaatgggtcaatgctgctggagaagtattttttgttaaatatcacttcaagacgaatcaaggaatcaaaaatctagagagtcaattagcagaagaaattgctgggaaaaacccagatttccatattgaagatttgcataatgcaattgaaaatcaagaatttccttcttggacattatctgtgcaaattatcccgtatgcagatgcgttaacaatgaaagaaacactttttgatgtaacaaaaacggtttctcaaaaagagtatccgctgattgaagttggcacgatgactttaaatagaaatccagagaattattttgcagaggttgaacaagtaaccttttcaccagggaatttcgttcctggtattgaagcttctccggataaattattgcaaggacgtttgttcgcttatggggacgcacatcgtcatcgcgtgggcgctaatagtcaccaattgccaatcaaccaagcaaaagcgcctgtaaataactaccaaaaagacggcaatatgcgttttaacaatggcaatagcgaaattaattatgaaccaaatagttatactgaaacaccaaaagaagatcctacagcgaaaattagttcctttgaagttgaaggaaatgttggtaattatagctataatcaagatcactttacacaagcaaacgctttgtataatttgctgccaagcgaagaaaaagaaaacttaattaacaatatagcggcatctttaggtcaagtgaaaaatcaagaaatcatcgcgcgtcaaattgatttgttcactagagtaaatccagaatatggagcacgtgtcgcacaagccatcaagcaacaagcataa

SEQ ID NO: 42804 - protein, 478 aa, Enterococcus faecalis V583
MKNQHLTTSQGSPVGDNQNSLTAGEFGPVLIQDVHLLEKLAHFNRERVPERVVHAKGAGAHGIFKVSQSMAQYTKADFLSEVGKETPLFARFSTVAGELGSSDTLRDPRGFALKFYTDEGNYDLVGNNTPIFFIRDAIKFPDFIHSQKRNPRTHLKSPEAVWDFWSHSPESLHQVTILMSDRGIPLSFRHMHGFGSHTFKWVNAAGEVFFVKYHFKTNQGIKNLESQLAEEIAGKNPDFHIEDLHNAIENQEFPSWTLSVQIIPYADALTMKETLFDVTKTVSQKEYPLIEVGTMTLNRNPENYFAEVEQVTFSPGNFVPGIEASPDKLLQGRLFAYGDAHRHRVGANSHQLPINQAKAPVNNYQKDGNMRFNNGNSEINYEPNSYTETPKEDPTAKISSFEVEGNVGNYSYNQDHFTQANALYNLLPSEEKENLINNIAASLGQVKNQEIIARQIDLFTRVNPEYGARVAQAIKQQA

SEQ ID NO: 42805 - DNA, 1986 bp, Bacillus cereus ATCC 14579
  CDS (1)..(1986): transl_table=11
atggagcaattgaagcaccatgttacggataatcaacgcaaacatgctttaacaacaaaccaaggagtaaaaatagccgaggatgaattttctttaaagatgggcttaagaggcccaaccttaatggaggatttccactttcgcgagaaaatgacccactttgatcatgaacgaattcctgaaagaattgttcatgcgcgcggagttggcgtacatggttattttcagctttatgaatcgttagaagcctatacaaaagcagatttccttactaatccttcaaagaaaacacctgtatttgtacggttctcaaccgttcaaggttctaaaggatccaacgacacagtaagagatgtacgcggattcgccacaaaattttatacagatgaaggaaactatgatttagtgggtaataatatgcccgtattctttatccaagatgctattaaatttcctgattttgtccatgcagttaaaccagaaccacataatgatattcctcaaggagctagcgctcatgataccttttgggactttgttgcgcataatcctgagtccactcatatggtcatgtggcaaatgagcgaccgagctattccgcgtagtttacgaatgatggaaggttttggagttcacacatttcgactcattaacacagcaggaaaagcccatttcgtaaagtttcactggaaacctacccttggggttcattcattagtatgggatgaagctcaaaggattgctgggaaaaatcctgattttcatcgtcaagatttatacgaagcaattgaaaaaggggattatcctgaatgggagcttggattacagttaattccagaagaagatgaacataaatttgattttgatattttagatccaacgaaattatggccagaagaagaagttcccgtaaaattagttggtaaaatgacattgaacaaaaatgttgataacttctttgctgaaacagagcaggtagcttttcaccctggtcatgtcgtaccaggtattgatttttcaaatgaccctcttctgcaaggaagattattctcctatacagatacacaattatctcgtttagggggccctaatttccatcaaatccctatcaatcaacccgtatgtccttttcataataatcaacgtgatggtatgcatcaaatgcagattcatcgcggtcagacaagctatcatcctaacggattaaataacaatcaacctgcaaccgtccaagccgaacaaggaggatatgaacattatcaagaaaagattgatgggcataaaattagaggtcgtagtaaaagctttcttaacttttattctcaggctaaacttttctacaatagtatgagccctattgaaaagcagcacataaaagaagctttttgctttgaagttgggaagtgtaaatcagacatggtgaaggcaaatgtaattgctctcctaaaccacgtcgatcgtcaattagcacaagaagtcgctaacattgttggagctcctttacctaaagaaaatcacgaagtaaattcagatgcaaaatcacctgcactaagtatgtccaatactatttttaaatctgattctaaaaatgtcgcaattctattaaatggtgacccaagcgtctcccttctgtccgaatggattcaagcttttgcacagcaccgaatgaactatagcatcatagataataaaatttatcatttcaatgattccattaaagtaactgatacttatacaacaacagactcttcgctttttgatgcagtattagtgtttagtagtgagtctgtcattcacccccctgttttagaatttacagaaactacttttaaacattttaaaccgatagctcatgtccttagtaatcctcatgctttggacaatagtaagattaaactggatggagcaggagtttataacctaacaaacacttcaattgaatcatttatagaaggtattgcccaaggaagattctggaaccgataa

SEQ ID NO: 42806 - protein, 661 aa, Bacillus cereus ATCC 14579
MEQLKHHVTDNQRKHALTTNQGVKIAEDEFSLKMGLRGPTLMEDFHFREKMTHFDHERIPERIVHARGVGVHGYFQLYESLEAYTKADFLTNPSKKTPVFVRFSTVQGSKGSNDTVRDVRGFATKFYTDEGNYDLVGNNMPVFFIQDAIKFPDFVHAVKPEPHNDIPQGASAHDTFWDFVAHNPESTHMVMWQMSDRAIPRSLRMMEGFGVHTFRLINTAGKAHFVKFHWKPTLGVHSLVWDEAQRIAGKNPDFHRQDLYEAIEKGDYPEWELGLQLIPEEDEHKFDFDILDPTKLWPEEEVPVKLVGKMTLNKNVDNFFAETEQVAFHPGHVVPGIDFSNDPLLQGRLFSYTDTQLSRLGGPNFHQIPINQPVCPFHNNQRDGMHQMQIHRGQTSYHPNGLNNNQPATVQAEQGGYEHYQEKIDGHKIRGRSKSFLNFYSQAKLFYNSMSPIEKQHIKEAFCFEVGKCKSDMVKANVIALLNHVDRQLAQEVANIVGAPLPKENHEVNSDAKSPALSMSNTIFKSDSKNVAILLNGDPSVSLLSEWIQAFAQHRMNYSIIDNKIYHFNDSIKVTDTYTTTDSSLFDAVLVFSSESVIHPPVLEFTETTFKHFKPIAHVLSNPHALDNSKIKLDGAGVYNLTNTSIESFIEGIAQGRFWNR

SEQ ID NO: 42807 - DNA, 1458 bp, Nitrosomonas europaea ATCC 19718
  CDS (1)..(1458): transl_table=11
atggatgatgccaaaaagaagctgaccaccagtgccggtgcacccgtagcggataatcagaatgtcatgactgccggtccgcgcggcccgatgttgctacaggatatctggtttctcgagaaacttgctcatttcgatcgtgaagtgatcccggagcggcggatgcacgctaagggatccggtgcctacggtacctttacagtgacgcacgatatcactcgttacacgcgggcaaatattttttctcagatcgggaaaaaaaccgacctgttcgttcgcttttccacggtggcgggagaacggggcgctgccgatgcagagcgtgacattcgcggttttgccatcaagttttatactgaagaaggtaactgggatctggttggcaacaatacgccggtattttttctgcgtgatccgctgaaatttccggatctcaatcatgccgtcaaacgcgatccacgaaccaatttgcgcagtgcgcgcaacaactgggatttctggacgctgcttcctgaagcattgcatcagattaccatcgtcatgagtgaccgcggtctgcctgcaacctatcggcacatgcacggtttcggcagccatactttcagtttcatcaatgcccgacaggaacgttactgggtgaaatttcatttcagaacacagcagggtatcaaaaacctgaccgatgccgaggcggaagcactggtcggcaaggatcgggaaagtcatcagcgtgacctgtacgaaagcattgaaaatggtgaattcccgcgctggacattatttgtgcagatcatgccggaaagcgatgcagccagtcttccctataatccgtttgacctgaccaaagtctggccgcacaaagactatccgctgatcgaagttggtgtgatggaattgaatcgcaatccggagaattactttgctgaggtcgagcaggctgcgttcaatccagccagtgtcgtgccgggaatcagtttttcaccagacaaaatgttgcaggggcgcttgttttcctatggggatgcgcagcgttaccgcctgggtgtcaatcattatcagatcccggttaacgccccccgctgccctttccatcattatcatcgtgacggcgccatgcgggttgatggcaatcagggtagtaccctgggatacgagcccaatagttaccaggaatggcagcagcagcctgaatatgcagaacctccgttaacgctggaaggcgcggctgcacattggaatcaccgagtagacgaggattactatattcagccgggtaatttattccggctcatgaattcctcgcagcaacaagtgctatttgacaataccgctcgttccattggagaggcaccacgggaaattcagattcggcatatcaccaactgtctgaaggcggatcgtgcttatggtgaaggcgttgccagggctttgggaattgcgttgagcgaagtggattaa

SEQ ID NO: 42808 - protein, 485 aa, Nitrosomonas europaea ATCC 19718
MDDAKKKLTTSAGAPVADNQNVMTAGPRGPMLLQDIWFLEKLAHFDREVIPERRMHAKGSGAYGTFTVTHDITRYTRANIFSQIGKKTDLFVRFSTVAGERGAADAERDIRGFAIKFYTEEGNWDLVGNNTPVFFLRDPLKFPDLNHAVKRDPRTNLRSARNNWDFWTLLPEALHQITIVMSDRGLPATYRHMHGFGSHTFSFINARQERYWVKFHFRTQQGIKNLTDAEAEALVGKDRESHQRDLYESIENGEFPRWTLFVQIMPESDAASLPYNPFDLTKVWPHKDYPLIEVGVMELNRNPENYFAEVEQAAFNPASVVPGISFSPDKMLQGRLFSYGDAQRYRLGVNHYQIPVNAPRCPFHHYHRDGAMRVDGNQGSTLGYEPNSYQEWQQQPEYAEPPLTLEGAAAHWNHRVDEDYYIQPGNLFRLMNSSQQQVLFDNTARSIGEAPREIQIRHITNCLKADRAYGEGVARALGIALSEVD

SEQ ID NO: 42809 - DNA, 1437 bp, Helicobacter hepaticus ATCC 51449
  CDS (1)..(1437): transl_table=11
atgtcaaagaaatttacgacagcaacaggcacaccattaggtgataatcaaaactcaattacagcaggcaaaaagggacctacacttttacaagatacttggcttttagaaaaacttgcacattttgatagagagagaatcccagagagagtggtgcacgctaaaggaagtgcagcatatggtgaattaacaattacaaatgatattactcaatacacaaaagcagaactttttaacaaagtgggcaaaaaaacaaaagcatttttgcgtttttctgtggtggcaggtgagcgaggagcagcagatgcagagcgtgatgtgcgtggttttgcactcaagctttatacaaatgaaggaaattgggatattgtaggtaataacacacctgtgttttttattaaagatgcgattaaattccctgattttattcatacacaaaaacgagaccccaaaacaaatatgaaaagccctacggcaatgtgggatttttggagtttgcacccagaatccttacatcaagtaacgattttaatgagcgataggggtattccacgaagttaccgagaaatgcacggatttggtagccacacatatagctttatcaatgccaaaaacgagcgcttttgggtgaaattccattttgtttgtttgcaaggtattcataaccttactaataaagaatcagaggcagttatcgccaaagatagagaatctcatcaaaaagatttgtttgaaaatattgaaaagggtaatttccctaaatggcgattctgtatccaagtaatgagcgaaaaagaggcggaaaactatcgttttaatccttttgatttaacaaaagtatggagtcataaagattatccgcttattgaagtggggattttagaactcaataagaatccagagaattattttgcagaagtagaacaagcagcttttaatcctgcaaatatcgtgcccggagtaggatatagccccgataaagtattgcaagggcggctttttagttatggagatacacaaagataccgcttaggcattaatcacactcaacttcctgtaaatgcacctattgtgcctgtgaataatacgcatcgtgatggttttatgcagcaaggtcagtttggcgatagacgcaattatgagccaagttattttaatgattatgttgaagataaaaacgcacttgaaccaccactttttgtgcaagagggtgatgtaatgtataaatatgaccatcgcgaatatgaagatgattattttgtgcaagcaggagatttgtatcgcttgatgactgcagagcaaaaagaagcattatgtcaaaatattaaagaatcaatggaaggtgtgccagatgaaattaaaaaacgtcagcttgagcactttaaaaaagcagataaagcgtatggcaagagagtggcagagcttttggggttataa

SEQ ID NO: 42810 - protein, 478 aa, Helicobacter hepaticus ATCC 51449
MSKKFTTATGTPLGDNQNSITAGKKGPTLLQDTWLLEKLAHFDRERIPERVVHAKGSAAYGELTITNDITQYTKAELFNKVGKKTKAFLRFSVVAGERGAADAERDVRGFALKLYTNEGNWDIVGNNTPVFFIKDAIKFPDFIHTQKRDPKTNMKSPTAMWDFWSLHPESLHQVTILMSDRGIPRSYREMHGFGSHTYSFINAKNERFWVKFHFVCLQGIHNLTNKESEAVIAKDRESHQKDLFENIEKGNFPKWRFCIQVMSEKEAENYRFNPFDLTKVWSHKDYPLIEVGILELNKNPENYFAEVEQAAFNPANIVPGVGYSPDKVLQGRLFSYGDTQRYRLGINHTQLPVNAPIVPVNNTHRDGFMQQGQFGDRRNYEPSYFNDYVEDKNALEPPLFVQEGDVMYKYDHREYEDDYFVQAGDLYRLMTAEQKEALCQNIKESMEGVPDEIKKRQLEHFKKADKAYGKRVAELLGL

SEQ ID NO: 42811 - DNA, 1482 bp, Rhodopirellula baltica SH 1
  CDS (1)..(1482): transl_table=11
atgtccgaagaatccaagtgcccgtttcaaactcagcaattcggccgggcggtcgatgacaatcagcattcgcaaaccgctggaccacgtggacctgtcttgatgcaggacgttcacctggtcgagaagatggcgcacttcaatcgggaacggattccggaacgggttgttcacgcaaagggctttggagcctttggcacgttcacggtcacgaacgacatcaccaagtactgcatggcggatttgttctcggaagttggcaagaaaacggaaacctttgcccgtttctcgaccgtcggtggcgaaagcggttcggctgacacggcccgtgacccacgtgggttttcgctgaagttttacaccgatcaaggcgtctgggatttggtcggcaacaacacgccgatcttcttcattcgcgatccgttgaagttcagcgacttcattcggactcaaaaacgcgagccgcagaatcacttgcagcctcattggcgtcgttgggacttttggggcgaggtgcccgaggctcttcatcaggtgatgttcctttacagcgatcgtggaacaccaaagagtgcacgcttcatgaacggctacggcagccacacgttcagcatgtacaacaaagacggtgtccggcactgggtgaagttccatctgaagaccgaacaaggttcagagaacttcagtgcggacgaagcgatcaaaatggcgggcgaagcgccagattactcgacgcgtgatttgtttgaagcgattgagaagggcgacttccctcgttggcgaatgcacattcaggtcatgcccgagtctgacgccgcagattacgaatggcatccattcgatttgaccaaggtatggccgcacgatgactatccgttgattgaagtcggcgtgtttgaactcaatcgcaatccgtccaactacttccaagatgtcgagcaagccgcctttgagcctggcaacttggtcgagggcatcgggatctcacccgatcgcatgttgcagaatcgcgtgctgtcttatcccgatgcacaccggtatcggttgggtgtgaactatcaccagatccctgtcaatcaaccgcgttgcccgtatgcgacttatcaccgtgacgggacgatgcgagtggacggaaacggtggtgggacggttgattatgaacccaacaagatgaacggtccgaaggagaccgggcgaacgatggagccgcccatgccagtgcacggcgatggcgatcgctacgacgagttcgcgtgcgatgacaaggactactacggccagcctcagatgttctggaacaaggtgctggacgaaggagctcgcgaacggctttgcacggcgatctccaattcgatggccgacagcccggagaacatccgcgaaaagatgttggctcagttcggcaaagtgcatccggattttgaagagggtgtgcgcagtcgcttggatgctcccaagtcacaaccgatcccgatcgcataa

SEQ ID NO: 42812 - protein, 493 aa, Rhodopirellula baltica SH 1
MSEESKCPFQTQQFGRAVDDNQHSQTAGPRGPVLMQDVHLVEKMAHFNRERIPERVVHAKGFGAFGTFTVTNDITKYCMADLFSEVGKKTETFARFSTVGGESGSADTARDPRGFSLKFYTDQGVWDLVGNNTPIFFIRDPLKFSDFIRTQKREPQNHLQPHWRRWDFWGEVPEALHQVMFLYSDRGTPKSARFMNGYGSHTFSMYNKDGVRHWVKFHLKTEQGSENFSADEAIKMAGEAPDYSTRDLFEAIEKGDFPRWRMHIQVMPESDAADYEWHPFDLTKVWPHDDYPLIEVGVFELNRNPSNYFQDVEQAAFEPGNLVEGIGISPDRMLQNRVLSYPDAHRYRLGVNYHQIPVNQPRCPYATYHRDGTMRVDGNGGGTVDYEPNKMNGPKETGRTMEPPMPVHGDGDRYDEFACDDKDYYGQPQMFWNKVLDEGARERLCTAISNSMADSPENIREKMLAQFGKVHPDFEEGVRSRLDAPKSQPIPIA

SEQ ID NO: 42813 - DNA, 1440 bp, Bordetella bronchiseptica RB50
  CDS (1)..(1440): transl_table=11
atgaccaacaagaccctcactaccgccgccggtgcgccggttgccgacaacaacaacaccatgacggcggggccgcgcggccccgccctgctgcaggacgtctggttcctggagaaactggcccacttcgaccgtgaacgcattcccgagcgcgtggtgcacgccaaaggctcgggcgcctatggcaccttcacggtcacgcatgacatttcccgctacacgcgcgccaggatcttcgccgaagtcggcaagcagacgccgttgttcctgcgcttttcgaccgtggccggcgagcgcggcgcggccgacgccgaacgtgacgtgcgtggcttcgccatcaagttctataccgacgaaggcaactgggacctggtcggcaacaacacgcccgtgttcttcattcgcgatccgctcaagttccccgacttcatccatacccagaagcgcgaccccaagaccaacctgcgcaacgccaccgccgcctgggacttctggtcgctcaacccggaatcgctgcaccaggtcaccatcctgatgagcgatcgcggactgccgcagaactatcgccagcagcacggcttcggctcgcatacctacagcttcgtcaacgacgccggcgagcgtttctacgtcaagttccacttcaagtcgcagcaaggcatcgcctgttatacggacggcgaagccgccgagctggtcggccgcgatcgcgaaagcgcgcagcgcgacctgttccagaacatcgagcagggccagttcccgcgctggacgctcaaggtgcaggtaatgcccgaagccgaggccgccacctatcacatcaacccgttcgacctgaccaaggtgtggccgcatgccgactaccccttgatcgaagtgggcgtgctggaactgaacaagaaccccgagaactatttcgccgaagtcgaacaggccgcgttcacgccggccaatgtggtgccgggcatcggcttttcgcccgacaagatgctgcagggtcgcctgttctcgtacggcgacacccatcgctaccgcctgggcatcaaccaccatcagattcccgtcaatgcgccgcgctgcccgttccacagcttccatcgcgacgggatgggccgggtcgacggcaatggcggcgccacgctgaactacgaacccaacagtttcggcgaatggcgcgaagccaagcacgcagccgaaccgccgctggcgctggacggacaggccgccgaccgctggaaccatcgggtcgacgaggactactactcgcagccgggcgcgctgttccgtctcatgaacgacgaccagaaacagcagctgttcggcaacatcggccgccacatggccggcgtgcccgaggaaatccagcgccgccagctcgagcacttccgccgtgccgacccggcctatgccgcgggcgtggccaaggccctgggcctgaagtaa

SEQ ID NO: 42814 - protein, 479 aa, Bordetella bronchiseptica RB50
MTNKTLTTAAGAPVADNNNTMTAGPRGPALLQDVWFLEKLAHFDRERIPERVVHAKGSGAYGTFTVTHDISRYTRARIFAEVGKQTPLFLRFSTVAGERGAADAERDVRGFAIKFYTDEGNWDLVGNNTPVFFIRDPLKFPDFIHTQKRDPKTNLRNATAAWDFWSLNPESLHQVTILMSDRGLPQNYRQQHGFGSHTYSFVNDAGERFYVKFHFKSQQGIACYTDGEAAELVGRDRESAQRDLFQNIEQGQFPRWTLKVQVMPEAEAATYHINPFDLTKVWPHADYPLIEVGVLELNKNPENYFAEVEQAAFTPANVVPGIGFSPDKMLQGRLFSYGDTHRYRLGINHHQIPVNAPRCPFHSFHRDGMGRVDGNGGATLNYEPNSFGEWREAKHAAEPPLALDGQAADRWNHRVDEDYYSQPGALFRLMNDDQKQQLFGNIGRHMAGVPEEIQRRQLEHFRRADPAYAAGVAKALGLK

SEQ ID NO: 42815 - DNA, 1446 bp, Chromobacterium violaceum ATCC 12472
  CDS (1)..(1446): transl_table=11
atgagaaagcacaccctcaccaccgccgccggcgcgccggtcgtcgacaaccagaacgtgcagaccgccggcccgcgcggcccgatgctgctgcaagatgtctggtatctggaaaagctggcgcatttcgaccgcgaggtgattccggagcgcaggatgcacgccaaaggctccggcgccttcggcaccttcaccgtcacccatgacatcacccgttacacccgcgccgcgctgttctccgacatcggcaaaaagaccgacctgttcctgcgcttctccaccgtcgccggcgagcgcggcgcggccgacgccgagcgcgacatccgcggcttcgccgtcaagttctacaccgaggagggcaactgggacctcgtaggcaacaacacgccggtgttcttcctgcgcgacccgctgaaattccccgacctcaaccgcgccgtgaagcgcaatccgtacaccaatatgcgcgacgccaacgccaactgggacttctggacgctgctgcccgaggcgctgcaccaggtcaccatcgtgatgagcgaccgcggcataccggccagctaccgccacatgcacggtttcggcagccacaccttcagcctgatcaacgccaagggcgagcgccactgggtcaagttccatttccacacccagcagggcatccgcaatctgagcgacgccgaggcggaaaagctggtgggccaagaccgcgaaagcgcgcagcgcgacctgctggagtgcatagaccgcggcgatttcccgcgctggaccctgtacatccaggtgatgacagaagcccaggccgacgcttgtcccttcaaccccttcgacctgaccaaggtgtggtcgcacaaggactacccgctgatcgaggtgggcgtgctggagctgaaccgcaatccgcagaactacttcgcagacgtggagcaggccgcgttcaatccggccaacgtggtgccgggcatcagcttctcgcccgaccgcatgctgcagggccgcttgttcgcctatggcgacgccgagcgctaccgcctgggcgtcaatcaccatctgattccggtgaacgcgccgcgctgccccttccacaacagctaccaccgcgacggcgcgatgcgggtggacagcaacgccggcgccaccatcggctacgagccgaacagccagggcaagtggcagcagcagccggcatacgacgagccgccgctggcgctgcagggcaacgcctatcactacgacttccgcgcggacgacgacgattactacagccagcccggcgcgctgttccggctgatgacgccggcccaacagcaagcgctgttcgacaacaccgcacgcgcgatgggcggcgtcgacgaagcgatcaagcgccgccacatcgccaactgcgccaaggccgatcccgcctatggcgcgggcgtggccaaggcattgggcctgagcgtctga

SEQ ID NO: 42816 - protein, 481 aa, Chromobacterium violaceum ATCC 12472
MRKHTLTTAAGAPVVDNQNVQTAGPRGPMLLQDVWYLEKLAHFDREVIPERRMHAKGSGAFGTFTVTHDITRYTRAALFSDIGKKTDLFLRFSTVAGERGAADAERDIRGFAVKFYTEEGNWDLVGNNTPVFFLRDPLKFPDLNRAVKRNPYTNMRDANANWDFWTLLPEALHQVTIVMSDRGIPASYRHMHGFGSHTFSLINAKGERHWVKFHFHTQQGIRNLSDAEAEKLVGQDRESAQRDLLECIDRGDFPRWTLYIQVMTEAQADACPFNPFDLTKVWSHKDYPLIEVGVLELNRNPQNYFADVEQAAFNPANVVPGISFSPDRMLQGRLFAYGDAERYRLGVNHHLIPVNAPRCPFHNSYHRDGAMRVDSNAGATIGYEPNSQGKWQQQPAYDEPPLALQGNAYHYDFRADDDDYYSQPGALFRLMTPAQQQALFDNTARAMGGVDEAIKRRHIANCAKADPAYGAGVAKALGLSV

SEQ ID NO: 42817 - DNA, 1443 bp, Photorhabdus luminescens subsp. laumondii TTO1
  CDS (1)..(1443): transl_table=11
atgaaaaagagagggcttacaacgaatgctggtacccctgtcgttgacaacaataatgtcatgactgcgggtcaacgtggtcctatgttgttacaagatgtttggttcttagaaaagcttgcccattttgatcgtgaagtgatcccagagcgccgtatgcatgccaaaggttctggagctcatggtgtctttgtggttactcacgatattactaagtacactcgcgctaagattttttctgaaataggcaaaaaaaccgagatgtttgcccgtttctcaactgtcgccggtgaacgcggcgcagcagatgctgaacgtgatattcgtggttttgcgctcaagttctatacggaagaaggaaactgggatttagtcggcaacaataccccgatattctatctccgtgatccactgaagttcccggatcttaaccatgttgttaaacgcgatccccacactaacttacgtaatcctgcctataagtgggattttttctctcatcaacctgaatcactgcaccaattaacgattgatttcagtgaccgtggtgtacctaagtctttccgccatatgcacggttttggtagccatactttcagctttatcaacgcagataatgaacgtttctgggtgaaattccatttccgttgtcagcaaggcattaaaaacctgatggacgaagaagcagaagcgctggtgggtaaagatcgtgaaagttctcaacgtgacttgtttgcagcaattgagcaaggagattatccacgctggaaattaaaagtccaaatcatgccagagaaagaagctaacttgttaccgtacaacccgtttgatttgaccaaagtctggcctcacggcgactacccaatgattgatgtcggttatttcgagctaaaccgtaatcctgataactatttctcagatgttgaacaggctgctttcaaccctgctaatgtcgtgccaggtatcagtttctcccctgataagatgttacaaggccgtctgttctcttatggtgatgctcaacgttaccgtcttggcgttaaccaccatcaaattccggtcaatacacctcgttgtccgttccataattaccaccgtgatggggcaatgcgtgtcgatggtaacagcggaaacaccgtgacttatgaaccaaacaatgcaggattgttccaggaacaacctgaattcaaacacccatcattgtctttagaaggagatgccgatcactggaaccatcgtcaagatgaagattatttcagtcaacctcgtaaactgtttatgctaataaacagtaaagagcatcaacgtatgtttgaccgtattgccagtgaactgtcacaagcacatgaagatactcaacgccgtcaggttgagctatttagaaaagttcatccagaatatggcgctggtgttgaaaatgcgctgaaaaaaatcaaagggtaa

SEQ ID NO: 42818 - protein, 480 aa, Photorhabdus luminescens subsp. laumondii TTO1
MKKRGLTTNAGTPVVDNNNVMTAGQRGPMLLQDVWFLEKLAHFDREVIPERRMHAKGSGAHGVFVVTHDITKYTRAKIFSEIGKKTEMFARFSTVAGERGAADAERDIRGFALKFYTEEGNWDLVGNNTPIFYLRDPLKFPDLNHVVKRDPHTNLRNPAYKWDFFSHQPESLHQLTIDFSDRGVPKSFRHMHGFGSHTFSFINADNERFWVKFHFRCQQGIKNLMDEEAEALVGKDRESSQRDLFAAIEQGDYPRWKLKVQIMPEKEANLLPYNPFDLTKVWPHGDYPMIDVGYFELNRNPDNYFSDVEQAAFNPANVVPGISFSPDKMLQGRLFSYGDAQRYRLGVNHHQIPVNTPRCPFHNYHRDGAMRVDGNSGNTVTYEPNNAGLFQEQPEFKHPSLSLEGDADHWNHRQDEDYFSQPRKLFMLINSKEHQRMFDRIASELSQAHEDTQRRQVELFRKVHPEYGAGVENALKKIKG

SEQ ID NO: 42819 - DNA, 1539 bp, Corynebacterium diphtheriae NCTC 13129
  CDS (1)..(1539): transl_table=11
gtgaccagcccagtcgatccaatcctgaacaagggcgagcgcaccgaagcagctcctcacaccacccgcgccggcgggcagcccgtcgccagcgaaaacatctccatcaccgcaggcccacaaggcgccaacgtactcaacgacctgcacctgatcgaaaaactcgcacactttaaccgcgagcgcgtcccagagcgcaatccacacgccaaaggtcacggcgcattcggcgaactccacatcaccgaagacgtatcccagtacaccaaggccaagctcttccaaaaaggcaccgtcacccccatggccgtgcgcttttctaccgtcgccggtgaaaaaggctccccagacacctggcgcgacgtccacggcttcgcactgcgcttttacacccaagacggcaactacgacatcgtaggaaacaacaccccaaccttcttcctacgcgacgccatgaagttccccgacttcatccactcccagaagcgcctcggctccagcggcctgcgcgatgctgacatgcaatgggacttctggacccgcaccccagaatccgcacaccaagtcacctacctcatgggcgaccgcggcacaccaaaaaccagccgccaccaggacggatttggctctcacacctaccagtggatcaacgaagacggccagccagtgtgggtgaagtaccactttaagacccgccagggctgggaaaccttcaccgacgcagaggcccaagaaatggccggcaagaacgccgactaccagcgcgaagacctctacaatgccatcgagcgcggcgacttccccatctgggacgtcaaagtccagatcatgccattcgacgaggccgaaacctaccgctggaaccccttcgacctgaccaagacctggtcccagaaggactacccgcttatcgacgtcggctacttcgtgctcaaccgcaacccacagaacttcttcgcccagatcgaacagctggccctcgacccagccaacctcgtcccaggcgttggactctccccagaccgcatgctcatggcccgtgccttcgcctacgcagacgcacaacgctaccgcattggcccgaactaccagcagctgcccatcaaccagccagtggtaccggtgaacacctaccagcacgaaggccccatggcctaccacttcaacccagctgacgcgccggtgcacacaccaaaccgctttggcaagggtgccggctacctcgacgacggtcaaacctcgtcctccggtgcgacctacggtcaggcgcaggatctctacgtcaacccagatccacacggcaccgacctgactcgcgcagcctatgtcaagcacgcagacgatgacgacttcatgcaagccggaatcctctaccgcgaggtctatgacgacgcagccaaggaacgcttcgtggacaacgtgaccaatgccatggcaggggtatccccagaaaccgaggagcgcgtctactggtactggacccaagtagacgaaaacctcggtgcgaaaatccgtgaggcattcgccgctaagaagtag

SEQ ID NO: 42820 - protein, 512 aa, Corynebacterium diphtheriae NCTC 13129
MTSPVDPILNKGERTEAAPHTTRAGGQPVASENISITAGPQGANVLNDLHLIEKLAHFNRERVPERNPHAKGHGAFGELHITEDVSQYTKAKLFQKGTVTPMAVRFSTVAGEKGSPDTWRDVHGFALRFYTQDGNYDIVGNNTPTFFLRDAMKFPDFIHSQKRLGSSGLRDADMQWDFWTRTPESAHQVTYLMGDRGTPKTSRHQDGFGSHTYQWINEDGQPVWVKYHFKTRQGWETFTDAEAQEMAGKNADYQREDLYNAIERGDFPIWDVKVQIMPFDEAETYRWNPFDLTKTWSQKDYPLIDVGYFVLNRNPQNFFAQIEQLALDPANLVPGVGLSPDRMLMARAFAYADAQRYRIGPNYQQLPINQPVVPVNTYQHEGPMAYHFNPADAPVHTPNRFGKGAGYLDDGQTSSSGATYGQAQDLYVNPDPHGTDLTRAAYVKHADDDDFMQAGILYREVYDDAAKERFVDNVTNAMAGVSPETEERVYWYWTQVDENLGAKIREAFAAKK

SEQ ID NO: 42821 - DNA, 2118 bp, Rhodopseudomonas palustris CGA009
  CDS (1)..(2118): transl_table=11
atggcaaaatctgcgaaaccgaccaaaaaccggacggcgaccattcacgaccagaagatgtcgcgcggcgaaggcggcgagctgcaccagaccgccgaagatctcggcaccgaggtgatgaccaccgcgcaaggcggcccgatctccgacgaccagaacaccctgaagatcggcccgcgcggaccggcgctgatcgaggacttccacttccgcgaaaagatctttcatttcgaccacgagcggattcccgagcgcgtggtgcatgcccgcggctacggcgcgcacggctttttcgaaacgacccattcgctggcgaagttctcccgcgccgatctgttccagcgcgtcggcgaacgcactccggcgttcgtgcgcttctccactgttgctggcagcaagggctcggtcgatctagcccgcgatgtgcgcggctttgcggtcaagatctacaccaaagagggcaactgggatctggtcggcaacaacattccggtgttcttcattcaggatgcgatcaagtttcccgacctgatccattcggtgaaggaagagcccgaccgggcgtttccgcaggcgcaatcggcccacgacaatttctgggacttcatcagcctgacgcccgaaagcatgcacatggtgatgtgggtgatgtcggaccgcgcaatcccccgctcgttccgtttcatggaaggcttcggcgtccacaccttccgcctcgtcaatgccgacggcgaatccaccttcgtgaagtttcactggaagcccaagctcgggatgcagtcggtgctgtggaacgaggcggtgaagatcaacggcgccgatcctgacttccatcgccgggatctgtggaccgcaatctcgaccggcaatttcccggaatgggagctgcgggtgcagctgttcgatcaggaattcgccgacaagttcgatttcgacatcctcgacgctaccaagatcatcccggaggagatcatcccgccggtgccggtgggtcgcctcgtgcttgaccggatgccggacaacttcttcgccgagaccgagcaggtcgcgttcatgactcagaacgtgccgccggggatcgatttctccaatgatccgctgctgcagggccgcaacttctcctatctcgacactcagctgaaacggctcggcagtccgaatttcgcgcatctgccgatcaacgccccgaaatgtccgttcgcgcacttccagcaggacggccacatggcgatgcacaacccggtcggacgcgccaactatcaaccaaactcgcacggcctcggtccgcgcgaatctccgcagcgcggcttcgtgccgttccccgaggccgaagaaggcgccaaggcgaagtttcgcgccgagagctttgccgatcactatagtcaggcgcggcaattctacctcagccagacccgcaccgagcagcaccacattgtttcggcactgacgttcgaactcagcaaggtcgagatttcggtgatccgcgaacgcgtgctgtcgcatctgctgctcatcgacgagaccttggcgaccaacgtcgccaaccggctgggcatcaaggcaatgccgaagcccgcggacgctgcggtgccgacgcggcaggacctgccgccctcacccgcgctctcgatcatcgagaacggaccggagcggttcggaggccgcaagctcggcatcctgatcaccgacggcaccgacgcggcgctgctgaagagcttgcagaaggctgtcgagaaggcgggcgcgacgttcgaactgatcgccccccgcgtcggcggcgtaatcgcgagcgacggcagcgagatcgccgcgcaccagatgatcgatggcggaccgtctgtcctgtacgacgcggtggcgctgctgccgggagacgatgaaatcgacgacctgctgcaggaatcgaccgcccgcgacttcgtcgccgacgccttcgcgcactgcaagttcatcggctacgtcgccgccgcccggccgctgttcgccaaagccggcatcggcgacgacctcgatgaaggctgcatcgagctcgccgcgcgtaaggatgccggcgccttcgtcgatcagctcggcaagctccgggtgtgggcgcgcgaatccgtcgtcaaaatgcgctga

SEQ ID NO: 42822 - protein, 705 aa, Rhodopseudomonas palustris CGA009
MAKSAKPTKNRTATIHDQKMSRGEGGELHQTAEDLGTEVMTTAQGGPISDDQNTLKIGPRGPALIEDFHFREKIFHFDHERIPERVVHARGYGAHGFFETTHSLAKFSRADLFQRVGERTPAFVRFSTVAGSKGSVDLARDVRGFAVKIYTKEGNWDLVGNNIPVFFIQDAIKFPDLIHSVKEEPDRAFPQAQSAHDNFWDFISLTPESMHMVMWVMSDRAIPRSFRFMEGFGVHTFRLVNADGESTFVKFHWKPKLGMQSVLWNEAVKINGADPDFHRRDLWTAISTGNFPEWELRVQLFDQEFADKFDFDILDATKIIPEEIIPPVPVGRLVLDRMPDNFFAETEQVAFMTQNVPPGIDFSNDPLLQGRNFSYLDTQLKRLGSPNFAHLPINAPKCPFAHFQQDGHMAMHNPVGRANYQPNSHGLGPRESPQRGFVPFPEAEEGAKAKFRAESFADHYSQARQFYLSQTRTEQHHIVSALTFELSKVEISVIRERVLSHLLLIDETLATNVANRLGIKAMPKPADAAVPTRQDLPPSPALSIIENGPERFGGRKLGILITDGTDAALLKSLQKAVEKAGATFELIAPRVGGVIASDGSEIAAHQMIDGGPSVLYDAVALLPGDDEIDDLLQESTARDFVADAFAHCKFIGYVAAARPLFAKAGIGDDLDEGCIELAARKDAGAFVDQLGKLRVWARESVVKMR

SEQ ID NO: 42823 - DNA, 2121 bp, Mycobacterium avium subsp. paratuberculosis str. k10
  CDS (1)..(2121): transl_table=11
atggccaccgaccacacttcgggtgcgcccgatcccaagcagcgcgatctggagtccgcgcggttccgccgcgacaccggatacctgaccacgcagcagggcgtgcgcgtcgaccacaccgacgatgcgctcaccgtcggcgagcggggtccgacgctgctggaggatttccacgcccgggagaagatcacccacttcgaccacgagcgcatcccggagcgtgtggtgcatgcgcgcggggccggcgcctacggctatttcgaaccgtacgacgaccggttggcgcagtacacggcggcgaaatttctgacctcgccgggcaccaggacgccggtgttcgtgcgtttttcgacggtcgccggatcgcgcggttcggccgacaccgtccgcgacgtgcgcgggttcgccaccaagttctataccgaacaaggcaattacgacttggtgggcaacaacttcccggtgttcttcatccaggacggcatcaagttccccgacttcgtgcacgcggtgaaacccgagccgcacaacgagattccgcaggcgcagtcggcgcacgacacgctgtgggacttcgtgtcgctgcagcccgagacgttgcacgccatcatgtggctgatgtcggaccgggcgctgccgcgcagctaccgcatgatgcaggggttcggggtgcacaccttccggctggtgaacgcccgcggcgaggggactttcgtgaagttccactggaagccccgactcggcgtgcactcgctgatctgggacgaatgccagaagatcgccggcaaagaccccgattacaaccgccgcgacctgtgggaggccatcgaatcccgccagtacccggagtgggagctgggcgtgcagctggtcgccgaggacgacgagttcagcttcgacttcgatctgctggacgcgacgaaaatcattccggaagaacaggttccggtattgccggtgggcaagatggtgttgaaccgcaaccccgacaacttcttcgccgagaccgagcaggtcgcttttcacaccgccaacgtggtgccgggcatcgatttcaccaacgacccgttgctgcagttccgcaacttctcctatctggacacgcagctgatccggttgggcggccccaacttcgcgcagctgccggtcaaccgcccggtggcgcaggtgcggaccaaccagcacgacggttacgggcagcacacgattccgcagggccggtccagttacttcaagaacagcatcggcggcggttgtcccgcactggccgacgaggacgtgttccggcactacacccagcgggtggacgggcagacgatgcgcaagcgcgccgaggcgttccagaaccactacggccaggcgcggatgttcttcaagagcatgtcgccggtggaggccgaacacatcgtggccgccttcgccttcgaactcggcaaggtggagatgcccgaaatccgttccgcggtggtggcacaactcgcccgcgtcgatgaccagctggccgcccaggtcgcggcgaaactggggctgcccgagccgccggaggagcaggtggacgagtcggcaccggtttccccggcgctttcgcaggtcaccgacggcggcgacaccatcgcgtcgcgccggatcgcggtgctggccgccgacggcgtcgacgtggtgggcacgcaacgcttcaccgagctgatggagcagcgcggcgcggtggtcgaggtgctggccccggtggccggcggcacgctggcgggtgggtccggcggcgagctgcgggtggaccggtccttcacgacgatggcgtcggtgctctacgacgcggtggtggtggcgtgcggaccgcggtcggtgtcgacgctgtccgacgacggctacgccgtgcacttcgtcaccgaggcctacaaacacctcaagccgatcggcgcctacggggccggtgtcgacctgctccgcaaggccggcatcgacaaccggctcgccgaggacaccgacgtgctcaacgaccaagcggtggtcaccaccaaggccgccgccgacgagctgcccgagcgcttcgccgaggaattcgccgccgcgctcgcgcagcaccggtgctggcagcggcgcaccgacgcggtgccggcctga

SEQ ID NO: 42824 - protein, 706 aa, Mycobacterium avium subsp. paratuberculosis str. k10
MATDHTSGAPDPKQRDLESARFRRDTGYLTTQQGVRVDHTDDALTVGERGPTLLEDFHAREKITHFDHERIPERVVHARGAGAYGYFEPYDDRLAQYTAAKFLTSPGTRTPVFVRFSTVAGSRGSADTVRDVRGFATKFYTEQGNYDLVGNNFPVFFIQDGIKFPDFVHAVKPEPHNEIPQAQSAHDTLWDFVSLQPETLHAIMWLMSDRALPRSYRMMQGFGVHTFRLVNARGEGTFVKFHWKPRLGVHSLIWDECQKIAGKDPDYNRRDLWEAIESRQYPEWELGVQLVAEDDEFSFDFDLLDATKIIPEEQVPVLPVGKMVLNRNPDNFFAETEQVAFHTANVVPGIDFTNDPLLQFRNFSYLDTQLIRLGGPNFAQLPVNRPVAQVRTNQHDGYGQHTIPQGRSSYFKNSIGGGCPALADEDVFRHYTQRVDGQTMRKRAEAFQNHYGQARMFFKSMSPVEAEHIVAAFAFELGKVEMPEIRSAVVAQLARVDDQLAAQVAAKLGLPEPPEEQVDESAPVSPALSQVTDGGDTIASRRIAVLAADGVDVVGTQRFTELMEQRGAVVEVLAPVAGGTLAGGSGGELRVDRSFTTMASVLYDAVVVACGPRSVSTLSDDGYAVHFVTEAYKHLKPIGAYGAGVDLLRKAGIDNRLAEDTDVLNDQAVVTTKAAADELPERFAEEFAAALAQHRCWQRRTDAVPA

SEQ ID NO: 42825 - DNA, 1458 bp, Mycobacterium avium subsp. paratuberculosis str. k10
  CDS (1)..(1458): transl_table=11
atgacggagaatttcacgacgacgaatgcgggcgccccggcgcccagcgacgaactgtcgttgacgctgggtcccgatggcccggtactgctgcaggatttctatctcatcgagcagttggccgcgttcaaccgcgagcgggtccccgagcgccagccgcacgccaaggggaccggcgcgttcggccggttcgaggtcaccaatgacctgagcgcctacaccaaagccgcggtgtttcagccgggcaccaagaccgacgtgttcgtgcggctgtcggggaacgccggcgagcgcggcagcgccgacaccgtgcgggacacgcgcgggttttcggtgaagttctacaccaccgagggcaacttcgacctcgtcggcctcgacttcccggtcttcgtcatccgggacccgatcaagttcccgcagatggtccgctcggccaaacgccgcgcgaacaacgactgccgtgaccacaacatgcagtgggatttttggacgctctccccggagtcggcgcaccaggtggccatgatcatgagcgatcgcggtattcccaagacgtttcgtcacatgcacggcttcggcctgcacaccttcagcttcctcaacgccgccggcgagatctcgtgggtgaagtttcatttcaagtccaatcagggcatcgaatggttgacccaggaagagggcgatcggctggccggcaccgacccggactactgcatccgggatctgtacgaggcgatcgagcgcggggaccatccgagctggtcggtgaaggtgcagatcatgccgttcgaggaggccaagacgtatcggttcaacccgttcgacgtgaccaaggtgtggccgcatgccgactatccgctcatcgatctgggcaccatgacgctggaccgcaacgtcaccgaccaccacaccgaggtcgagcaggtgaccttcgcgccgcatgcgctggtgcccgggatcgggctgagcccggacaagcttttgctggggcgcagtttcgcctacgccgacgcgcaccgctaccgggtcggggccaatcacaaccaaattccggtcaacgccccgcggtgtccggtgcgcagctattccaaggacggacagatgcgcttcgtcaactccaccgacccggtgtatgcgcccaactcctacggcgggccgaaggccgatcccgaccgggcgtccgtggtgaaatgggccgtcgacggcggaatgatggtgcgcgcgccctacacgctgcgaccagacgacgacgactggggccaggccggcgccctggtgcgcgacgtgatggacgacgccgagcgggaacgactggtgcacaacatcgttcaccatgtcaccgacggcgtgaaagaacccgtgctgtcacgcgtcgtcgaatactggtacaacatcgacgccgacatcggcaagagggtggaagacggcatccgagccgccaacctcggccggtga

SEQ ID NO: 42826 - protein, 485 aa, Mycobacterium avium subsp. paratuberculosis str. k10
MTENFTTTNAGAPAPSDELSLTLGPDGPVLLQDFYLIEQLAAFNRERVPERQPHAKGTGAFGRFEVTNDLSAYTKAAVFQPGTKTDVFVRLSGNAGERGSADTVRDTRGFSVKFYTTEGNFDLVGLDFPVFVIRDPIKFPQMVRSAKRRANNDCRDHNMQWDFWTLSPESAHQVAMIMSDRGIPKTFRHMHGFGLHTFSFLNAAGEISWVKFHFKSNQGIEWLTQEEGDRLAGTDPDYCIRDLYEAIERGDHPSWSVKVQIMPFEEAKTYRFNPFDVTKVWPHADYPLIDLGTMTLDRNVTDHHTEVEQVTFAPHALVPGIGLSPDKLLLGRSFAYADAHRYRVGANHNQIPVNAPRCPVRSYSKDGQMRFVNSTDPVYAPNSYGGPKADPDRASVVKWAVDGGMMVRAPYTLRPDDDDWGQAGALVRDVMDDAERERLVHNIVHHVTDGVKEPVLSRVVEYWYNIDADIGKRVEDGIRAANLGR

SEQ ID NO: 42827 - DNA, 1434 bp, Bdellovibrio bacteriovorus HD100
  CDS (1)..(1434): transl_table=11
atgaaaaagacactcacaacatccgcaggcattcccatttctgaaaaccagcacagccttacttccggcccgcgcggcccggtggctttgcaggactatcacctgattgaaaagctcgcgcacttcaaccgcgagcgcattccagagcgcgtggttcatgccaagggctctggcgcctatggcaccttcaccgtcactcatgacatcacgcgcttcaccaaagcggcgatcttttcaaagatcggcaaaaagaccgaagccttcctgcgcttttcaactgtcgcaggagaaaaaggttccgcagataccgagcgcgacccgcgcggctttgccttaaagttctataccgaagaaggcaactgggacatcgtgggcaacaacacgccggtcttctttgaacgagatcccttgaagttcccggacttcatccactcgcagaaacgcgatccgcaaacaggatataaaaacccggtgcgtatgtgggattactggtccaaagctcctgaagctttgcaccagatcacgatcttattcagtgatcgcggaatcccagatggctatcgctttatgaatggctacggtagccacacgttcagctttatcaatgataaaaacgaacgcgtgtgggtgaagttccacttcaaatccatgcaagggatcaaaaatcttcctgtcgccaaagccgtcgaactggcgggaactgatccggattatgccggtcgcgatctattcgaggcgattgaaagaaaggaattcccacgctgggctttgaaggttcaaattatgactgaacgtcaggccgaacaattccggtttgatccgtttgatcttaccaaggtgtggccacacagcgaattcccactgttggatgtcgggattcttgagctgaacagaaatccggaaaactattttgctgaagtcgaacaagccgccttttcaccaagcaacgtcccaccgggcgtgggtttttcaccggataagatgctgcaaggacgactgttcgcctatccggatgcccaacgctatcgcctgggggtaaactatcagtacctgccagtgaatcgcccgcactcggaagtaaacagttatcaccgcgatggcagcatgagattcgacggcaacggaggaagacaggacaactatgaacccaatggttttggcggtccggtacagaacgaaagcttcaaagaccctgccttgaatttgtcaggcactctggatcgtcatgactcccacaaagacaatgacgacttcacgcaggccggaaatttgtatcgaatgctcagcgaagaagaaaaagaccgtttaacatccaacatcgcaggcacgatgaaaaccatttcagaggacctgcaaaccaaaaacatagaacacttcaagagatgcgatccggattatggcggccgcatcgccgccaaattgggattagactaa

SEQ ID NO: 42828 - protein, 477 aa, Bdellovibrio bacteriovorus HD100
MKKTLTTSAGIPISENQHSLTSGPRGPVALQDYHLIEKLAHFNRERIPERVVHAKGSGAYGTFTVTHDITRFTKAAIFSKIGKKTEAFLRFSTVAGEKGSADTERDPRGFALKFYTEEGNWDIVGNNTPVFFERDPLKFPDFIHSQKRDPQTGYKNPVRMWDYWSKAPEALHQITILFSDRGIPDGYRFMNGYGSHTFSFINDKNERVWVKFHFKSMQGIKNLPVAKAVELAGTDPDYAGRDLFEAIERKEFPRWALKVQIMTERQAEQFRFDPFDLTKVWPHSEFPLLDVGILELNRNPENYFAEVEQAAFSPSNVPPGVGFSPDKMLQGRLFAYPDAQRYRLGVNYQYLPVNRPHSEVNSYHRDGSMRFDGNGGRQDNYEPNGFGGPVQNESFKDPALNLSGTLDRHDSHKDNDDFTQAGNLYRMLSEEEKDRLTSNIAGTMKTISEDLQTKNIEHFKRCDPDYGGRIAAKLGLD

SEQ ID NO: 42829 - DNA, 1530 bp, Bdellovibrio bacteriovorus HD100
  CDS (1)..(1530): transl_table=11
atgcttaaggggtcgttcaaaattcaagaaaggatgcatgatatggctcaatcaaagaagggtttgaccaccagtgctggtgcgccggtttcagacaatcagaattcgttgacggtggggcctcgtgggccgttggtacttcaggatgtggcgctgattgaaaagctcgcgcaccaaaaccgcgagcgggtgccggaaagaacagtgcatgccaagggctccggcgcttttggcacgctgacgatcaacggagatatttccaaatacacccgcgcaaagttccttcagccgggaacaaaaacagatctgctgattcgtttttcaacggttgccggcgaaaggggcgctgcagatgctgaacgcgacgtgcggggatttgcgctgaagttttacaccgaagaaggcaactttgatttggtcggcaacaacacgccggtttttttcgtgcgtgatccttataaatttcccgacttcattcacacacaaaaacgcgatccgcgcaccaacttacgaagccccacggcaatgtgggacttctggtcactaagtcccgagtcctgccaccaggtgacaattctattctctgaccgtggtttaccggcgtcatatcggcacatgcacggatttggttcgcacacctattccctgatcaatagcaaggaggaccgtcactgggtgaagttccacttcaaaacccagcaagggatcaaaaatctgaccaatgatgaaggggcagagcttgtggggcgcacgcgcgaaagccatcaggaggatctgtacaattcgatcgaagaaaaaagctttccgaaatggcgcatgtacgtgcagatcatgagcgaagagcaggccaagaaaacctggtacaatccctttgatcttaccaaagtgtggccgcacggagagttcccgatgattgaggtgggcaccatggagctcaaccgcaatccgacaaactattttgctgaaatagagcaggcggctttcaacccgaacaacatggtaccgggtgtttcctggtcgccggacaagatgctgcagtcgcgcacttttgcgtatgctgatgcccatcgctatcgcatcggcactcactacgaaatgcttcctgtgaacaaacccaaagtggaagtgaaccactatcatctggacggggccatgcgcctggatgttcctgaatacaatcatgcctattatgaaccgaactctttcgggggacctgctcagcaggaacagtaccgggaaccgccattgaagctggatgatgccaccatggaccggtttgatcatcatcagggcaatgatgattaccgtcaggcaggggatttgttccggttgatggacgccgataaaaaaaggcagctgctggataatatcgccgaacacatgaagcgcggaaatgtgcctgaagaaatcgtacgccgtcagatcgaggtctttatgaggtgcgatcctgcttacggtagcggcttggccgagcgcatgggtgtaaaggtttattcagacaaatatgaaagtggcagtgcccatcattag

SEQ ID NO: 42830 - protein, 509 aa, Bdellovibrio bacteriovorus HD100
MLKGSFKIQERMHDMAQSKKGLTTSAGAPVSDNQNSLTVGPRGPLVLQDVALIEKLAHQNRERVPERTVHAKGSGAFGTLTINGDISKYTRAKFLQPGTKTDLLIRFSTVAGERGAADAERDVRGFALKFYTEEGNFDLVGNNTPVFFVRDPYKFPDFIHTQKRDPRTNLRSPTAMWDFWSLSPESCHQVTILFSDRGLPASYRHMHGFGSHTYSLINSKEDRHWVKFHFKTQQGIKNLTNDEGAELVGRTRESHQEDLYNSIEEKSFPKWRMYVQIMSEEQAKKTWYNPFDLTKVWPHGEFPMIEVGTMELNRNPTNYFAEIEQAAFNPNNMVPGVSWSPDKMLQSRTFAYADAHRYRIGTHYEMLPVNKPKVEVNHYHLDGAMRLDVPEYNHAYYEPNSFGGPAQQEQYREPPLKLDDATMDRFDHHQGNDDYRQAGDLFRLMDADKKRQLLDNIAEHMKRGNVPEEIVRRQIEVFMRCDPAYGSGLAERMGVKVYSDKYESGSAHH

SEQ ID NO: 42831 - DNA, 1377 bp, Bacillus cereus ATCC 10987
  CDS (1)..(1377): transl_table=11
atggatgaaaactatgataaacagaggcaatctttactagggaaagactttaatgataatgaagaacgtaatgaacaagctatacttcactctcaaacagttggttcacgtggacctgttctagagcaagatagtgtgcttcacgaggcgttacaacaatttattcacgaaaaaattttagaaagacctgttcatgtaaaaggatttggtgcatttggttattttcaaacgatctatccaatgtctgaacatacgaaactaagttttctacaacattctaatgagaaagttcctgttatggtacgattttcactagctgttagtacgaaaggaacacctgatacttctagaaatgtacgcggtttttctacaaaattttatacaaaagaaggtattttcgatctattatgtaatcacattcctgtcttttctgtacgcgatccgatgcgtttccctgaaacaattcaagcgttgtcaccttcacctaaaaataacttaatagaccctaatagattttggagctttgtcgctagagcacctgaatccatacatttcgttgtccgtttgtactctgataatggtacagccaaaagccttcgccacattccaggacatagtgtaaatacatatgtttggagaaatgcagaaggtaatcgaaagtacgtaaagtatcattggtacccatttgaaggtgtacaattcattactagcgaggaagcaaataaactggctgccgaaaaccctgattatagcgggaaagatttatatgatgcaattgcaaacggtaaaccagtggaatatggtttatatgtccagctcatggacccgaaagatgaagcgcatctttcttacgatcctttagatgatacaaaaatatgggatgaaaaagcgtatcctcttataccagtcggcaaaatggtattaaataaaaaccctgaaaattttatggaacaaatagaaaaagtcgctttctccccttctaatttacttgacggtgctgaattatcagatgataaaatgttgcaagggcgagctaacatttatagtgattcccaaagaaaaagaattggtcctgaattccgcaaattaacgattaaccaacagcaaaattggacacctgctaatcaaataacgagcggtgacggaaggtacgttgatggtaaacttgagagaacttctatatcgaaacaagatgactttacgcaggctggcgaattttatgcgacgttaaaaccgatagaaaaagaacatcttgctgaaaacttagctggtgatttgaaagttatatccgatgatattaggaaggtcgttttagagtattttcataacgtgtctgttgatttggtgaagaggattgaaaccgaaataaaaaaataa

SEQ ID NO: 42832 - protein, 458 aa, Bacillus cereus ATCC 10987
MDENYDKQRQSLLGKDFNDNEERNEQAILHSQTVGSRGPVLEQDSVLHEALQQFIHEKILERPVHVKGFGAFGYFQTIYPMSEHTKLSFLQHSNEKVPVMVRFSLAVSTKGTPDTSRNVRGFSTKFYTKEGIFDLLCNHIPVFSVRDPMRFPETIQALSPSPKNNLIDPNRFWSFVARAPESIHFVVRLYSDNGTAKSLRHIPGHSVNTYVWRNAEGNRKYVKYHWYPFEGVQFITSEEANKLAAENPDYSGKDLYDAIANGKPVEYGLYVQLMDPKDEAHLSYDPLDDTKIWDEKAYPLIPVGKMVLNKNPENFMEQIEKVAFSPSNLLDGAELSDDKMLQGRANIYSDSQRKRIGPEFRKLTINQQQNWTPANQITSGDGRYVDGKLERTSISKQDDFTQAGEFYATLKPIEKEHLAENLAGDLKVISDDIRKVVLEYFHNVSVDLVKRIETEIKK

SEQ ID NO: 42833 - DNA, 1524 bp, Eremothecium gossypii
  CDS (1)..(1524)
atggctggcaataacgacaagactaactctgcggaggtgcgggaggaccgggtggtgacgaactcggtgggtaacccgatcaacgagccgttcgcgacgcagcgggtggggcagcacgggccgctgctgctgcaggactacaacctgctggacctgctggcgcacttcaaccgggagcgggtgccggagcgcaacccgcacgcgcacgggtccggggcgttcgggtactttgaggtgacggacgacatcacggacgtgtgcgggtcggcgatgttcggagaggtgggcaagcggacgcgggcgctggtgcggttctcgacggttggcggggagaagggctctgcggacacggtgcgggacccgcgggggtttgcggttaagttctacacggaggaggggaacctggactgggtgtacaacaacacgccggtgttcttcatccgggacccgtcgaagttcccgcacttcatccacacgcagaagcgcaacccgcggacgaacctgaaggacgcgaacatgttctgggacttcctgacgacgccggagaaccaggtggcgatccaccaggtgatgatcctgttctcggaccggggcatccctgcgtcgtaccggcacatgaacgggtactcggggcacacgtacaagtggtcgaacaagcagggcgactggcgctacgtgcaggtgcacattaagacggaccagggcatcaagaacctgaccgcggaggagggcgcgaagctcgcgggcgaggacccggacttctgccagcaggacctggtccaggcgctggagcgcggcgagtacccttcgtggacggtgtacatccagacgatgacggaggagcaggcgcagaagctgcccttctcggtgttcgacctgacgaaggtgtggccgcacaaggactttccgctgcgccgcgtgggccgtctcgtgctcaacgaggtgcccaccaacttcttcgcgcagatcgagcaggccgcgttctcgccggcgacgaccgtgccgtaccaggagcccagcgcggaccccgtgctgcaggcgcggctcttctcctacgcggacgcgcaccgctaccgcatcgggcccaactaccaccaggtgccggtgaactgcccctacgcctcgaagttcttcaaccccgcgatccgcgacgggcccatgaacgtcgacggcaacctcggcagcgagcccaactacctggccaccaacaacaattaccgcttcctcggcgccgaccgcccgatccagcagcaccaggagacgtggcagggccccgcccagcccgtgcactgggccaccaccggcgacatcgacttcgctcaggccaccgcgctctaccacgtgcttggccgcacccccggccagcagcgcaacctggcccacaacgtggccatccacgtcgccagcgcggacccgccgatccaggagcgcgtcttccagatgttctcccgtgtcgacaagggcctcggtgaggccatccgctctgaggccaccgccctcagccagaagaagcccaagttgtaa

SEQ ID NO: 42834 - protein, 507 aa, Eremothecium gossypii
MAGNNDKTNSAEVREDRVVTNSVGNPINEPFATQRVGQHGPLLLQDYNLLDLLAHFNRERVPERNPHAHGSGAFGYFEVTDDITDVCGSAMFGEVGKRTRALVRFSTVGGEKGSADTVRDPRGFAVKFYTEEGNLDWVYNNTPVFFIRDPSKFPHFIHTQKRNPRTNLKDANMFWDFLTTPENQVAIHQVMILFSDRGIPASYRHMNGYSGHTYKWSNKQGDWRYVQVHIKTDQGIKNLTAEEGAKLAGEDPDFCQQDLVQALERGEYPSWTVYIQTMTEEQAQKLPFSVFDLTKVWPHKDFPLRRVGRLVLNEVPTNFFAQIEQAAFSPATTVPYQEPSADPVLQARLFSYADAHRYRIGPNYHQVPVNCPYASKFFNPAIRDGPMNVDGNLGSEPNYLATNNNYRFLGADRPIQQHQETWQGPAQPVHWATTGDIDFAQATALYHVLGRTPGQQRNLAHNVAIHVASADPPIQERVFQMFSRVDKGLGEAIRSEATALSQKKPKL

SEQ ID NO: 42835 - DNA, 1551 bp, Neurospora crassa
  CDS (1)..(1551)
atgtcttcaaacgacgcaccggtttacacacttgccgagggacgccccgtccaggacccttcggctgccacggtcctgatgggctcgaagcctcgtggcggagccctctctctcctcgcagacacccagctgatcgaaaccctcgcccacttcccccgagaacgcatccccgaacgtgtcgtccacgccaaggcagccggtgcctggggagagtttgagtgcacggaagatgtctcggactttacatctgttgactttctcaacaaggtcggaaagaagaccaaggtcctggcccgtatttccacggtggcgggtgagaagggctctgccgatacggttcgtgatatccgcggtttcgccgtcaagttcttcaccgaggaaggcaactgggactttgtcggcaatgacctgcccgtcttcttcatccgcgatcccgtcaagttccccagtctcaaccgctcccacaagcgtcacccccagaccaacgtgcccgactcgaccatgttctgggacttccacaacaacaaccaagaaggcgtccactgcttgatgcagctctttggcggccgtggcatccccgcctctctccgcaatgtcaacgcctttggcaaccacacctacaagttcggcaagcccgaggacggcacgttcaagtacgtcaagatccacttgaagcccgacgccggcatcaagaacctcgagtccgacgaagccctccgcctggctggcgaggaacccgatttccacatcaaggacatgtacaatgccatcgagcgcggcgactaccccacctggaccatgtacttccagatcatggaccccaaggacgccgaaacctaccggtacaacatctttgacattacgcagacctggtcgcatcgggactatcccctgcgtcccatcggtaaactcaggcttaacaagaacccggaaaaccacttccaggatatcgagcaagccgccttctccccctccaccatggtccctggcatcggccctagcgccgaccccatgctccaggctagaatgttctcctaccctgatgccgcccgctaccgtgtcggacccaactaccaacaactcccttgcaaccgcgccttgcacgtctattctccgtaccagcgtgacggtccaatgcgcgtagacggcaactatggtggcgacccggattatgtgcggtcttccttccgtcccatgcgtttcggtccccctgacgtcgctcacgacgagtgggccggtaaggttgccttgttcacctcggaagtgaccgacctcgatttcgagcagccgagggatctgtggaagatctttaaggagaccggagaagacaagcggtttgccaagaacgtggcggcgcatgtgggcaaggcgttgccggaggtgcaaaagaagacaatcgagatgtttagtaaggttgatcaggaggtgggcgaggctatccaaagagagttggatgagcttgagaagaagggcggtgcgggcattgagcatgacaaggcgccggtgaaggggaagggcatgaggtgtaaggattcgaaggatgatgagtga

SEQ ID NO: 42836 - protein, 516 aa, Neurospora crassa
MSSNDAPVYTLAEGRPVQDPSAATVLMGSKPRGGALSLLADTQLIETLAHFPRERIPERVVHAKAAGAWGEFECTEDVSDFTSVDFLNKVGKKTKVLARISTVAGEKGSADTVRDIRGFAVKFFTEEGNWDFVGNDLPVFFIRDPVKFPSLNRSHKRHPQTNVPDSTMFWDFHNNNQEGVHCLMQLFGGRGIPASLRNVNAFGNHTYKFGKPEDGTFKYVKIHLKPDAGIKNLESDEALRLAGEEPDFHIKDMYNAIERGDYPTWTMYFQIMDPKDAETYRYNIFDITQTWSHRDYPLRPIGKLRLNKNPENHFQDIEQAAFSPSTMVPGIGPSADPMLQARMFSYPDAARYRVGPNYQQLPCNRALHVYSPYQRDGPMRVDGNYGGDPDYVRSSFRPMRFGPPDVAHDEWAGKVALFTSEVTDLDFEQPRDLWKIFKETGEDKRFAKNVAAHVGKALPEVQKKTIEMFSKVDQEVGEAIQRELDELEKKGGAGIEHDKAPVKGKGMRCKDSKDDE

SEQ ID NO: 42837 - DNA, 2232 bp, Magnaporthe grisea 70-15
  CDS (1)..(2232)
atggcgtccttaaaagatatcggggacaccctcagcaagggcaagtcatacgtcatgcattcacagggcgacaagatttccgacctcgcgaggaatacagtgaccccggacgagaagggaagacagaccacagacgccggtgtcaggattaccaaccctgatgactggctgcgcgtcaccagcaacgaccaaataggcccctcgctgcttgaggaccagattgctcgcgagaagattcacaggttcgaccatgagcgtattcccgagagagtggtgcacgcccgcggcactgcggcacacggaaagttcactctgcacaagagcatcgagcacttgaccacagctggcgtgcttacagacacatcgcgtgagacacctgttttcttgcgcttttcgaccgttctgggcagccgaggcagcgccgacacagtccgtgacgttcgtggtttcgccgtcaagttttacacgcccgaaggcaactgggatatcgtcggaaacaacattccagtcttcttcatccaggactcgatgaagttccccgatgtcatccacgccggcaagcccgagccagacaacgaggtccctcaggcccaatccgcacacaacaacttctgggacttcatgtaccagcactccgaggccacccacatgttcatgtgggccatgtcggaccgcaccatcccgaggtcgtaccgcatgatgcaaggttttggtgtcaacacctacaccctcatcaacgccaagggagagcgtcactttgtcaagttccacttcaccccggaacttggcgtacacagcttggtctgggacgaggccctcaagcttgccggtcaggaccctgacttccaccgcaaggatctgatggaggccatcgcaaacggtgcattcccacgctggaagtttggtgtccaggttcttcccgagtcgcgcgagcacgagtttgactttgacattctcgacgccaccaaggtttggcccgaggacctcatccccgtcgactacatcggcaccctcgagctcaaccgcaacatcgacgagttcttccccgagacggagcaggttgcctactgcaccagccacgtcgtgcctggtatcggcttttcggacgatccgctcctgcagggtcgcaacttcagctatttcgatacccagatctcacgtcttggcatcaactgggaggagctgcccatcaacaggccagtttgcccggtgctcagcttcaaccgtgacggccagagccgccacaccatcaccaagggcaaggtcaactactggcccaaccgttttggcgtaaatgcgccagccgatggtgtcaaggagggtggatatgtcgagcacgccaccaaggtccagggcatcaaggcgcgcaccaagagcgccaagttcctcgaccacatctcgcaggctcagcttttcttcaacagcatgtctgatgttgaaaagcgccacatgctggccgccttttcgtttgagcttgaccactgcgaagaggaggttgtgtacaacaacctcgtctcgcgtctgactcagattgacatcggcctcgcccagcaggtggccgagatggtcggtgctcaaatcccggacaaggcgaccaaggaaaacaagggtatcaaggccaagggcttgagccagttcgacttcttgcccgagaatcccaccattgcatcacgcaaggtcgccattctgatcgccgacggctacgactcggttcagttccgcgctgtcaaggccgccctctcggctgcccaggctattccgctcgtgatcgcgccccgacgttcgcccatctacgctgctggcgagaccaagggctccagtggtgccggtctcaaacccgaccaccacctcgagggcttccgaagcaccatggtggacgccgtgtacgtgcccggcggcgctgagtcaatcaagacattgtccaagaacggacgtgccttgcattacgttcgcgaggcatttggtcacctgaaggccattggagcgtcgggcgagggtgtggagctcgtcaaactggctgtgacgcttccggaagtcactgtgtcaagcgcagacgtgatggagtcgtacggcgttgtcactgtcaggaatgttcaggctgacagcttgaaggaggttgtcgacctggcaaagggtggaaaggactttttggatcagttcttccacagcattgcaatgcacaggaactgggcacgtgaggcggatggattgaactcccaggtggcgtactaa

SEQ ID NO: 42838 - protein, 743 aa, Magnaporthe grisea 70-15
MASLKDIGDTLSKGKSYVMHSQGDKISDLARNTVTPDEKGRQTTDAGVRITNPDDWLRVTSNDQIGPSLLEDQIAREKIHRFDHERIPERVVHARGTAAHGKFTLHKSIEHLTTAGVLTDTSRETPVFLRFSTVLGSRGSADTVRDVRGFAVKFYTPEGNWDIVGNNIPVFFIQDSMKFPDVIHAGKPEPDNEVPQAQSAHNNFWDFMYQHSEATHMFMWAMSDRTIPRSYRMMQGFGVNTYTLINAKGERHFVKFHFTPELGVHSLVWDEALKLAGQDPDFHRKDLMEAIANGAFPRWKFGVQVLPESREHEFDFDILDATKVWPEDLIPVDYIGTLELNRNIDEFFPETEQVAYCTSHVVPGIGFSDDPLLQGRNFSYFDTQISRLGINWEELPINRPVCPVLSFNRDGQSRHTITKGKVNYWPNRFGVNAPADGVKEGGYVEHATKVQGIKARTKSAKFLDHISQAQLFFNSMSDVEKRHMLAAFSFELDHCEEEVVYNNLVSRLTQIDIGLAQQVAEMVGAQIPDKATKENKGIKAKGLSQFDFLPENPTIASRKVAILIADGYDSVQFRAVKAALSAAQAIPLVIAPRRSPIYAAGETKGSSGAGLKPDHHLEGFRSTMVDAVYVPGGAESIKTLSKNGRALHYVREAFGHLKAIGASGEGVELVKLAVTLPEVTVSSADVMESYGVVTVRNVQADSLKEVVDLAKGGKDFLDQFFHSIAMHRNWAREADGLNSQVAY

SEQ ID NO: 42839 - DNA, 2184 bp, Magnaporthe grisea 70-15
  CDS (1)..(2184)
atgcctcgctcgtctatgttaggactatgggcaagcctagtctggattgcccaggccggctgcccctatgcagacccagcagccttgcgtcctcgagaggagcacacggatgattatctagcacaattctcggttgatgaccaggacaagtttcttacatccgacgttggaggtccaataggggatcaaagaagtctgaaggctggtgcgcgaggctcgacgcttcttgaggactttgtctttcgtcagaaaataacacatttcgatcatgagcgtgttccagaacgcgccgtccatgccaggggcgcaggcgctcacggcaccttcacaagctatggtgactttagcaacatcacctcggcatcgtttctgaactctgctggcaagcggactccggtgtttgtgcgcttctctaccgtggctggctcgagaggtagtgcggatagcgccagggatgtgcacgggtttgccacgagattctataccgacgagggcaattttgatattgttggaaacaatgtacctgttttcttcatacaggacgctatacaatttcctgatttggttcatgccgtcaaacccagcccagacaaggagataccaactgcagcgaccggtaagcgcccagactacaagcctaatcctgatgccactcatgattcggcttgggactttttcagtcaacaatcaagttcattacatgctcttttctgggccatgtcaggctatggaattccacgatcgtatcgtcacatggatgggttcggagtccatacgttccgcatggtcgccgacaatggcgagtcgagattggtcaagtttcacttcaagaccaagcagggcaaagcaagcctgatttgggaagaggcccaagtcctgtccggcaagaaccccgactttcaccggcaagatctttgggatgctatcgaggctggccacggtcccgaatgggagtttggagtccaggttgtcaacgaggaggatgccctgaggtttggcttcgatatgctcgatccgacaaagatcctcccagaggatcttgtgcctgttcatcctctagggcttctcaagcttgatcggaatcccatcaactatttcgccgagacggagcaaatcatgtttcaacctggacacctcgtcaggggtatcgacttcaccgaggatcctcttcttcagggccgggtgttttcataccttgatactcagctcaaccgccacaatggacccaactttgagcaacttcccatcaacagaccaagggtcaccgtccacaacaataatcgcgacggttcagggcagaattttattcacaagaacatccatccttatacacccagtgccctgaatgagttcccgaaacaggccgatgacgaccaaggcagaggcttcatgaccgctcctcggcgcaggacccaggacgcagcgcttgttcgtgagctctccgagacttttgatgaccactggacgcagccgcgtttgttttggaacagcatcacgcccgccgagcagcagattttggtcaacgcgatacgatttgagactagcaacatcgtgaacacgcacgtcaggcagaaagtccttcagcagctcaaccgcattagcgacgaactggcagggcgtgttgctcaagcactcggcatggaggcgcccgctcccgagccagctttctaccacgaaaataccactataggcttgtcaattttcggcatcaagctgcccacgatcaagacgctcagggtgggcgtccttgccagcaccggaaacgtcgcgtcgctctcgcaggcagctgacctcaaggcccgattcatgggcgatggtgtcgcggtcgcggtgctaggcgaaacacaggttgaaggtgtcgacgtcacctactcacaatccgatgctacagtctttgatggcatcatcattgcggccggtgccgagggtcttgtcgccaaggatgcaccggcgtcggcactctttcccataggcaggccacagcaactcgtcgttgacagcttcagatggggcaagcctattggactggccgcagcttcggacgactcggcgaacattttcagcagcctaggaacgactggccctggtgtctttagtggcgatgacctcggtgtgctggtcaccgatttcaaggaggggctgtcgacatataagtttgttgagaggttcccgatggactcgtga

SEQ ID NO: 42840 - protein, 727 aa, Magnaporthe grisea 70-15
MPRSSMLGLWASLVWIAQAGCPYADPAALRPREEHTDDYLAQFSVDDQDKFLTSDVGGPIGDQRSLKAGARGSTLLEDFVFRQKITHFDHERVPERAVHARGAGAHGTFTSYGDFSNITSASFLNSAGKRTPVFVRFSTVAGSRGSADSARDVHGFATRFYTDEGNFDIVGNNVPVFFIQDAIQFPDLVHAVKPSPDKEIPTAATGKRPDYKPNPDATHDSAWDFFSQQSSSLHALFWAMSGYGIPRSYRHMDGFGVHTFRMVADNGESRLVKFHFKTKQGKASLIWEEAQVLSGKNPDFHRQDLWDAIEAGHGPEWEFGVQVVNEEDALRFGFDMLDPTKILPEDLVPVHPLGLLKLDRNPINYFAETEQIMFQPGHLVRGIDFTEDPLLQGRVFSYLDTQLNRHNGPNFEQLPINRPRVTVHNNNRDGSGQNFIHKNIHPYTPSALNEFPKQADDDQGRGFMTAPRRRTQDAALVRELSETFDDHWTQPRLFWNSITPAEQQILVNAIRFETSNIVNTHVRQKVLQQLNRISDELAGRVAQALGMEAPAPEPAFYHENTTIGLSIFGIKLPTIKTLRVGVLASTGNVASLSQAADLKARFMGDGVAVAVLGETQVEGVDVTYSQSDATVFDGIIIAAGAEGLVAKDAPASALFPIGRPQQLVVDSFRWGKPIGLAAASDDSANIFSSLGTTGPGVFSGDDLGVLVTDFKEGLSTYKFVERFPMDS

SEQ ID NO: 42841 - DNA, 2217 bp, Gibberella zeae PH-1
  CDS (1)..(2217)
atgaccgagcaagttacaggagctatcaagcacgcagtcatgggtcacaagaacgacaagattgaccagctcaaggccaacatggtcgagcctaatgagaactcccgaatcacctccgattatggtgtcaagcagaacaacaccgatcaatggctgcgcgtagcgagtgaagaccagactggtccctcgctgttggaagatgctttcggccgagagaagatccaccgatttgaccacgagcgcatccccgagcgtgttgtccatgcccgcggtgctggcgcccacggtacctttagactcttcgagtcagccgccgatgttaccaaggctggcctctttaccgacacatctagggaaacacccgtctttgttcggttctcgactgttcttggaagtcgcggctctgccgacactgtccgcgatgtccgcggtttcgccatcaagttctacacccaagaaggcaacttcgatatccccgggaacaatatccctgtcttctttatccaggatgctatgaagtttcccgatgttattcatgctggaaagccagaaccaaacaacgaggttcctcaagcgcagactgcacacaacaacttctgggatttcatgtttgagcacccagaggcgactcacatgcacacatgggccatgtctgaccgaacaattccccgatcctaccgcatgatgcaaggtttcggtgtcaacacctacactctcgtcaacgagaagggcgagcgccggtttgtcaagttccactggacgcccgagcttggagtccactcacttgtctgggatgaggccctcaagcttgctggtcaagaccctgacttccaccgcaaggaccttcaggaggctatcgagaacggcgcttttcccaagtggaagtttggtatccaggttttggacgagtctcaggagcacgactttgactttgatatcctcgatgccaccaaggtttggcctgaggacctcatccccgtccgatacattggtgagcttgagctgaaccaaacagtcgatgagtacttcacccagaccgagcaggttgctttctgcactagtcaccttgttcctggtattggacactcagacgaccctcttctccagggccgaaacttctcttaccaagatactcagctcagccgactgggaaccaactgggaagagctccccatcaacaagccagtctgtcctgtcatgaactttaaccgtgatggtgccatgcgacacaccatcaccaagggcaaggtcaactactggcccaaccgtttcagtcatcagcctcctgccacagaaagcgagggtgcctacgtcgattacgctgcaaagattgtcggcatgaagcagcgaacactaagcaagaagttcaaggaccacttcacccaagctcagcttttctacaactctctttccgagattgagaagtctcacgtccaagctgcctactcctttgagttggaccactgtgacgaagctatcgtctacgagcgtttgacggaacgcctcggtgaaatcgatggcgatcttgccaacactattgccgagatggttggtggcaagaagcctgccaaccccaagcccaatgccggaaagaaggccaagaacctgagccaacttgactttgtccctgagactcctaccatcaagtctcgacgaattgctatcatcattgctgacggctacgaccctgtcgcctttaacgcgatgtacggtgccatcaaggctcagagcgctctcccctttgtcattgctccccgccgagcacccatcttctctgccgctgaggattcatcttcgtcaaagggcatcttccccgaccatcatctcgagggacagcgttctaccatgttcgacgccatctttgtccccggcggtgccaagtccatcgagactctgtccaagaatggccgtgccctgcactacattcgcgaagcctttggtcacctcaagaccattggcggcactggcgaggccgtcgagtttattaacaaggcgatccagctttctgaggtggctctgtcctctactgacggcagtggtgtcgttgacagctacggtgtcgttactctcaaaaatgcttcgcctgacaccctcaaagagattgccaccgttgcttccgacgccaagggattcctggagaagtttgtctacaatgtcagctgccatcgcaactggcagcgagagctggatggtctcagcaccatggtggcgtactaa

SEQ ID NO: 42842 - protein, 738 aa, Gibberella zeae PH-1
MTEQVTGAIKHAVMGHKNDKIDQLKANMVEPNENSRITSDYGVKQNNTDQWLRVASEDQTGPSLLEDAFGREKIHRFDHERIPERVVHARGAGAHGTFRLFESAADVTKAGLFTDTSRETPVFVRFSTVLGSRGSADTVRDVRGFAIKFYTQEGNFDIPGNNIPVFFIQDAMKFPDVIHAGKPEPNNEVPQAQTAHNNFWDFMFEHPEATHMHTWAMSDRTIPRSYRMMQGFGVNTYTLVNEKGERRFVKFHWTPELGVHSLVWDEALKLAGQDPDFHRKDLQEAIENGAFPKWKFGIQVLDESQEHDFDFDILDATKVWPEDLIPVRYIGELELNQTVDEYFTQTEQVAFCTSHLVPGIGHSDDPLLQGRNFSYQDTQLSRLGTNWEELPINKPVCPVMNFNRDGAMRHTITKGKVNYWPNRFSHQPPATESEGAYVDYAAKIVGMKQRTLSKKFKDHFTQAQLFYNSLSEIEKSHVQAAYSFELDHCDEAIVYERLTERLGEIDGDLANTIAEMVGGKKPANPKPNAGKKAKNLSQLDFVPETPTIKSRRIAIIIADGYDPVAFNAMYGAIKAQSALPFVIAPRRAPIFSAAEDSSSSKGIFPDHHLEGQRSTMFDAIFVPGGAKSIETLSKNGRALHYIREAFGHLKTIGGTGEAVEFINKAIQLSEVALSSTDGSGVVDSYGVVTLKNASPDTLKEIATVASDAKGFLEKFVYNVSCHRNWQRELDGLSTMVAY

SEQ ID NO: 42843 - DNA, 2151 bp, Gibberella zeae PH-1
  CDS (1)..(2151)
atggtgtcttctaagcttcttgttgttcttggacttgccagcctaaccgctgcacaatgtccctacgccgacccggccaaactagcagctagagatgaaggaagttctcgtgaacatctcaaggactatgaagtcgatgatagtaaggggcatatgagttccgatgctggtggcccctttgaggaacaggagagtttaaaggcaggagaacgaggccctactctgctcgaagactttatcttccgccaaaagatcacacatttcgatcacgaacgggtccctgaaagagccgtccacgcccgaggtgctggggctcatggttacttcaagagctacagtgactggagcaacatcacagcagcttctttcctcagctcaaaagacaaaaatactcccgtctttgtgcgcttttcgaccgttgctggttctagaggtagcgccgatactgtgcgagatgtgcacggattcgctacccgattctacacagatgctggcttatttgacattgtgggcaacaatatccctgtattctttattcaagatgcaattcagttcccagacctcatccacgctgttaagccatcccctgacagtgagatcccgcaagccgccacagctcacgactcagcatgggactttttcagtcagcaaactacaaccctacacactctattctgggccatggcaggatatggaattccacgttcgtttcgtcacgtagatgggttcggtgttcacactttccgtctagtgactgatgagggtgacaccaagttcgtcaagtggcactggaagagcaagcagggcaaagcgagcctagtatgggacgaagcacagcacctggccggaaagaacgccgattatcatcgtgctgatctctggaatgccattgagtctggtaacgggcctgaatgggaactcaatgcccagatctttgacgaggaccaggctctggcgtttggatttgatgttctggacgctaccaaaatcattcctgaagagctagctcctctccagcctattggtgttatgaagttggacacaaaccccgtcaactatttcgctgagactgagcaggtcatgttccaacctggccacattgttcgcggtatcgactttaccgaagatcctctgctgcagggacgtatcttttcttaccttgatacccaactcaaccgtcacggtggtcccaactttgagcaactccccatcaaccgtcctctgtctcctatccataacaacaaccgtgatggagccgggcagaactttatccacaagaatactgctgcttctgactctctagacacccctaatactctaaacaagggctaccctgttcaggcaaaccagacacaaggaaaaggcttctttactgcccctggccgcaaggtttctggaaacctggtgcgcgccagagcatccaccttctctgaccactggagccagccacgactcttctacaactctctgaccaaagtagagcagcagtttctcatcaacgccatacgtttcgagacaagtcagctcatgtctgaaactgtccagaagaacgttctctaccagctgaacaaaatcagccacgatattgctgtcagagttggcagggctttgggtctcaaagctcctgaggctgacgacaagtactaccacgacaataccacagccggaatctccatttttggaaccaagttgccaagcattgcaacgctctctgttggtgtcttggtttctatcaactctaataactccatccaacaagccaaggctctcaagaaggcacttggcgaggacaaggtgaccgtgtcgattataggcgaagttcttggagacgatgttgaagttacttacagtgctgcaactgccgctcaatttgatagtgtcgttgttaccagcggtactgagtctcttttcaacggcaccggaaagtcaactctattccctcctggccgtcctacgcagattattgtggacggttatcattggggcaagcctgttggatttattggaggtgcaaaggcggcagctcaggctgcgagagttagtaaaggaaaaggagtgtactttccgaagaacgttaactctttggttgaagatttaaaggatgggttggctactttcaagttcactgaccgattccccctggaccactaa

SEQ ID NO: 42844 - protein, 716 aa, Gibberella zeae PH-1
MVSSKLLVVLGLASLTAAQCPYADPAKLAARDEGSSREHLKDYEVDDSKGHMSSDAGGPFEEQESLKAGERGPTLLEDFIFRQKITHFDHERVPERAVHARGAGAHGYFKSYSDWSNITAASFLSSKDKNTPVFVRFSTVAGSRGSADTVRDVHGFATRFYTDAGLFDIVGNNIPVFFIQDAIQFPDLIHAVKPSPDSEIPQAATAHDSAWDFFSQQTTTLHTLFWAMAGYGIPRSFRHVDGFGVHTFRLVTDEGDTKFVKWHWKSKQGKASLVWDEAQHLAGKNADYHRADLWNAIESGNGPEWELNAQIFDEDQALAFGFDVLDATKIIPEELAPLQPIGVMKLDTNPVNYFAETEQVMFQPGHIVRGIDFTEDPLLQGRIFSYLDTQLNRHGGPNFEQLPINRPLSPIHNNNRDGAGQNFIHKNTAASDSLDTPNTLNKGYPVQANQTQGKGFFTAPGRKVSGNLVRARASTFSDHWSQPRLFYNSLTKVEQQFLINAIRFETSQLMSETVQKNVLYQLNKISHDIAVRVGRALGLKAPEADDKYYHDNTTAGISIFGTKLPSIATLSVGVLVSINSNNSIQQAKALKKALGEDKVTVSIIGEVLGDDVEVTYSAATAAQFDSVVVTSGTESLFNGTGKSTLFPPGRPTQIIVDGYHWGKPVGFIGGAKAAAQAARVSKGKGVYFPKNVNSLVEDLKDGLATFKFTDRFPLDH

SEQ ID NO: 42845 - DNA, 1506 bp, Aspergillus nidulans FGSC A4
  CDS (1)..(1506)
atgggccaaaacgacgaccaaaagacgtaccgctacaatgaaagcccggtttataccacttccaatggctgtcctgtgatggacccgcaagcttcgcagcgagtagggcccaacggacctctcctcctgcaagacttcaaccttatcgaccttctcgcccactttgaccgtgagcgcattcccgagcgagtggtccatgccaagggtgcaggcgcctacggcgagttcgaagtcaccgacgacatcagcgatatcaccgtcatcgacatgctcaagggcgtcggcaagaagactaaaacctttgtccggttctcaaccgttggaggcgaaaagggctcccctgacagtgcccgcgaccctcgaggctttgcctgcaagttctatactgaggagggcaactgggactgggtcttcaacaacacccccgtcttcttcctccgtgaccctagcaaattccccatgttcatccacacccagaagcgtaatccacagacaaacctgaaagacgccaccatgttctgggactacctttccacccaccaggaggccgttcaccaggtcatgcacctcttttcagaccgcggcactccctactcctaccgtcacatgaacggctactccggtcacacctacaaatggatcaagcccgatggcactttcaactatgtccagctgcacctcaaaacagaccagggcaacaagacgttcacggacgccgaggccacgcgcctggccgccgagaaccctgactggcacactcaggacctcttcaatgccattgcccgcggcgaatacccctcatggacctgctatgttcagaccctgtcaccagagcaagccgagaagttccgctggaacattttcgacctgaccaaggtctggccgcaatccgaagttcccctccgccgcttcggccgcttcacccttaacaagaatcccgagaactacttcgccgaagttgagcaagccgccttctctccctcccaccttgtccccggcgtcgagccctccgccgatcccgtcctccaagcccgcctcttctcttacccggacacccaccgtcaccgcctcggcacgtcgaactatcaatccattcccgtcaactgccccctgcgcgcattcacgcccttccaccgcgacggcgcaatgagcgtgaatggcaaccatggcgcgaatcccaactacccatcgaccttccggccgctgcagtacaagcccgttaaggcgtcccaggagcacgagaagtgggctggctcggtagtaaccgagcagctgcctgttactgatgaggactttgttcaggccaatgggctctggaaagtccttggtcgccagccgggacagcaggagaattttgtgggtaatgttgcgggacacctctgcaatgctcaccctagggtccgccaggcgacatatggcatgttccgccgtgtgaatgctgaccttgggaagaggattgaaaaagccactgagaaaaaagctactgaggccagggctcgtttgtag

SEQ ID NO: 42846 - protein, 501 aa, Aspergillus nidulans FGSC A4
MGQNDDQKTYRYNESPVYTTSNGCPVMDPQASQRVGPNGPLLLQDFNLIDLLAHFDRERIPERVVHAKGAGAYGEFEVTDDISDITVIDMLKGVGKKTKTFVRFSTVGGEKGSPDSARDPRGFACKFYTEEGNWDWVFNNTPVFFLRDPSKFPMFIHTQKRNPQTNLKDATMFWDYLSTHQEAVHQVMHLFSDRGTPYSYRHMNGYSGHTYKWIKPDGTFNYVQLHLKTDQGNKTFTDAEATRLAAENPDWHTQDLFNAIARGEYPSWTCYVQTLSPEQAEKFRWNIFDLTKVWPQSEVPLRRFGRFTLNKNPENYFAEVEQAAFSPSHLVPGVEPSADPVLQARLFSYPDTHRHRLGTSNYQSIPVNCPLRAFTPFHRDGAMSVNGNHGANPNYPSTFRPLQYKPVKASQEHEKWAGSVVTEQLPVTDEDFVQANGLWKVLGRQPGQQENFVGNVAGHLCNAHPRVRQATYGMFRRVNADLGKRIEKATEKKATEARARL

SEQ ID NO: 42847 - DNA, 2235 bp, Aspergillus nidulans FGSC A4
  CDS (1)..(2235)
atggctactagtatcaccgccggcctacaaaaggcccagcaagcagtgcaggacactgccaccaagaacaagaagattgtcgatattagccacgacacagtaaatgtccacacagaccaggagcagcgaacagattttggtgtcgcgatcaccgaccctgatcactggctgcgcgtcaccaacgagacgcactcgggcccctcgctgctagaagaccacatcgcgcgagagcgcatccatcgtttcgaccacgagcgcatccctgagcgcgttgttcatgcccgtggaacgggcgcctacggcaatttcaccctcaaggagagcatcgaagatttgacctatgctggagtgttaacggatacttcgcgcaacaccccggtgttcgtgcgtttctctactgtccagggcagccgggggagtgctgataccgttcgcgatgttcgcgggttcgctgtcaagttctacactgacgagggaaattgggatattgtcggcaacaacatccccgtcttcttcattcaggatgccatcaagttccctgactttgtccacgctgtcaagcccgagcctcacaacgaagtgccccaggcccagacggcccataacaatttctgggactttgtgtacttgcaccccgaagccacgcacatgttcatgtgggcgatgtctgaccgcgccatcccgcggtcctaccgtatgatgcagggtttcggtgttaacacgttctcgctggtcaacaaggagggtaagcgccactttgtcaaattccactggatccctcacctcggagtgcactcgctcgtctgggacgaggccctgaagctggcgggacaggatcccgacttccaccgcaaggacctgatggaggccatcgataacaaggcctatcccaagtgggactttgccatccaggccatccccgaggaggaccaggacaagttcgagtttgacatcttcgatgccaccaaggtctggccggaagagcaggtgcccctgcgtgtggtcggcgagctcgaactgaaccgcaacatcgacgagttcttccccgagactgaacaggtcgccttctgcactagccatatcgtgcctggtatcgacttctctgacgacccgcttctccagggccgcaacttctcatatcaggatacacaaattagtcgtctgggtgtgaactgggaagaaatacccatcaaccgacctgtctgcccgttcctcaaccataaccgggacggagctaaacgccaccgcatcaccaagggcacggtgaactattggcccaaccgcttcgaggccaaccctccagctagcgacaagggcttcaagtcgcacccagccccgattacaggccgcaagcgccgcgatctcacacccaagttcaaggaataccacaaccaggcgcagcttttctataactccctctccgaagtcgagaaggtgcacgtcaagaaggccttttccttcgagcttgaccactgtgacgacccgatcgtttacgagcggctcgcaggccagcgcctcgcagagatcgatctccccctggctcaagccgtggccgagatggtcggcgcgcccatccccacgaaggcactgcgtgataaccacggcaagacctccgtccgtctctcccagttcgacttcactcctaaggctcctggcattatcagccgtcgcattgccatcatcatcggtgacggctacgacaagatcgccttcaatggcatgaaggccgctattctcgccgcgcaagcgctccccttcgtcattggcaccaaacgctccgccatctacgcacagggcgaggataagaatagctctaagggtgtgattcccgaccacatgtatgacggcatgcgctccaccatgttcgacgcgaccttcatccccggcggctcgcacattgagactctccaaaagaacggccagattcggtactggattgccgagacattcgggcacctcaaggcgctcggtgccatgggcgaagccgcgcagctggtcaaggaagttctgggcaatgtgatgggcgtccaaattgccggtgcggactctgctgagcccgtcgaatggtatggtgttgttacagctcgtggaccagagagcgccgagagcctcagtgagggcttcaaggtgctcaaggacgccggtgatttcacaagcaagttcttttaccagatcagtcagcaccgcaactggcagcgtgagttggatggattggcttcgacggttgcgttctaa

SEQ ID NO: 42848 - protein, 744 aa, Aspergillus nidulans FGSC A4
MATSITAGLQKAQQAVQDTATKNKKIVDISHDTVNVHTDQEQRTDFGVAITDPDHWLRVTNETHSGPSLLEDHIARERIHRFDHERIPERVVHARGTGAYGNFTLKESIEDLTYAGVLTDTSRNTPVFVRFSTVQGSRGSADTVRDVRGFAVKFYTDEGNWDIVGNNIPVFFIQDAIKFPDFVHAVKPEPHNEVPQAQTAHNNFWDFVYLHPEATHMFMWAMSDRAIPRSYRMMQGFGVNTFSLVNKEGKRHFVKFHWIPHLGVHSLVWDEALKLAGQDPDFHRKDLMEAIDNKAYPKWDFAIQAIPEEDQDKFEFDIFDATKVWPEEQVPLRVVGELELNRNIDEFFPETEQVAFCTSHIVPGIDFSDDPLLQGRNFSYQDTQISRLGVNWEEIPINRPVCPFLNHNRDGAKRHRITKGTVNYWPNRFEANPPASDKGFKSHPAPITGRKRRDLTPKFKEYHNQAQLFYNSLSEVEKVHVKKAFSFELDHCDDPIVYERLAGQRLAEIDLPLAQAVAEMVGAPIPTKALRDNHGKTSVRLSQFDFTPKAPGIISRRIAIIIGDGYDKIAFNGMKAAILAAQALPFVIGTKRSAIYAQGEDKNSSKGVIPDHMYDGMRSTMFDATFIPGGSHIETLQKNGQIRYWIAETFGHLKALGAMGEAAQLVKEVLGNVMGVQIAGADSAEPVEWYGVVTARGPESAESLSEGFKVLKDAGDFTSKFFYQISQHRNWQRELDGLASTVAF

SEQ ID NO: 42849 - DNA, 2169 bp, Aspergillus nidulans FGSC A4
  CDS (1)..(2169)
atgcgagctctcggcctggtcggccttgttggcgtcgccaatgccgtctgtccgtatatgacaggcgagctcggccgtcgcgataccaaccccgatgctaccgaggccactgaggaatttctgtccgagtactaccttgacgacacggactcgtacctgacgactgacgtcggcggcccaattgaggaccagcagagtctcaaggccggtgcgcgcgggtctaccctgctggaagactttatcttccgtcagaagatccagcgattcgaccacgagcgggtccccgagcgtgccgtccatgctcggggtgcaggtgcccacggtgtcttcacctcgtacggcgacttctccaacatcaccgccgcctccttcctctctgctgagggtaaggagacccccgtcttcgtccggttctcgaccgtcgccggcagtcgtggcagttctgacctcgcccgcgatgtccacggtttcgccacccgcttttacactgacgagggcaactttgatatcgtcggtaacaacattcccgtctttttcatccaggatgccatccagttccccgacctgatccacgccgtcaagcccaagggcgatcgtgaaatcccgcaggctgccacggcccatgacgccgcctgggatttcttcagccagcagccctcgactcttcacaccctgctctgggccatggccggtcacggtatcccgcgttcgttccgccacgtcgatgggttcggtgtgcacactttccggctcgtcacggaggatggctccaccaagctcgtcaagttccactggaagaccctgcaaggtttggcaagtatggtctgggaggaagctcagcaaatttctggcaagaaccccgactacatgcgccaggatctgttcgagtcgattgaggctggccggtaccctgagtgggagcttaacgtgcaaatcatggacgaggaggaccagttgcgctttggcttcgaccttttcgaccctaccaagattgtccctgaggaatacgtcccattgaccccgctgggcaagatgaccctcaaccgcaacccccgcaactactttgccgagactgagcaggtcatgttccaacccggccacgtcgtgcgtggtgttgacttcaccgaggatccccttcttcagcagggacgtcttttcagctaccttgacacccagctcaaccgcaatggtggcccgaactttgagcagttgcccatcaaccagccgcgcgttgctattcacaacaacaaccgtgacggtgctggccagatgttcattccgctgaaccccgatgcgtacagccccaacacgctgaagggatcaaccctcaaacaggccaaccagactgcgggtcgcggattctttactgctcctgaccgtactgccaacggcaatcttgtgcgtgccaagagctccaccttcgatgatgcttggtcgcagccccggcttttctggaactctcttcttcccgccgagaagcagttcgtggtcaacgccattcgcttcgaaaacgccaatgtgaagagcgatgtcgtgaagaacaacgtcatcgttcagcttaatcgaatctcgaacgaccttgccacccgcgttgccaaggccatcggtgttgatgctcccgagcccgacaacacttactaccacgacaacacgacctccaacatcggtgcgtttggccaccgactccagagcttggctggcctgaagattgccgtacttgcttctgttgacgcagaggaatccttcagcgcggctactgctctgaaggccgagctctccaacgacaacctggacgtcattgtcgtcgctgaacgcttctccaacggcgtgaaccagacctactctgcctctgacgccattcagtttgacgccgtcgttgttgcccctggagcggagaagctcttcggtgccaagtccgcggccaactccagctcaaccctctaccctgccggccgtcccctcgaaatcctcgttgatgctttccgcttcggtaagccagtcgctgctcttggcagcggctccactgctttcgacaacgctggtatcaacaccgccgtcgagggcgtgtacgttgccgatgccgtggacgagagctttgccaacaacctcgaggagggtctgaccgtgttcaagttcttggatcgctttgccctggactcggatgaatag

SEQ ID NO: 42850 - protein, 722 aa, Aspergillus nidulans FGSC A4
MRALGLVGLVGVANAVCPYMTGELGRRDTNPDATEATEEFLSEYYLDDTDSYLTTDVGGPIEDQQSLKAGARGSTLLEDFIFRQKIQRFDHERVPERAVHARGAGAHGVFTSYGDFSNITAASFLSAEGKETPVFVRFSTVAGSRGSSDLARDVHGFATRFYTDEGNFDIVGNNIPVFFIQDAIQFPDLIHAVKPKGDREIPQAATAHDAAWDFFSQQPSTLHTLLWAMAGHGIPRSFRHVDGFGVHTFRLVTEDGSTKLVKFHWKTLQGLASMVWEEAQQISGKNPDYMRQDLFESIEAGRYPEWELNVQIMDEEDQLRFGFDLFDPTKIVPEEYVPLTPLGKMTLNRNPRNYFAETEQVMFQPGHVVRGVDFTEDPLLQQGRLFSYLDTQLNRNGGPNFEQLPINQPRVAIHNNNRDGAGQMFIPLNPDAYSPNTLKGSTLKQANQTAGRGFFTAPDRTANGNLVRAKSSTFDDAWSQPRLFWNSLLPAEKQFVVNAIRFENANVKSDVVKNNVIVQLNRISNDLATRVAKAIGVDAPEPDNTYYHDNTTSNIGAFGHRLQSLAGLKIAVLASVDAEESFSAATALKAELSNDNLDVIVVAERFSNGVNQTYSASDAIQFDAVVVAPGAEKLFGAKSAANSSSTLYPAGRPLEILVDAFRFGKPVAALGSGSTAFDNAGINTAVEGVYVADAVDESFANNLEEGLTVFKFLDRFALDSDE

SEQ ID NO: 42851 - DNA, 1524 bp, Candida glabrata CBS138
  CDS (1)..(1524)
atgtccgctaatccaactaacacttccgatgttagaggtgacagagttgtcactaactctacaggttacccatacaatgacccatttgctactcaaagagttggtcaacacggcccattgttgatgcaagatgctaacttgatcgactccttggcccacttcaacagagagagaatcccagaaagaaaccctcacgcccacggttctggtgcctttggttactttgaagtcactgatgatattactgacatctgtggttctgccatgttctccgaaattggtaagagaaccagattcttgaccagattctccactgtcggtggtgaaaagggttctgcagacaccgccagagacccaagaggttttgctaccaagttctacactgaagaaggtaacttggactgggtttacaacaacactccaattttcttcatcagagacccatctaagttcccacatttcatccacacccaaaagagaaacccacaaactaacttgaaggacccaaacatgttctgggattacttgaccactccagaaaaccaagttgctgtccaccaattgatgatcctgttctccgacagaggtaccccagcttcttacagacacatgaacggttactccggtcacacttacaagtggtccaacaagaagggtgaatggcactatgtccaagttcacatcttgactgaccaaggtatcaaaaacttgaccaatgatgaagctgttgaaatcgctggtaagaacccagactactgtcaacaagacttgtacgaaaacatcgccaagggtaactacccatcctggactgtttacatccaaactatgaccgaagaacaagccaagaagttgccattctctgtcttcgacttgaccaaggtctggccacacaaggacttcccattgcgtagagtcggtaagatggtcatgaacgaaaacccattgaattactttgcttccatcgaacaagctgctttctccccagccaacactgttccataccaagaaccatctgctgacccagttctacaatctcgtttgtttgcttacgctgatgctcaccgttacagattgggtgctaacttccaccaaatccctgtcaactgcccatacgcctccaagttcttcaacccagttattagagacggtccaatgaacgttgatggtaacttcggtaacgaaccaaactactacgcttccaacaagcaataccaaattccaaaccaagacagaccaatccaacaacaccaagaagtctggaacggtccagctcaaccattccactgggctacttctccaggcgacatcgacttcgtccaagccagagacttgtacaaggtcttgggtaagcaaaaggaccaacaagagcacttggcttacaacatcggtactcacgttgctggtgctgacccagagatccaacaacgtgttatcgacatgttctctcgtgttgatgaaggtctaggtgctaacatcagaaaggagatcgaaaagaacgccagcgccccaactgctaagatctaa

SEQ ID NO: 42852 - protein, 507 aa, Candida glabrata CBS138
MSANPTNTSDVRGDRVVTNSTGYPYNDPFATQRVGQHGPLLMQDANLIDSLAHFNRERIPERNPHAHGSGAFGYFEVTDDITDICGSAMFSEIGKRTRFLTRFSTVGGEKGSADTARDPRGFATKFYTEEGNLDWVYNNTPIFFIRDPSKFPHFIHTQKRNPQTNLKDPNMFWDYLTTPENQVAVHQLMILFSDRGTPASYRHMNGYSGHTYKWSNKKGEWHYVQVHILTDQGIKNLTNDEAVEIAGKNPDYCQQDLYENIAKGNYPSWTVYIQTMTEEQAKKLPFSVFDLTKVWPHKDFPLRRVGKMVMNENPLNYFASIEQAAFSPANTVPYQEPSADPVLQSRLFAYADAHRYRLGANFHQIPVNCPYASKFFNPVIRDGPMNVDGNFGNEPNYYASNKQYQIPNQDRPIQQHQEVWNGPAQPFHWATSPGDIDFVQARDLYKVLGKQKDQQEHLAYNIGTHVAGADPEIQQRVIDMFSRVDEGLGANIRKEIEKNASAPTAKI

SEQ ID NO: 42853 - DNA, 1653 bp, Kluyveromyces lactis NRRL Y-1140
  CDS (1)..(1653)
atgccttctgaatactcttcacctccagtttactccacttcaaatgggtttaaatactctcatcatccatacggtgcacaatactcgcgtccagatggtccacttttactacaggataaccatttgatagaatctctagctagattcgatagggaaagaattcccgaaagagttgtccatgccaaaggtggcggatgtcatatcgaatttgaactcactgattcgttatctgacatcacatatgcagcaccataccaatctcccggttacaagtgtcctggtatcataagatgcagtaccgttggcggtgaatcaggggctccagatacagccagagatccaagaggtttcagtttcaagttttacacgaaatgggggaaccatgactgggtgttcaacaatacaccggtgttcttcatcagagatgcaaacaagttccctcattttattcacactcaaaagagatccccaaggaatcatttgggacaggcttctgatacttccatgtattgggattatttgactcaaaatatcgagtccatccatcaaatcacgtatatgttcggtgatagaggcactccagcttcttggtctgacatgagtgcatattccggtcacacttataagtttatcaatgctgaaggtaagttgacttacgtgcaaattcatgtgttaccagagaatggattcaagactctttcattggaagaagccaataagttagctggtgaaaatcctgattataataaccaattgttgttcgaaaagctagaagccggtgaacgtccaaaatttaattgctatgttcagacgatgacccctgagcaagcagaaaatttcaggtattccattaacgatttgaccaagatttggccacataaggaattcccattgcgcaagttcggtaccattaccctaacccataacgtcgataactatttcgaagaaatcgagcaacttgctttctctccatcaaacacctgtattccaggtatcgagccatccaacgattctgtcttgcaatccagattattctcgtacccagacactcaacgtcacagacttggtaccaactttatgcagttaccagtcaatagacccgtgaatatgggtagagaagcttgtccatttgcaggtgcgaatttccaaagagatgggccaatgtgtatgttcaacttcaaggaccaaccaaactatatcgcttcttccggtaaaaaccttgttcagttcaacacattggatgacaacaatgccaagtcaacgcacgaaagatttactggtgttgtattagaagaggatgttgtcgctgaaataaagagacaagaagaaaaccgtgtagaacatgaacgtgttgttaacggtaagatcaacgaatattatattgtcaatggtgcatctccagtcgatttggaacaaccaagagctctatacgaaaaggtgtacaacgacaaggataagaagacattcgtcaaaaacgttgttgcacatgcttctaagatctccaatccggaaattaagactcgtgtgtctcaatacttcggtcttttgaatgaagatttgggtaaacagatcgctgaaggccttgaaatccaatgggagccagtttctttcgaaacatatgcccggagaatcagtatcgccagtgctttctaa

SEQ ID NO: 42854 - protein, 550 aa, Kluyveromyces lactis NRRL Y-1140
MPSEYSSPPVYSTSNGFKYSHHPYGAQYSRPDGPLLLQDNHLIESLARFDRERIPERVVHAKGGGCHIEFELTDSLSDITYAAPYQSPGYKCPGIIRCSTVGGESGAPDTARDPRGFSFKFYTKWGNHDWVFNNTPVFFIRDANKFPHFIHTQKRSPRNHLGQASDTSMYWDYLTQNIESIHQITYMFGDRGTPASWSDMSAYSGHTYKFINAEGKLTYVQIHVLPENGFKTLSLEEANKLAGENPDYNNQLLFEKLEAGERPKFNCYVQTMTPEQAENFRYSINDLTKIWPHKEFPLRKFGTITLTHNVDNYFEEIEQLAFSPSNTCIPGIEPSNDSVLQSRLFSYPDTQRHRLGTNFMQLPVNRPVNMGREACPFAGANFQRDGPMCMFNFKDQPNYIASSGKNLVQFNTLDDNNAKSTHERFTGVVLEEDVVAEIKRQEENRVEHERVVNGKINEYYIVNGASPVDLEQPRALYEKVYNDKDKKTFVKNVVAHASKISNPEIKTRVSQYFGLLNEDLGKQIAEGLEIQWEPVSFETYARRISIASAF

SEQ ID NO: 42855 - DNA, 1674 bp, Debaryomyces hansenii CBS767
  CDS (1)..(1674)
atggtttctgaatacattcaaaatacgaagaaagatccagcagtgtactcaacctccaatggagttccttatgccaatcatccatatggtgcccaaacggcaggccctggcgggccactattattgcaagattttaatttgatggacgacatttctcacttcgatcatgaaagaatcccagaaagagttgttcacgcaaaaggtggtggtgctcacggatatttcgaattgactgattcattgtctgatttaacttatgcccgtccattacaatccccaggctataaatgtcctgtatcagttagattctctacagttggaggtgaaaggggtacaccggacacaataagagatccaagggggttctcaattaaattgaaaactgacattggtaatatggattgggtttttaacaatacaccaatcttctttattagagacccgattaagttctccaaatttattcacacccaaaagagagatccatctacaaaccttaatcaattaactgatccataccatacttgggactactttattcagaatcctgaatgcttacatcaaataacttacatgtttggtaaaaggggtattccaaagagttgggccgaaatgcacggatattcgggtcatacatttaaactaattaacgataaagatgaaattacttatattcagatccattgtcttgctgatggaggttttgacggctttagtgacaaagaaggtaaagagttggctggttcatcacctgaatacaacactaaggatttatatgaaagaattgctgctggtaattatccatcatattcattttatgttcaaacgatgacacctaaacaagctgaagaatttcgttattctatcaatgatttaacaaaagtatggcctcacaaagaattcccattaagaaagtttggccgcatggttttagataagaatccggtaaattaccacgatgaaattgaacaaattgccttttcacctgctcatttagttcccggaattgagccttcaaatgatcctgttttacaatctaggttatactcttactctgatacacatcgtcatagattaggcgccaattaccaacagttaccggttaacaaaccaaggacatttgatagtaattctggatgtccatttttagcaggtaattttcaaagagaagggattgcatctattgataatcaaggatctagacctaattatttgagttcgttattacctattaattctgtctcgaacgatccaaagtcatacaagaatggattaccacctgttgaagaaaaaaagtatttaggtgttgttccgaaacgatctactgataaatatgaaattttacagaaagaacgtaatttgaaggcacatgaagaaaaaatttggctcaaatcgtatgactatatttctggatttagtgagctagatgttgaacagccaagagccctttataaaaatattattagtaagcaagataaaggggatttcatagaagctattgttggacatgcatcgaaaataagtgttcctcaaataaaagaaagagtacctcagttatggggtttgatagacggggatttaggaagtgaagttgctaaaggtttaggagtaagttacaagcatcttactgttgacgaatatatcgaagatcttggaatagctcctgctaactaa

SEQ ID NO: 42856 - protein, 557 aa, Debaryomyces hansenii CBS767
MVSEYIQNTKKDPAVYSTSNGVPYANHPYGAQTAGPGGPLLLQDFNLMDDISHFDHERIPERVVHAKGGGAHGYFELTDSLSDLTYARPLQSPGYKCPVSVRFSTVGGERGTPDTIRDPRGFSIKLKTDIGNMDWVFNNTPIFFIRDPIKFSKFIHTQKRDPSTNLNQLTDPYHTWDYFIQNPECLHQITYMFGKRGIPKSWAEMHGYSGHTFKLINDKDEITYIQIHCLADGGFDGFSDKEGKELAGSSPEYNTKDLYERIAAGNYPSYSFYVQTMTPKQAEEFRYSINDLTKVWPHKEFPLRKFGRMVLDKNPVNYHDEIEQIAFSPAHLVPGIEPSNDPVLQSRLYSYSDTHRHRLGANYQQLPVNKPRTFDSNSGCPFLAGNFQREGIASIDNQGSRPNYLSSLLPINSVSNDPKSYKNGLPPVEEKKYLGVVPKRSTDKYEILQKERNLKAHEEKIWLKSYDYISGFSELDVEQPRALYKNIISKQDKGDFIEAIVGHASKISVPQIKERVPQLWGLIDGDLGSEVAKGLGVSYKHLTVDEYIEDLGIAPAN

SEQ ID NO: 42857 - DNA, 1458 bp, Debaryomyces hansenii CBS767
  CDS (1)..(1458)
atggctcctgtttacactaactccaacggatgtccaatcccagaaccatttgctactcaaagagttggccaacatggtccattattattgcaagatttcaatcttattgattctttagcacacttcgacagagaaagaatcccagaaagagttgtgcacgccaagggatctggtgcttacggttactttgaagtgactgacgatattagtgatgtttgtagtgctgcatttttggatactattggtaaaaagaccaaggttttaaccagattctccaccgttggtggtgaatctggttctgctgacagtgctagagatccaagaggattttctactaagttgtataccgaggaaggtaacttggatttagtgtacaacaacaccccagttttcttcattagggacccatccaagttccctcacttcatccatacccaaaagagaaacccagaaactcacttgaaggacccaaccatgttctgggactacttgacttctaatcaagaatccatccaccaagttatgactcttttctccgaccgtggtactccagctagttacagagaaatgaacggttactctggtcacacttacaagtggtccaacaagaagggtgaatggtactacgtccaagtccacttcatctccgatcaaggtgtcaaaaccttgaccaacgaagaagcaggcgaattggcaggttccaatccagattttgctcaagaagacttgttcaaagaaattgccaagggtaatgcgccatcctggacttgttacatccaaaccatgactcaagaacaagctaagaaggcaccattctccgtcttcgacttaaccaaggtctggccacataaggattacccaatgagaagattcggtaaattagtcttgaacgaaaacccaaagaactactttgccgaaattgagcaagctgcatttgcacctgctcacaccgttccttacatggaagcttctgctgatccagtcttgcaatcaagattattctcttacgctgatacacacagacacagattaggtaccaattacacccaaattcctgttaactgtccaatcactggtcgtgttttcaatccacatatgagggatggtggtatgaatgttaacggtaacttaggatcacatccaaactatttagccacttccaaaccagttgaattcaagaattttagcatacaagaagaacaagaagtttgggaaggggctgcttgtccattccactggaaatgtactgacaaggattactcccaagctactgctttatacaatgttttagctaagtatccaaaccaacaaaagaacttagctcacaacgttgctgttcatgtttctggcgctgaaactcatatccaagacaaggtctttgatatgttcgcaaaggtccacccagaattatccgccaacattaagaaggaagctttacaactttctccaagaaagtaa

SEQ ID NO: 42858 - protein, 485 aa, Debaryomyces hansenii CBS767
MAPVYTNSNGCPIPEPFATQRVGQHGPLLLQDFNLIDSLAHFDRERIPERVVHAKGSGAYGYFEVTDDISDVCSAAFLDTIGKKTKVLTRFSTVGGESGSADSARDPRGFSTKLYTEEGNLDLVYNNTPVFFIRDPSKFPHFIHTQKRNPETHLKDPTMFWDYLTSNQESIHQVMTLFSDRGTPASYREMNGYSGHTYKWSNKKGEWYYVQVHFISDQGVKTLTNEEAGELAGSNPDFAQEDLFKEIAKGNAPSWTCYIQTMTQEQAKKAPFSVFDLTKVWPHKDYPMRRFGKLVLNENPKNYFAEIEQAAFAPAHTVPYMEASADPVLQSRLFSYADTHRHRLGTNYTQIPVNCPITGRVFNPHMRDGGMNVNGNLGSHPNYLATSKPVEFKNFSIQEEQEVWEGAACPFHWKCTDKDYSQATALYNVLAKYPNQQKNLAHNVAVHVSGAETHIQDKVFDMFAKVHPELSANIKKEALQLSPRK

SEQ ID NO: 42859 - DNA, 1479 bp, Oryza sativa (japonica cultivar-group)
  CDS (1)..(1479)
atggatccttgcaagttccggccgtcgagctcgttcgacacgaagacgacgacgacgaacgcgggagctccggtgtggaacgacaacgaggcgctgacagtggggcccagggggccgatcctcctcgaggactaccacctgatcgagaaggtggcgcacttcgcccgggagcgcatcccggagcgcgtggtccacgcccgcggcgcctccgccaagggcttcttcgagtgcacccacgacgtcaccgacatcacctgcgccgacttcctccggtccccgggcgcccagacccccgtcatcgtccgcttctccaccgtcatccacgagcgcggcagcccggagacgatccgcgacccgcgcgggttcgccgtcaagttctacacccgcgagggcaactgggacctcctcggcaacaacttccccgtcttcttcatccgcgacggcatcaagttccccgacgtcatccacgccttcaagcccaacccgcgctcccatgtccaggagtactggagggtcttcgacttcttgtcccaccaccccgagagcctccacaccttcttcttcctcttcgacgacgtcggcatccccaccgattaccgccacatggacggcttcggcgtcaacacctacaccttcgtcacccgcgacgccaaggccaggtacgtcaagttccactggaagcccacctgcggcgtcagctgcttgatggacgacgaggccacgctcgtcggcggcaagaaccacagccacgccacccaggacctctacgactccatcgccgccggcaacttccccgagtggaagctgttcgtccaggtgatcgacccggaggaggaggagaggttcgacttcgacccgctggatgacaccaagacatggccggaggacgaggtgccgctccggcccgtggggcgcctcgttctcaaccgcaacgtcgacaacttcttcaacgagaacgagcagctggcgttcgggccggggctggtggtgccggggatctactactccgacgacaagatgctgcagtgcagggtgttcgcgtacgccgacacgcagcgctacaggctggggccaaactacctgatgctgccggtgaacgcgcccaagtgcgcccaccacaacaaccactacgacggcgccatgaacttcatgcaccgggacgaggaggtggactactacccatcgcgccacgcgccgctccgccacgcgccgccgacgcccatcacgccgcgccccgtggtggggaggaggcagaaggcgacgatacacaagcagaacgacttcaagcagcccggggagaggtacaggtcgtgggcgccggatagacaggagaggttcatccgccgcttcgccggcgagctcgcgcaccccaaggtctcccctgagctccgcgccatctgggtcaactacctctcccagtgtgatgagtcgttgggggtgaagattgcgaataggctcaacgtgaagccaagcatgtga

SEQ ID NO: 42860 - protein, 492 aa, Oryza sativa (japonica cultivar-group)
MDPCKFRPSSSFDTKTTTTNAGAPVWNDNEALTVGPRGPILLEDYHLIEKVAHFARERIPERVVHARGASAKGFFECTHDVTDITCADFLRSPGAQTPVIVRFSTVIHERGSPETIRDPRGFAVKFYTREGNWDLLGNNFPVFFIRDGIKFPDVIHAFKPNPRSHVQEYWRVFDFLSHHPESLHTFFFLFDDVGIPTDYRHMDGFGVNTYTFVTRDAKARYVKFHWKPTCGVSCLMDDEATLVGGKNHSHATQDLYDSIAAGNFPEWKLFVQVIDPEEEERFDFDPLDDTKTWPEDEVPLRPVGRLVLNRNVDNFFNENEQLAFGPGLVVPGIYYSDDKMLQCRVFAYADTQRYRLGPNYLMLPVNAPKCAHHNNHYDGAMNFMHRDEEVDYYPSRHAPLRHAPPTPITPRPVVGRRQKATIHKQNDFKQPGERYRSWAPDRQERFIRRFAGELAHPKVSPELRAIWVNYLSQCDESLGVKIANRLNVKPSM

SEQ ID NO: 42861 - DNA, 1626 bp, Oryza sativa (japonica cultivar-group)
  CDS (1)..(1626)
atggatccctacaagcaccgcccgtcgagctcgttcaacggcccgctgtggagcaccaactccggcgcccccgtatggaacaacaacaactcgctcaccgtcggctcccgaggcccgatccttctggaggactaccacctggttgagaagctggccaacttcgacagggagcgtatcccggagcgcgtggtgcacgcccgcggcgccagcgccaagggcttcttcgaggtcacccacgacatcacccacctcacctgcgccgacttcctccgcgccccgggcgtccagaccccggtcatcgtccgcttctccaccgtcatccacgagcgcggcagcccggagaccctccgcgacccgcgtggcttcgccatcaagttctacacccgggagggcaactgggacctcgtcggcaacaacttccccgtcttcttcatccgcgacggcatgaagttcccggacatggtgcactcgctcaagcccaaccccaagtcgcacgtccaggagaactggcgcatcctcgacttcttctcccaccacccggagagcctccacatgttcaccttcctcttcgatgacatcggcatccccgccgactaccgccacatggacggctccggcgtcaacacctacacgctcgtcaaccgcgccggcaagtcgcactacgtcaagttccactggaagcccacctgcggcgtcaagtcgctgctcgacgacgaggccgtcaccgtcggcgggaccaaccacagccacgccacgcaggacctctacgactccatcgccgccggcaacttcccggagtggaagctgttcatccagaccatcgaccccgaccacgaggaccgcttcgacttcgacccgctcgacgtcaccaagacgtggcccgaggacatcgtcccgctgcagcccgtggggaggatggtgctcaaccgcaacatcgacaacttcttctcggagaacgagcagctggcgttctgccccgggatcatcgtgccggggatctactactccgacgacaagctgctgcagacgaggatcttctcctactccgacacgcagcgccaccgcctcggaccaaactacctgctgctcccgcccaacgcgcccaagtgcgcccaccacaacaaccactacgacggcttcatgaacttcatgcaccgcgacgaggaggtcgactacttcccatcccgctacgatcctgccaagcacgccccccgctaccccatcccctccgccaccctcaccggccgccgcgagaaggtggtgattgccaaggagaacaacttcaagcagccaggggagaggtaccgttcatgggatccggcaaggcaagaccggttcatcaagagatggatcgacgcactctctgaccctcgcctcacccacgagatcaggagcatctggctctcctactggtctcaggctgacaggtctctgggtcagaaactggcgagccgtctcagcgcgaagccgagcatggcgcaagtgcatgaggacatcacagacgggctcaccgaaggcgacgatgaagtcgtgcgaagccgacgcggggtgcggtggtggatgctgtggcggcgaaggaggcttggaagaaacggcatcgcggtggggaggaaggagataaagtaa

SEQ ID NO: 42862 - protein, 541 aa, Oryza sativa (japonica cultivar-group)
MDPYKHRPSSSFNGPLWSTNSGAPVWNNNNSLTVGSRGPILLEDYHLVEKLANFDRERIPERVVHARGASAKGFFEVTHDITHLTCADFLRAPGVQTPVIVRFSTVIHERGSPETLRDPRGFAIKFYTREGNWDLVGNNFPVFFIRDGMKFPDMVHSLKPNPKSHVQENWRILDFFSHHPESLHMFTFLFDDIGIPADYRHMDGSGVNTYTLVNRAGKSHYVKFHWKPTCGVKSLLDDEAVTVGGTNHSHATQDLYDSIAAGNFPEWKLFIQTIDPDHEDRFDFDPLDVTKTWPEDIVPLQPVGRMVLNRNIDNFFSENEQLAFCPGIIVPGIYYSDDKLLQTRIFSYSDTQRHRLGPNYLLLPPNAPKCAHHNNHYDGFMNFMHRDEEVDYFPSRYDPAKHAPRYPIPSATLTGRREKVVIAKENNFKQPGERYRSWDPARQDRFIKRWIDALSDPRLTHEIRSIWLSYWSQADRSLGQKLASRLSAKPSMAQVHEDITDGLTEGDDEVVRSRRGVRWWMLWRRRRLGRNGIAVGRKEIK

SEQ ID NO: 42863 - DNA, 1599 bp, Yarrowia lipolytica CLIB99
  CDS (1)..(1599)
atgtccaaagaactctacgccaactccaaggacgacgctgtctactcctactcctttggagttccttacccccaccatccctactcatctcagcgggccggccctaccggccctctgctgctccaggacacctatctgattgacgctctggcccatttcgaccgagagcgaatccccgagcgagtcgtccatgccaacggaggaggagcccatggctactttgaggtgaccgatgacatctccgacatcacatacgccgagcccttccagaagattggctacaaatgccccaccaccgtgcgattttctaccgttggtggtgagcgaggctctcccgacactgctcgagacccccgaggtttcgctgtcaagcacaagaccgactggggtaactgggacatggttggtctcaactctcctgttttcttcattcgagatcctgtcaagttcatccatgtcaaccactctcagaagcgagacccccagaccaacctgactgccggagatgatgcctctaactactggaactatctggtccagaaccccgagtctctgcatcaggtggtgtacatgtttggagaccgaggtacccccaatggatggcgacacatgaactgcttctccactcatacttacaagatgatcaacaaggagggcaagctgacctacgtccagttccactacaagtccgaccagggagtcaagaacttcaccggacccgaggctgctgagatggctggaaagagcccggaccacgaccagaaggatctcttctttgccatcgataacggagactacccctcctggaccgtttcccttcagaccatgactcccgagcaggccgaggaatgggaatactccattctggatatgaccaagacctggccctatgacaagttccctctgcgaaaggtcggaaagctggtgctcaacaagaacgccgagaacttctttgaggagattgagcaggccgccttctctccctccaacctgatccacggtatcgaagcctctgatgatcctgttctccaggcccgactcttctcttaccccgatactgctcgacatcgactgggtcccaacttcaaccagctgcctgtcaaccaggcccgaaccttccaaaagggatctggctgcccattcatggccggaaacttccagcgagacggaaacatggccatccacaaccagggcaaccgacccaactacctgtcgacgatccgacccatccagtccgtgtccgtacccaacgaggacttcaagaacactcacgattactgcggagtggtcaccaaggagatggaggacgaatccttcaaggtccaggccgaggctgccaagaagcacaacgagaagatctgggagagctcgtcatacctgtacttgtctggtttccaggagagcgatgcagcccaaccccgagacctgtacgagagagtgtacgacgatgctgccaagcagcgaatgattgacaacgttgttgaccatgcctccaccatcaagcagcacggtctcaaggagcaggtcgccaagtactttggccgaatcagcgacgatcttggcaagaagatcgccgagggtcttggtgttccttactaa

SEQ ID NO: 42864 - protein, 532 aa, Yarrowia lipolytica CLIB99
MSKELYANSKDDAVYSYSFGVPYPHHPYSSQRAGPTGPLLLQDTYLIDALAHFDRERIPERVVHANGGGAHGYFEVTDDISDITYAEPFQKIGYKCPTTVRFSTVGGERGSPDTARDPRGFAVKHKTDWGNWDMVGLNSPVFFIRDPVKFIHVNHSQKRDPQTNLTAGDDASNYWNYLVQNPESLHQVVYMFGDRGTPNGWRHMNCFSTHTYKMINKEGKLTYVQFHYKSDQGVKNFTGPEAAEMAGKSPDHDQKDLFFAIDNGDYPSWTVSLQTMTPEQAEEWEYSILDMTKTWPYDKFPLRKVGKLVLNKNAENFFEEIEQAAFSPSNLIHGIEASDDPVLQARLFSYPDTARHRLGPNFNQLPVNQARTFQKGSGCPFMAGNFQRDGNMAIHNQGNRPNYLSTIRPIQSVSVPNEDFKNTHDYCGVVTKEMEDESFKVQAEAAKKHNEKIWESSSYLYLSGFQESDAAQPRDLYERVYDDAAKQRMIDNVVDHASTIKQHGLKEQVAKYFGRISDDLGKKIAEGLGVPY

SEQ ID NO: 42865 - DNA, 1479 bp, Yarrowia lipolytica CLIB99
  CDS (1)..(1479)
atgtctggaaaacgagtccccacttacaccaccactaacggtaaccccgtcaaggaccccctcgcctcccagcgaatcggcaagcacggacctctcctgctccaggactttgccctgatcgacctgctcgcccacttcgaccgagagcgaatccccgagcgagttgtccacgctaagggatccggtgcttacggagagttcgaggtcactgacgatatcaccgacctcaactgcgccgatttcttgtccaagatcggtaagaagaccaagaccttcactcgattctccaccgttggaggagagaagggatccgccgatgctgctcgagacccccgaggtttcgccaccaagttctacaccgacgagggaaacattgactgggtctacaacaacacccccgtctttttcatcagagacccctccaagttccccgttttcatccacactcagaagcgaaaccccgagaccaacctcaaggacgccactatgatgtgggactacattgccaacaaccaggagtgttgccaccagatcatggtcctcttctccgaccgaggtactcccgctaactaccgacagatgaacggttactccggccacacctacaagtggatcaagaaggatggctctttcaactacgtccagatccacatgaagaccgaccagggcatcaagaacctcaccaatgacgaggctgtcgctctctccggaaccaaccccgaccacgcccaggaagacctcttcaactccatcaagagtggctctttcccctcttggacttgttacgtccaggtctgcacccccgagcaggctgagaagctcaagtggtccgtctttgacctcaccaaggtctggcctcacgaccagttccctctcagacgattcggtaagctcactcttaacaagaacgtccagaactacttcgctgagaccgagcaggctgccttctctccctccaacaccgtccccggctgggagacctcggccgatcccgtcctgcagtctcgactcttctcttatcccgatactcagcgacaccgactcggtaccaacttcgcccagatccccgtcaactgtccctaccatgcccatactccttaccaccgagatggtcagatggctgttaacggcaactccggctctctgcccaactacccctcttctttcgagcccctgcagtaccgacaggacatcaacctgcatgagaagcacgagaagtgggttggtgaggccgtcgcctaccagtgggttgtcggcaccgacggtgttgacttccagcagcccgctgagctctggaaggttcttggaaagaccccagaccagcaggaacaccttgtttacaacatcgctgtctctctgtccggtgctcgacccgaggtccaggacaagacctttggcatgttcgacaaggtcgatgctcacttcggtaagctcgtccgagacgctactcttcagcgatctcctcgatccaagctttaa

SEQ ID NO: 42866 - protein, 492 aa, Yarrowia lipolytica CLIB99
MSGKRVPTYTTTNGNPVKDPLASQRIGKHGPLLLQDFALIDLLAHFDRERIPERVVHAKGSGAYGEFEVTDDITDLNCADFLSKIGKKTKTFTRFSTVGGEKGSADAARDPRGFATKFYTDEGNIDWVYNNTPVFFIRDPSKFPVFIHTQKRNPETNLKDATMMWDYIANNQECCHQIMVLFSDRGTPANYRQMNGYSGHTYKWIKKDGSFNYVQIHMKTDQGIKNLTNDEAVALSGTNPDHAQEDLFNSIKSGSFPSWTCYVQVCTPEQAEKLKWSVFDLTKVWPHDQFPLRRFGKLTLNKNVQNYFAETEQAAFSPSNTVPGWETSADPVLQSRLFSYPDTQRHRLGTNFAQIPVNCPYHAHTPYHRDGQMAVNGNSGSLPNYPSSFEPLQYRQDINLHEKHEKWVGEAVAYQWVVGTDGVDFQQPAELWKVLGKTPDQQEHLVYNIAVSLSGARPEVQDKTFGMFDKVDAHFGKLVRDATLQRSPRSKL

SEQ ID NO: 42867 - DNA, 1458 bp, Desulfovibrio vulgaris subsp. vulgaris str. Hildenborough
  CDS (1)..(1458): transl_table=11
gtggacaagaagcgattgacgaccaacgccggcgctcccgtcgcagacaaccagaacgtcatgacggcggggccgcgcggccctcaactgctgcaagacgtatggttccttgagaaactcgcccacttcgaccgggaggtcatccccgaaaggcggatgcacgccaaggggtcgggggccttcggcacgttcaccgtgacccacgacatcacgcgctacacccgcgccgccatattctctgaagtgggcaagaagacggacctgttcgtgcgcttctcgaccgtggcgggcgaacgcggcgcagccgacgccgaacgcgacatccgtggcttcgccgtcaagttctacaccgaacagggcaactgggacatggtgggcaacaacactcccgtgttcttcctgcgcgacccgctcaaattccccgacctcaaccacgccgtgaagcgcgacccgcgcaccaacctgcgcagcgcacgcaacaactgggacttctggaccagcctgcccgaggccctgcatcaggtcacggtcgtcatgagcgaccggggcattcccgccacctatcgccacatgcacggcttcggcagccacaccttcagcttcatcaacgcaaagggtgaacgcttctggtgcaagttccacttcaagacgcagcagggcatcaagaacctgacggatgccgaagccgaggccatcgtcggcaaatgccgtgaaagccaccagcgcgacctgtacgacagcatcgaacggggcgacttcccccgatggaccatgtatgtccaggtcatgaccgaagagaaggcggcagccctgccctaccaccccttcgacctgaccaaggtctggtaccatgacgacgcgccgctcatcgaagtgggcgttctagaactgaaccgcaaccccgagaactacttcgcagaggtcgaacaggcggccttcaacccggccaacgtggtgccgggcatcggcttctcgcccgacaagatgttgcaggggcggctgttctcgtatggcgacgcccagcgctaccgccttggcgtcaaccaccacctcatccccgtcaacatgccccgctgccccttccacagctaccaccgtgacggcatgatgcgcgtggacggcaaccacggcagcaccctcgcctatgagccgaacagctacggcgaatggcaggaacaacccggcttcgccgaaccgcccctcgaactgagcggcgcggcagcccactggaacgcacgtgaggacgacgccgactacttcacccagccgggcaagctcttcaggctgatgaccccagcgcagcaggaggaactcttcggcaacaccgcccgcgccctcggcgatgcgcccgatgcgatcaagctgcggcacatcggcaactgcctgaaggccgaccccgcctacggaaacggcgtggcgaaggctctcgggctcgaccccgcaaaggcactgggctag

SEQ ID NO: 42868 - protein, 485 aa, Desulfovibrio vulgaris subsp. vulgaris str. Hildenborough
MDKKRLTTNAGAPVADNQNVMTAGPRGPQLLQDVWFLEKLAHFDREVIPERRMHAKGSGAFGTFTVTHDITRYTRAAIFSEVGKKTDLFVRFSTVAGERGAADAERDIRGFAVKFYTEQGNWDMVGNNTPVFFLRDPLKFPDLNHAVKRDPRTNLRSARNNWDFWTSLPEALHQVTVVMSDRGIPATYRHMHGFGSHTFSFINAKGERFWCKFHFKTQQGIKNLTDAEAEAIVGKCRESHQRDLYDSIERGDFPRWTMYVQVMTEEKAAALPYHPFDLTKVWYHDDAPLIEVGVLELNRNPENYFAEVEQAAFNPANVVPGIGFSPDKMLQGRLFSYGDAQRYRLGVNHHLIPVNMPRCPFHSYHRDGMMRVDGNHGSTLAYEPNSYGEWQEQPGFAEPPLELSGAAAHWNAREDDADYFTQPGKLFRLMTPAQQEELFGNTARALGDAPDAIKLRHIGNCLKADPAYGNGVAKALGLDPAKALG

SEQ ID NO: 42869 - DNA, 1521 bp, Acinetobacter sp. ADP1
  CDS (1)..(1521): transl_table=11
atgagtgacgataagttaaagtgtccagtcacccaccttacgactgatgcaggcgcgcctgttgtagacaatcagaacagtatgacggcaggtgcacgtggtccacttctgacccaagatctctggctcaatgagaaaatggctaattttgcacgtgaagttattccagaacgtcgtatgcatgccaaagggtcaggagcatttggtacttttacggtaacccacgatattacacagtattcccgtgccaaaatattcagtgaaattgggaaaaaaactgaaatgtttgcccgcttttcaacggtcgcaggtgaacgtggtgctgccgatgcagaacgtgatattcgcggttttgccctcaagttttataccgaagaaggtaactgggacatggtgggaaacaatacgcctgtgttctttatgcgtgatccacgtaagttcccagatcttaacaaagcagtaaaacgcgacccaaaaactaatttacgtagtgccacctataactgggatttctggacgctactgcctgaagcactgcatcaggtcacaattgtgatgtcagatcgtggtattccagatggatatcgccatatgcatggttttggtagccatacttatagcttcatcaatgccagcaatgagcgcttttgggtaaaattccatttccgcacccagcaaggtattaagaatttaactgatgctgaagctgaagcgattgttgccaaagaccgtgaaagtagccaaagcgatttgttcaatgcgattgaacaaggtaactatccaaaatggaccatgttcgttcaaatcatgccagaaactgatgcggaaaaagtaccctatcatccatttgacctcactaaagtctggccgcatggggattacccactgatcgaagtcggtgaatttgaactaaatcgtaatgctgaaaattattttcaggatgttgagcaagcgacatttgcaccaagtaatctagttccagggattagctactctccagaccgcatgttacaagcacgtttggtgaactatgccgatgcacaccgctatcgtgttggtgtaaatcacactcaaattccagtaaatgcgccgcgttgtccagtgcatagtaaccgccgtgacggacaaggccgtatggatggtaactatggtggtttaccacactacgaaccgaacagtttccatcaatggcaagaacagcctgagtttcgtgaaccgcctttaaaaattacgggcgatgcagatttctgggatttccgtcaagatgacagcgactattttagccagccccgtgctttgtttaatttgatgaatgatgagcaaaaacaggcattatttggtaatacggcacgtgcgatgggtgatgcgctcgacttcattaaatatcgccacatccgtaattgctacgcctgtgatcctgcctatggagaaggtgttgctcaggcactcggcatgacggttgcagatgctcaagcagcccgtgacagtgatcctgctaaaggtcatcctggtttcttataa

SEQ ID NO: 42870 - protein, 506 aa, Acinetobacter sp. ADP1
MSDDKLKCPVTHLTTDAGAPVVDNQNSMTAGARGPLLTQDLWLNEKMANFAREVIPERRMHAKGSGAFGTFTVTHDITQYSRAKIFSEIGKKTEMFARFSTVAGERGAADAERDIRGFALKFYTEEGNWDMVGNNTPVFFMRDPRKFPDLNKAVKRDPKTNLRSATYNWDFWTLLPEALHQVTIVMSDRGIPDGYRHMHGFGSHTYSFINASNERFWVKFHFRTQQGIKNLTDAEAEAIVAKDRESSQSDLFNAIEQGNYPKWTMFVQIMPETDAEKVPYHPFDLTKVWPHGDYPLIEVGEFELNRNAENYFQDVEQATFAPSNLVPGISYSPDRMLQARLVNYADAHRYRVGVNHTQIPVNAPRCPVHSNRRDGQGRMDGNYGGLPHYEPNSFHQWQEQPEFREPPLKITGDADFWDFRQDDSDYFSQPRALFNLMNDEQKQALFGNTARAMGDALDFIKYRHIRNCYACDPAYGEGVAQALGMTVADAQAARDSDPAKGHPGFL

SEQ ID NO: 42871 - DNA, 1452 bp, Propionibacterium acnes KPA171202
  CDS (1)..(1452): transl_table=11
atgcctattgatcccagcaagccgtcaacgaacaccaacgggtcgccagcgcctagcgacgaatactccctgaccgtcggcgctgacggcccggtagtgctccacgacgcacatctcatcgacaccctggcccatttcaaccgggaaaacatccccgaacgcaagcctcacgccaagggatcgggggccttcggacatctcgaggttaccgctgacgtctcggagtacaccaaggcatccttcctgcagaaggggcgcgaaacccccatgctggcccgattctccacagtcgccggtgagctcggcagccctgacacctggcgtgatgtgcgtggattctcgttgaagttctacaccgacgagggcaacttcgacatggtcggcaacaacaccccggtgttcttcatgcgtgacccgatgaagttcccgcatttcatccgctcccagaaacggttaccgaattccggactgcgcagtccgaatatgatgtatgactattggagcctgtcccccgaatcggcccatcaagtggcttacctcatgggaccgcgcggcattccgctcagctatcgcactatgaacggctactcctcgcacacctactcatgggttaacgccgaagggaagatcacctgggtgaaataccacttcatcagtgaccagggtgttcacaacatgactgctgaccgggccaaagcgatcgtcggtgatcacccagacatccaccgcgaggacctcttcaaccacattgccgacggcgactatccgtcctggaccgtcaaggtgcagctcatgccctatgacgaagccaaggattaccggttcaacccgttcgacatcaccaaggtgtggccgcataaggattacccgctgcacaccatcggcaagttcactctggaccgcaacccggagaacttcttcgcccagatcgagcaagcggccttctccccgtcgaacaccgttgagggcactgggttgtccccagaccggatgctgctgggtcgtgtcttcgcctacaacgatgccgcccgcaaccgtctgggggtcaactatgaacaactccctgtgaaccggccaacgacgccgacaaaccagtacaccttcgacggccagatggccttcgaacactccggttcggcacccacctacgccccgaactcctacggtcgcgattttgccaccggataccgaaccggttccgaagctacctgggaggctgacggcgaactcgttcgttccgcccagacccggcacgcggaagatgacgacttcggtcaggcccacgccctggtgcatgacgtcttttccgacgcagagcgtgacgagctcgtcgatactttggtggacttgatgaccaatttcgacatggaagagccggtcatcggcaacgcgctgtcctactggcgcaacatcgacgccggtattgccgaggcaaccgagggcagaatctga

SEQ ID NO: 42872 - protein, 483 aa, Propionibacterium acnes KPA171202
MPIDPSKPSTNTNGSPAPSDEYSLTVGADGPVVLHDAHLIDTLAHFNRENIPERKPHAKGSGAFGHLEVTADVSEYTKASFLQKGRETPMLARFSTVAGELGSPDTWRDVRGFSLKFYTDEGNFDMVGNNTPVFFMRDPMKFPHFIRSQKRLPNSGLRSPNMMYDYWSLSPESAHQVAYLMGPRGIPLSYRTMNGYSSHTYSWVNAEGKITWVKYHFISDQGVHNMTADRAKAIVGDHPDIHREDLFNHIADGDYPSWTVKVQLMPYDEAKDYRFNPFDITKVWPHKDYPLHTIGKFTLDRNPENFFAQIEQAAFSPSNTVEGTGLSPDRMLLGRVFAYNDAARNRLGVNYEQLPVNRPTTPTNQYTFDGQMAFEHSGSAPTYAPNSYGRDFATGYRTGSEATWEADGELVRSAQTRHAEDDDFGQAHALVHDVFSDAERDELVDTLVDLMTNFDMEEPVIGNALSYWRNIDAGIAEATEGRI

SEQ ID NO: 42873 - DNA, 1494 bp, Leifsonia xyli subsp. xyli str. CTCB07
  CDS (1)..(1494): transl_table=11
atgtcggagaaccacacgaccacgcagaccgggacaccggtcgccagcgacgcccactcgctcacggcgggccaggacggcgcgaccgccctgcacgaccgctacctggtggagaagctcgcccagttcaaccgcgaacggatccccgagcggatcgtacacgcgaagggcggcggcgcgttcggcacgttcgctgtcaccggcgacgtaacggcgtacacgaaggcggcggtcttccagccgggcgcgaagacggagaccgtgcagcggttctcctccgtcgcgggcgagcagggctcgcccgacacctggcgcgacgtccgcggcttctcagtgaagttctacacgtccgagggcaactacgacatcgtcggcaacaacaccccggtcttcttcatccgcgacggcatgaagttccccgatttcatccactcgcagaagcgcctcccgggctccggactgcgggatgcggacatgcagtgggatttctggacgctctcccccgagtccgcccaccaggtcacctacctcatgggcgaccgcggcctcccccgctcctggcgcaccatgccgggctacggctcgcacacgtaccagtggatcaacgcggcaggcgagcgcttctgggtcaagtaccacttccacgcgcttcacggcaacgaggagatgcacggggccgaagccgagaagatcgcgggcgaggacgcggactactaccgtcgcgacctgtacgaggcgatcgaacgcggcgacttcccggcgtggaagctctccgtgcaggtcatgccctacgaggacgccaagacctaccggctcaacccgttcgacctcaccaaggtgtggccgcacagcgactacccgctgatcgaggtcggcgtccacacgctgaaccgcaacccggagaacttcttcgcccagatcgagcaggcggcgttctcgccggcgaacacggtccccggcatcgatatctcccccgacaagatgctcacggcccgggtcttctcctacccggacgcccagcgctaccgcgtcggcacgaactacaacgaactgccggtgaatgcgccggtcgcgccggtacacaactactcgcaggacggcgcggcgcgccacggcttcaaggccgcggaggcgccggtctacgcgccgaactcgttcggcggcccggtggccgacccggccctggccggcgaaggctcctgggagtcggacggcgcgctggtccgcgccgccgccactctgcacgccgaggatgacgacttcggccaggccggttccctctaccgcgacgtcttcgacgccaaggccaaagagcgcttcctcgacacgatcgccggggcggtcggcggggtgcagcgcgacgacatccgcgagcgcgccatccagtactggacgagtgtggacgccggcctcggcggcctgctccgtacacggctcgcgtcgggggtcaccgacgccgacgaggcggccgagttcgtgggggtcgcgggctga

SEQ ID NO: 42874 - protein, 497 aa, Leifsonia xyli subsp. xyli str. CTCB07
MSENHTTTQTGTPVASDAHSLTAGQDGATALHDRYLVEKLAQFNRERIPERIVHAKGGGAFGTFAVTGDVTAYTKAAVFQPGAKTETVQRFSSVAGEQGSPDTWRDVRGFSVKFYTSEGNYDIVGNNTPVFFIRDGMKFPDFIHSQKRLPGSGLRDADMQWDFWTLSPESAHQVTYLMGDRGLPRSWRTMPGYGSHTYQWINAAGERFWVKYHFHALHGNEEMHGAEAEKIAGEDADYYRRDLYEAIERGDFPAWKLSVQVMPYEDAKTYRLNPFDLTKVWPHSDYPLIEVGVHTLNRNPENFFAQIEQAAFSPANTVPGIDISPDKMLTARVFSYPDAQRYRVGTNYNELPVNAPVAPVHNYSQDGAARHGFKAAEAPVYAPNSFGGPVADPALAGEGSWESDGALVRAAATLHAEDDDFGQAGSLYRDVFDAKAKERFLDTIAGAVGGVQRDDIRERAIQYWTSVDAGLGGLLRTRLASGVTDADEAAEFVGVAG

SEQ ID NO: 42875 - DNA, 1464 bp, Desulfotalea psychrophila LSv54
  CDS (1)..(1464): transl_table=11
atgaaggatgagaaagataaattaacaggcaacaacggtgcgcctgttgtagacaatcaaaatgttatgacagcaggacctcgtgggcctctgctgctccaggatgtctggtttatggagaaacttgcccattttgaccgggaggtcattcctgaaaggcgaatgcatgccaagggatctggtgcctacggaacctttaccgttaccgatgatatcagggcctataccaaggcaaaaatattcgcagagatagggaagacgactgatctctttgttcgtttttccacggtggcaggagagaggggggcagccgatgccgaacgggatattcggggctttgccatgaagttttataccgaagagggcaactgggatctggtcggtaataatacgccggtcttcttcctgaaagatcctctcaagtttccagacttgaaccacgccgtcaagcgtgatccccgcaccaatatgcgcagtgccgccaataattgggactactggtcatcgctgccggaggcacttcatcaggtcaccataacaatgagtgatcggggtattcccctctcctatcgacatatgaatggatatggcagccatacctatagtcttctcaatgagaacaatgaacgattctgggtcaaattccactttaaaacccagcagggcattaagaccctcagtgatgaggaggcggaaaaactggttggcagggatcgggagagccatcagcgtgatctcttggaggccattgataatcatgaatttcccagttggaagatgcagattcaggtggtgcctgaaaaggaggccgcaaattttccctttaatccctttgatctgaccaaggtatggccgcatgacgattatccactcattgacgtaggcattatggagctgaacaagaatcccgagaactattttgccgaagtagagcaggcggcctttaatccggccaatattgtcccgggcatcggcttttctcccgataagatgttgcagggtaggctcttctcctatggtgatgcccagcgatatcgtcttggggttaaccaccatctcatcccggtaaacagggccagatgtccatttcactcatttcatcgggatggggccatgcgagtcgatgggaattatgggggaacccgtggctatgaacctaatagttatggtgagtggcgggaacagcctgagtttaaagaaccacccctcactcttgaaggggcggctgaccattggaatcatcgagaggatagcgatgactactactctcaacccggcaatctattcaggcttatgactgctgaacaaaaaaaggtgctctttgagaacacggcaagggccttaggcgatgcccctcgggcaatcaagatgcgtcatgcctctaactgccaaaaggccgatagggcctatggcgagggggttgccatggccttgggtctgcccgtgtccgaacttgaggagtag

SEQ ID NO: 42876 - protein, 487 aa, Desulfotalea psychrophila LSv54
MKDEKDKLTGNNGAPVVDNQNVMTAGPRGPLLLQDVWFMEKLAHFDREVIPERRMHAKGSGAYGTFTVTDDIRAYTKAKIFAEIGKTTDLFVRFSTVAGERGAADAERDIRGFAMKFYTEEGNWDLVGNNTPVFFLKDPLKFPDLNHAVKRDPRTNMRSAANNWDYWSSLPEALHQVTITMSDRGIPLSYRHMNGYGSHTYSLLNENNERFWVKFHFKTQQGIKTLSDEEAEKLVGRDRESHQRDLLEAIDNHEFPSWKMQIQVVPEKEAANFPFNPFDLTKVWPHDDYPLIDVGIMELNKNPENYFAEVEQAAFNPANIVPGIGFSPDKMLQGRLFSYGDAQRYRLGVNHHLIPVNRARCPFHSFHRDGAMRVDGNYGGTRGYEPNSYGEWREQPEFKEPPLTLEGAADHWNHREDSDDYYSQPGNLFRLMTAEQKKVLFENTARALGDAPRAIKMRHASNCQKADRAYGEGVAMALGLPVSELEE

SEQ ID NO: 42877 - DNA, 2127 bp, Burkholderia pseudomallei K96243
  CDS (1)..(2127): transl_table=11
atggccgattcagaccgcaacgctccacacgaaacgccgcgcgccgcgcagccggacgacgcgcgcgcggaccgcaaatcgcaggatctcgagccgtatcgctcgaagccgcaaggcgaggcgctgcgcacgaaccagggcgtgcgcatcgcggacgatcagaacacgctgcgcgcgggcgcgcgcggcccgtcgctgctcgaagacttcatcatgcgcgagaagatcacgcatttcgatcacgagcgcattccggagcgcgtcgtgcacgcgcgcggctcggccgcgcacggcgtgttccgcgtctacgaatcgatggccgagtacacgaaggccgcgttcctgcaggacccggcgaaggaaacgcccgtgtacgtgcgcttctcgacggtgcagggcccgcgcggctccgccgacacggtgcgcgacgtgcgcggcttcgccgtgaagttctacaccgacgagggcaactacgatctcgtgggcaacaacatgccggtgttcttcatccaggatgcgatcaagttcccggatttcgtgcacgcggtgaagccggaggcgcccaacgagatgccgacgggcgcgtccgcgcacgatacgttctgggatttcgtgtcgctcgtgccggaatccgcgcacatggtcgcgtggctgatgtcggaccgcgcgattccgcgcagcttccgcacgatggaaggcttcggcgtgcatacgttccggttcgtcaatgcgcagggcgtcgcgcgcttcgtgaagctgcactggcgcccggtgctcggctcgtactcgctgctgtgggacgaggcgcagaagatcgccggccacgatccggatttccaccggcgggatttgtgggaggcgatcgagcgcggcgactatccggagtacgaactcggcgtgcagatcatcgaggcgcgcgaccagcacgcgttcggcttcgatctgctcgatccgaccaagctgattccggaggaaacggtgccggtgaagctgatcggcaagatgacgctcaatcgcaatccggacaatttcttcgcggaaaccgagcaggtggcgtttcatccggggcacctcgtgccgggcatcgacttcaccgacgatccgctgctgcagggccggctcttctcgtacaccgacacgcaactgagccgtctcggcgggccgaacttccacgagctcccgatcaaccggccggtgtgcccgttcgcgaatctgcagcgcgacgcgatgcaccggcagacgatcgacgtcgggcaggcgtcgtacgagccgaattcgctgaacggcggctggccgaaggaaaccgatcccgccgggcgggacggcggcttcgatagctacccggaggcggtcgagggcgcgaaggtgcgcgtgcgcagcggatcgttcgccgatcatttctcgcaggccgcgctgttctatcagagcatgagcgacgtcgagcggcggcacatccgcgatgcataccgcttcgagctcggcaaggtgacgcggcccgagattcgcgcgcgcgtcgtcgacgagatcctcgcgcgcttcgatgcgggcctcgccgcggaagtggccgaggggctcggcctgccgccgccgcccacgagcgcgccggcgatcgtcgcgcagccgctgtcgcccgcgctcagcctgctcacgcgcggcaagcgcagcgtgcgctcgcgcaaggtcgcgctcgtcgcgacgccgggcgcggacacgcgcctcatcgagcgcgtgcggcgcgcgctgaccgatgcgcgcgcggtgccggtgctcgtcgcgccgacgctcgcgcggatcggcgaactcacgcccgaggcgacgctcgccggcatgccgtcggtgatgttcgacgcggtgttcgtctgcggcggcgacggcgacgggcgcgacctcgtgcattcgagcgacgcgcggcatttcctgcaggaggcgttcaagcacctgaaggcgatcgccgccgtgggctccgggcgtcagctgctcggcgccgcgcatctgccggagcagggggacggcgtgtgcgtcgggcacgcggcggatctcgatcaggtggtcgcgaagttcttcgatgcgttgtccgagcaccgcgtctggtcgcgcgagccgctcgcgcagggcgtgcccgcgtag

SEQ ID NO: 42878 - protein, 708 aa, Burkholderia pseudomallei K96243
MADSDRNAPHETPRAAQPDDARADRKSQDLEPYRSKPQGEALRTNQGVRIADDQNTLRAGARGPSLLEDFIMREKITHFDHERIPERVVHARGSAAHGVFRVYESMAEYTKAAFLQDPAKETPVYVRFSTVQGPRGSADTVRDVRGFAVKFYTDEGNYDLVGNNMPVFFIQDAIKFPDFVHAVKPEAPNEMPTGASAHDTFWDFVSLVPESAHMVAWLMSDRAIPRSFRTMEGFGVHTFRFVNAQGVARFVKLHWRPVLGSYSLLWDEAQKIAGHDPDFHRRDLWEAIERGDYPEYELGVQIIEARDQHAFGFDLLDPTKLIPEETVPVKLIGKMTLNRNPDNFFAETEQVAFHPGHLVPGIDFTDDPLLQGRLFSYTDTQLSRLGGPNFHELPINRPVCPFANLQRDAMHRQTIDVGQASYEPNSLNGGWPKETDPAGRDGGFDSYPEAVEGAKVRVRSGSFADHFSQAALFYQSMSDVERRHIRDAYRFELGKVTRPEIRARVVDEILARFDAGLAAEVAEGLGLPPPPTSAPAIVAQPLSPALSLLTRGKRSVRSRKVALVATPGADTRLIERVRRALTDARAVPVLVAPTLARIGELTPEATLAGMPSVMFDAVFVCGGDGDGRDLVHSSDARHFLQEAFKHLKAIAAVGSGRQLLGAAHLPEQGDGVCVGHAADLDQVVAKFFDALSEHRVWSREPLAQGVPA

SEQ ID NO: 42879 - DNA, 2160 bp, Nocardia farcinica IFM 10152
  CDS (1)..(2160): transl_table=11
atgactgggcacacccccgacacccccgacaatgccgccgacgccgaccacgccgccggcggagcggatcgcaagcagcgtcagctcgacgcccaccgggtcgaccgggagcagggccacctcaccacccagcagggcgtgcgagtgcgccacaccgacgacgcgctctcggccggagcccgcggccccacgctgctcgacgacttccatgccagggagaagatcacccacttcgatcacgagcgcattcccgaacgcgtggtgcacgcgcgcggcgccggtgcctacggctacttccagccctacgacgaccggctggccgaatacaccgtcgcgaagttcctgaccgatcccgccgaacgcaccccggtgttcgtgcgcttctccaccgtcgccggttcccgtggttcggccgacaccgtgcgcgacgtgcgcggtttcgcgaccaagttctacacctcgcagggcaactacgacctggtcggcaacaacttcccggtgttcttcatccaggacggcatcaagttccccgacttcgtgcacgcggtgaaacccgagccgcacaacgagataccgcaggccgcctcggcgcacgacaccctgtgggacttcgtgtcgctgcagccggagaccctgcacgcgatcatgtggctgatgtcggaccgggcgctgccgcgcagctaccggatgatgcagggcttcggcgtgcacaccttccggttcctcgacgccgcgggcacgccgaccttcgtgaagttccactggacgcccaagctcggggtgcactcgctggtgtgggacgaatgccagcagatcgccgggcgcgaccccgactacaaccgccgcgatctgtgggactgcatcgaggccgggcactatccggagtgggagctgggcgtgcagctcatcccggtggagaaggagttcgacttcgacttcgacctgctcgacgccaccaagctggtccccgaggaacaggtgcccgtgctgccggtgggccggatggtgctcgaccgcaacccggacaacttcttcgccgagaccgagcaggtcgccttccacaccgccaacctggtaccgggcatcgacttcaccgacgacccgctgctgcaactgcgcaacttctcctatctggacacccagctgatccggctcggcggtcccaacttcgcccagatcccgatcaaccgcccggtcgccgatgtgcgcaaccaccagcaggacggctacggccagcacgccatcccgcgcgggcaggcgagctacaccgtcaacagcatcggcggcggctgccccgtcgtgggcggcgacggctcctacgagcactacccgcggcaggtggacggccgggcgcagcgccggcgcgccgagagcttccgggagtactaccggcagccgcggatgttctggcgcagcatgtccgcaccggaggccgaacacatcgtggaggccttcgccttcgaactcggcaaggtgcagcgggtggagatccgcgagcgcacgctcggccagctggtgcgcatcgaccccgacctggccgtgcgggtggcgggccggctcggtctgcccgcgccgccgccggaccccgaggccggcaccgatgccttcgtctccccggccctctcgcaagcccacaccgccaaggacagcatcgccacccggcaggtcgcggtgctggccgccgacggagtggacgcggcgggggtgcgggcgctgcgctcggcgctcaccgaacgcggcgcgatcgtggaggtgatcgcctcgcacggcggcatggtgcacgccgacggcggcgacggcgacaccctgccggtcgatcgcacactgatgacggtggcctcggtgctctacgacggcgtcgtggtcgccggcgggcagaccggggtggagacgctgacacgcaacggcgaggcggtgcatttcgtcctcgaggcgttcaagcacgccaaaccggtcgcggcgttcggtgcgggtgtctcgctgttgcggatcgcgggcatcctcgacgcggcgcgcgcacacgacgccgacccggctaccggtgtgatcaccaccgaggcgcgcggtgacggcctcgacgaggagttcgtgaccgatctggcgcgggcactggcgaaccatcggacgtggcagcgggcgacctcggcgattccggcataa

SEQ ID NO: 42880 - protein, 719 aa, Nocardia farcinica IFM 10152
MTGHTPDTPDNAADADHAAGGADRKQRQLDAHRVDREQGHLTTQQGVRVRHTDDALSAGARGPTLLDDFHAREKITHFDHERIPERVVHARGAGAYGYFQPYDDRLAEYTVAKFLTDPAERTPVFVRFSTVAGSRGSADTVRDVRGFATKFYTSQGNYDLVGNNFPVFFIQDGIKFPDFVHAVKPEPHNEIPQAASAHDTLWDFVSLQPETLHAIMWLMSDRALPRSYRMMQGFGVHTFRFLDAAGTPTFVKFHWTPKLGVHSLVWDECQQIAGRDPDYNRRDLWDCIEAGHYPEWELGVQLIPVEKEFDFDFDLLDATKLVPEEQVPVLPVGRMVLDRNPDNFFAETEQVAFHTANLVPGIDFTDDPLLQLRNFSYLDTQLIRLGGPNFAQIPINRPVADVRNHQQDGYGQHAIPRGQASYTVNSIGGGCPVVGGDGSYEHYPRQVDGRAQRRRAESFREYYRQPRMFWRSMSAPEAEHIVEAFAFELGKVQRVEIRERTLGQLVRIDPDLAVRVAGRLGLPAPPPDPEAGTDAFVSPALSQAHTAKDSIATRQVAVLAADGVDAAGVRALRSALTERGAIVEVIASHGGMVHADGGDGDTLPVDRTLMTVASVLYDGVVVAGGQTGVETLTRNGEAVHFVLEAFKHAKPVAAFGAGVSLLRIAGILDAARAHDADPATGVITTEARGDGLDEEFVTDLARALANHRTWQRATSAIPA

SEQ ID NO: 42881 - DNA, 2055 bp, Desulfitobacterium hafniense DCB-2
  CDS (1)..(2055)
atggagaatcagcaaacaaaccagaaatccttagatcttgatgccgctcgggtcagtcataacaaggggtatctcactaccaaccagggggtcggggttagcaatacggatgactctctcaaagcaggcaaacggggccctaccctcatggaggattttatctttcgggaaaaggttacccattttgaccatgaacggattcccgagcgggttgttcacgcccggggctcaggtgcccatggttacttccaggtttacgagaacctgtctcatctgaccaaggctcattttctcagcgatcccaatctgattacgccggtcttcgtccgtttttccaccgttgccgggtttcgcggctcttcggatacggtgcgggatgtccgggggtttgcggttaaattctacacacaggaaggcaattatgatatcgtgggcaacaacatgccggtattctttattcaggatgctattaagttccccgatctcatccattccctaaaacctgagcccaacaatgagatgccccaggcggcctcagcccacgacaccttctgggactttgtggtgaatactccggagaccatgcacaatgtcatgtggctgatgtctccccgcgctgttcccaaaagctttcgcatgatggaaggctttggcatcaataccttccgtctggtcaacgccaaaggtgaatttaaatttgtaaaatttcactggaagcctgttctgggtgtccattccctggtctgggatgaagctcagaaggtggccggcaaggatcctgacttcaaccgcagggacctttgggaaactattgagcatggccaggccgtcgaatttgaacttggcattcaggtgctgaagccggaggatgagttcaggtttgatttcgatattctggaccctaccaagctttggcctgaggaattaatccccgttcagaaaatcggcaagatgacactgaaccagaacccggacaatttcttcgccgaaacggaacaggtggctttttgtccggccaatgtagtgcccggtattgatttcagcaatgatcctttgctccagggccggctgttctcctatctggacactcagctctctcgtctgggaggtcccaacttccaccagcttcccattaaccgtcccctgcccaaggtaaacaacaaccaacgggacggcatgcaccgcatgaccattgacgagggacagaccagctactatcccaactccttgaataagggtgagcctcacgccgcccgcgctggggaaagtcacttcgaacactatcaggaaaaagtggatggccatgttatccgggagcgcagcgagagcttccgggatcactacacccaaccggctatgttttggaacagtatgtccgactgggaaagacaacacatcatcgatgctttccgattcgagctgggcaaatgcaagcataagcatacccaccaaaagcttgtggatatgctgggcaacgtggatccggagctggcccaaaaggtggcggagggcttaggggccacacctccggccaacggggccaatcccaccacggcttcttctcccgctctcagtatggccaataccgccaagagcccgaaaaccagaaaagtggctgtcctgcttgaaagcggtttcgataaagctcagtttgatgctcttaccgctacccttattgctgccggcgcttgttttgatgtggtgtcctgtaagctgggaccggttactgccggtgataacggcagggtagaaggcaaccaaacctacgctaccacagcttcggtcttttacgatgccgtttatatccccggcggttcccacactgaggccctcaaaggctcggcggatgtaaagggtttcctcctggacacctttaaccattataagaccattgggctaagcggtgaggcgtcggccctgctgggcctgttgccttccggacaaaagccggcgccaggtatcgtctgcgagtcggccggaaacatggaaatctatgccaacaacttcctggcagctctcacaacaggccgccatttcgagcggaatgtccactaa

SEQ ID NO: 42882 - protein, 684 aa, Desulfitobacterium hafniense DCB-2
MENQQTNQKSLDLDAARVSHNKGYLTTNQGVGVSNTDDSLKAGKRGPTLMEDFIFREKVTHFDHERIPERVVHARGSGAHGYFQVYENLSHLTKAHFLSDPNLITPVFVRFSTVAGFRGSSDTVRDVRGFAVKFYTQEGNYDIVGNNMPVFFIQDAIKFPDLIHSLKPEPNNEMPQAASAHDTFWDFVVNTPETMHNVMWLMSPRAVPKSFRMMEGFGINTFRLVNAKGEFKFVKFHWKPVLGVHSLVWDEAQKVAGKDPDFNRRDLWETIEHGQAVEFELGIQVLKPEDEFRFDFDILDPTKLWPEELIPVQKIGKMTLNQNPDNFFAETEQVAFCPANVVPGIDFSNDPLLQGRLFSYLDTQLSRLGGPNFHQLPINRPLPKVNNNQRDGMHRMTIDEGQTSYYPNSLNKGEPHAARAGESHFEHYQEKVDGHVIRERSESFRDHYTQPAMFWNSMSDWERQHIIDAFRFELGKCKHKHTHQKLVDMLGNVDPELAQKVAEGLGATPPANGANPTTASSPALSMANTAKSPKTRKVAVLLESGFDKAQFDALTATLIAAGACFDVVSCKLGPVTAGDNGRVEGNQTYATTASVFYDAVYIPGGSHTEALKGSADVKGFLLDTFNHYKTIGLSGEASALLGLLPSGQKPAPGIVCESAGNMEIYANNFLAALTTGRHFERNVH

SEQ ID NO: 42883 - DNA, 1494 bp, Nostoc punctiforme PCC 73102
  CDS (1)..(1494)
atgactgaaccccaaaacttgacaactgctgatggtattccagttagcgataaccagaactcactcactgctggagcgcgtggccctgtattaatccaggatttccaccttatagaaaagctggctcatttcaacagagaacgtattcctgaaagagttgttcacgctaaaggtgctgctgctcacggcactttgactattaccaatgacattacccgctacagtaaagccaaacttttttctgaaattggcaagaaaacggaacttatcttgcgtttttctacagttggcggagaaaaaggttcagcagatgccgagcgtgaccctagaggtttttccctcaagttttatactgaggagggtaactgggatcttgtaggtaacaatacccctattttcttcatccgcgaccctttgaagtttcctgattttatccatacccaaaagcgcaatccgcaaaccaattgcaaagaccagaatgcaaagtgggatttttggtcactcagtccagaatcgcttcaccaggtgacgatcctcttttcagaccggggaattcccaaaacccatcgacacatggacggttttggtagccacaccttcagtttaattaatgccgagggcgatcgcgtttggtgtaaatttcactttaagacgctgcaaggacatcaaaccttgacagaggaagaatccgctaagattaagggcgaagatcccgatcatgcgactcacgatttgtttgaagcgatcgctaaaaaagactatcctaagtggcggatgtgtattcaggtgatgaccgaggagcaagcggaaaaacatcctgacaatccttttgacttgaccaaagtttggaaacaaggcgaatatcctttaattgaagtcgggatattagagctaaatcgtaacccagagaattattttgccgaagttgagcaagccgcttttagccctagtgcagtggttcctggcgttagtttctctccagacaaaatgctgcaagctcgaattttttcttacccagatgctcaacggtatcgcttgggtggtaactatcagcaactacccgttaaccagcccaaatgtccagtgatgcattatcagcgagatggctttatggcatcggggaacaacggcggtagcgttcctaactatgaaccgaatagtgctgagggtacgcccaaagaaaatccagcttatgcagaaccacctagtcatttgggcgatgtcacagtcgatcgttacagtcatcgtgaaggaaacgacgattatactcaagcaggtaatttgtatcggttactaactcctgagcagcaggagcgtcttgctaaaaatattgtcggcagtctctctcaagcaagagaggacatccaaatgcgtcaactttgccacttcttccgggcagatgtttcttatggtcgtcgtgtagctgaaggattgggcattgcgatcgatccttcaatgttttctcatgatgctcaacctgtaggtaactggtag

SEQ ID NO: 42884 - protein, 497 aa, Nostoc punctiforme PCC 73102
MTEPQNLTTADGIPVSDNQNSLTAGARGPVLIQDFHLIEKLAHFNRERIPERVVHAKGAAAHGTLTITNDITRYSKAKLFSEIGKKTELILRFSTVGGEKGSADAERDPRGFSLKFYTEEGNWDLVGNNTPIFFIRDPLKFPDFIHTQKRNPQTNCKDQNAKWDFWSLSPESLHQVTILFSDRGIPKTHRHMDGFGSHTFSLINAEGDRVWCKFHFKTLQGHQTLTEEESAKIKGEDPDHATHDLFEAIAKKDYPKWRMCIQVMTEEQAEKHPDNPFDLTKVWKQGEYPLIEVGILELNRNPENYFAEVEQAAFSPSAVVPGVSFSPDKMLQARIFSYPDAQRYRLGGNYQQLPVNQPKCPVMHYQRDGFMASGNNGGSVPNYEPNSAEGTPKENPAYAEPPSHLGDVTVDRYSHREGNDDYTQAGNLYRLLTPEQQERLAKNIVGSLSQAREDIQMRQLCHFFRADVSYGRRVAEGLGIAIDPSMFSHDAQPVGNW

SEQ ID NO: 42885 - DNA, 1491 bp, Actinobacillus pleuropneumoniae serovar 1 str. 4074
  CDS (1)..(1491)
atgaacaacggtgcgcctgttgttgataaccaaaacagcatgactgcgggtcctcgtggtccgttacttgctcaagacttatggttaaacgaaaaattagccaacttcgtacgtgaagtgattcctgagcgtcgtatgcacgcgaaaggctccggtgcattcggtaaatttaccgtaacgcacgatattactcaatatactaaagcggcaatctttagtgaagtgggtaaagaaaccgaattattcgcacgttttactaccgtagccggtgaacgtggtgcggcagatgctgagcgtgatattcgtggtttcgcagttaaattctataccgaacaaggtaactgggacttcgtaggtaacaatacgccggtattcttcttacgtgatccgcgtaaattcccggatttaaacaaagcggttaaacgtgaccctcgcacaaatatgcgtagtgcgacaaacaactgggacttctggacattattacctgaagcgttccaccaagtaacgatcgtaatgtcagagcgcggtatccctgcttcatatcgtcatatgcacggttacggttcacacacatatagcttaatcaatgcaaataacgaacgtttctgggtaaaattccacttccgtaccgaacaaggtattaaaaacttaaccaacgaagaagcggcggcaatcatcgcaaacgatcgtgaatcacaccaacgtgatttatacgagtcaatcgaaaaaggcgatttcccgaaatggaaactttacattcaagtaatgcctgaagcggaagcggaacaagtggatttccacccgttcgatttaaccaaaatctggtcgaaaaaagattatccgttaatcgaagtgggcgtgatggaattaaaccgtaacccggcaaatttctttgccgacgttgaacaatccgcatttgctccaagcaacttggtaccgggtatcagcgtatcgccggatcgtatgttacaagcgcgtttatttaactatgcagacgcacaacgttaccgtttaggtgtaaaccaccaccaaattccggtaaacgcacctcgttgcccggttcacagcaatgcgcgtgacggtcaaagtcgtgtagacggtaactacggttcaaccttacattatgaaccgaacagcttcggccaatggcaagaacaggcgcaatttgccgagccgcctcttaaaattaacggcgatgcggcattctgggattatcgtcaagatgactcggattacttcagccaaccgcgtgcattatttaacttaatgacggagaaagaaaaacaatctctctttaaaaatactgccgaaggtatgggtgatgcgttagatttcatcaaatatcgtcatattcgtaactgctacttctgtgaccctgcatacggtgaaggcgtagcgaaagcgttaggaatgacggttgccgatgcaatggaagcatacaatacggatccggcaatgggtcagccgggtttaatcaaacctaacttctaa

SEQ ID NO: 42886 - protein, 496 aa, Actinobacillus pleuropneumoniae serovar 1 str. 4074
MNNGAPVVDNQNSMTAGPRGPLLAQDLWLNEKLANFVREVIPERRMHAKGSGAFGKFTVTHDITQYTKAAIFSEVGKETELFARFTTVAGERGAADAERDIRGFAVKFYTEQGNWDFVGNNTPVFFLRDPRKFPDLNKAVKRDPRTNMRSATNNWDFWTLLPEAFHQVTIVMSERGIPASYRHMHGYGSHTYSLINANNERFWVKFHFRTEQGIKNLTNEEAAAIIANDRESHQRDLYESIEKGDFPKWKLYIQVMPEAEAEQVDFHPFDLTKIWSKKDYPLIEVGVMELNRNPANFFADVEQSAFAPSNLVPGISVSPDRMLQARLFNYADAQRYRLGVNHHQIPVNAPRCPVHSNARDGQSRVDGNYGSTLHYEPNSFGQWQEQAQFAEPPLKINGDAAFWDYRQDDSDYFSQPRALFNLMTEKEKQSLFKNTAEGMGDALDFIKYRHIRNCYFCDPAYGEGVAKALGMTVADAMEAYNTDPAMGQPGLIKPNF

SEQ ID NO: 42887 - DNA, 2088 bp, Psychrobacter sp. 273-4
  CDS (1)..(2088)
atgaataagaatattgatcatactgaccccgctaaagacatgaatatggaacgtggcaatggtggtgaaacccatcaacgtgccggtgacgacaccaaaatactgactacccagcagggtgtgccaatttcggacaatcaaaactcactcaaagcaggaccgcgcggtccaacgctattagaggatttcgtcttacgtgaaaagattcatcactttgaccatgagcgtattcctgagcgtattgtgcatgcgcgtggtagtgctgcacacggttattttgagctgaccgaatcactagaagaatatactacggctaaaattttgactgagaccggtaagcagacgcctttatttacgcgtttttcgactgttgctggtagtaaaggctcaaaagatacgccacgtgatgtacgtggctttgcagtcaaaatctataccgaagaaggaaactgggatttggtcggtaatgacatgcctattttctttatccaagatgcgatgaaattcccagatcttgtccatgcggttaaacctgaaccggatcgcggtttcccgcaagccgcttctgctcacgatactttttgggatttcgtgtcattaagtcctgaaaccatgcacaacgttatttggttaatgagtgatcgtgggataccgcgtagcttacgcatgatcgaaggttttggtattcatagctatcgtctgattaataaagcgggcaaaagtacctttatgcgttttcactggaaaccggtgcttggtgtgcaatcaacgacatgggatgaagcagtaaaaatctctggtgccgatccagattatcatcgccgcgacttgtttgagtcgattaataatggcgattttcctgaatgggaatttggcgtgcaattattcactgaagaagaagcaagcaaatttccgtttgaccatttagatgccaccaagatgattccagaagaaatggtaccagtcaaaatcgttggaaaaatggtgttaaatcgttatcctgataatttctttgctgaaacggagcaagtagctttctgtccatcgcatgtaccaccgggtatcgattttagtaacgaccccttattacaaggtcgcctattcagctacttagatacccagctgtcacgtttgggctcaccgaactttgctcagattccaatcaatgcaccgaaatgtccatttgccaataatcagcaagatggtcatatgcagatgcaagtgccaaagactcgtgtcctatacgagccacaaagtctagatccaaccagaccacgtgagagtgttaaaagaggctttgcgtcttttgccgagacgctagatgatggtgttaaaggtcgcatacgcgcggagagcttcgctgatcattatagtcagccgcgtatgttctatcgtagccaaacgacaattgagcaagcacacattgcctcagcttatgcctttgagctaggtaaagtagatacggcgcatgtacgcagtcgtacgctcggtcatctacgtaatatcgatgaagatttagcaagtcgtgtggcaaaagcgttgggtatggagttgccggaagctgctgatgctgccgcacctatccaagatatggaaatatctcctgccgtaagaacgattggtctgtcacctaagagcttaaagggtcgcatgattggtattctagtggcggaaggctcaaagcatagtgaaatagaaaagtatgagaaggcggcgcaagcgcaaggtgccagtgtcaaaattattgcaccgaataaagaagtcacattagacgatgatactatcatacaagctgatgagcgcgtagcagggggtccgtccgtgatgttcgatgcggtcgtcagtatcattatgccagaccaagctaaaaagctggctaaagacagtgccacgttagattggtttacggacgcctatgtacactgtaaagcgatttcttattgcggggcaacggatgagtttatcttaagtaagctaccaattgaaaaagatgcgttcgtcacgccattatctgatttggatgtctttattgaaaatgccaaatcgcgtctatgggagcgtgagccaaaggttcgtgaccttgcctaa

SEQ ID NO: 42888 - protein, 695 aa, Psychrobacter sp. 273-4
MNKNIDHTDPAKDMNMERGNGGETHQRAGDDTKILTTQQGVPISDNQNSLKAGPRGPTLLEDFVLREKIHHFDHERIPERIVHARGSAAHGYFELTESLEEYTTAKILTETGKQTPLFTRFSTVAGSKGSKDTPRDVRGFAVKIYTEEGNWDLVGNDMPIFFIQDAMKFPDLVHAVKPEPDRGFPQAASAHDTFWDFVSLSPETMHNVIWLMSDRGIPRSLRMIEGFGIHSYRLINKAGKSTFMRFHWKPVLGVQSTTWDEAVKISGADPDYHRRDLFESINNGDFPEWEFGVQLFTEEEASKFPFDHLDATKMIPEEMVPVKIVGKMVLNRYPDNFFAETEQVAFCPSHVPPGIDFSNDPLLQGRLFSYLDTQLSRLGSPNFAQIPINAPKCPFANNQQDGHMQMQVPKTRVLYEPQSLDPTRPRESVKRGFASFAETLDDGVKGRIRAESFADHYSQPRMFYRSQTTIEQAHIASAYAFELGKVDTAHVRSRTLGHLRNIDEDLASRVAKALGMELPEAADAAAPIQDMEISPAVRTIGLSPKSLKGRMIGILVAEGSKHSEIEKYEKAAQAQGASVKIIAPNKEVTLDDDTIIQADERVAGGPSVMFDAVVSIIMPDQAKKLAKDSATLDWFTDAYVHCKAISYCGATDEFILSKLPIEKDAFVTPLSDLDVFIENAKSRLWEREPKVRDLA

SEQ ID NO: 42889 - DNA, 1515 bp, Methanococcoides burtonii DSM 6242
  CDS (1)..(1515)
atgagtgatgagaaaacttccagtttaactactgcttttggaattccagtcggtgatgatcagaatagcctcacggcaggagagcgtggaccagttctcatacaggacgttcacctattggagaaacttggtcattttaatcgtgaacgtatacctgagcgtgttgtgcatgctaaaggtgcaggggctggcggttattttgaagtgacagctgatgtgaccaaatatacaaaagccaaattcctttcagaaataggcaaacgcactgaggtctttgctcgcttttccactgtaggtggggaaaaaggttctgccgatgcagcaagggatccacgtggttttgctataaagttctacactgaagatggtaaccatgatctcacgggcaacaacacacctgtgttcttcattcgagaccctctgaagtttcctgatttcattcatacacagaagcgaaaccctgctacaaactgcaaagatccaaacatgttctgggactttctgtctctcactccggaatcaattcatcaggtcacgatccttttttcagacaggggtactcctgcaactttccgtaatatgaacggatattcaagtcatacttataagtggtataacgataagggcgaatacttctgggtgcagtatcattttaagactgatcagggtacaaagacccttacacgtgaggaagcagaaaaattaagtgggactgatccggatcatgctgttcgggatctctatgatgctatagaaaagggggattatccttcctggacccttgagatgcagataatgaccccggagcaggctgaagaatatcgctttgacattcttgatataaccaaggtctggccacatggtgatttccctaccatcaagatcggtaaaatggtgcttaataggaatccaaccaattattttgctgaagtggaacaatctgcttttagccctggtaatctggtaccgggtattgatatatctccagataagatgttacaggccagagttttctcatatcatgactctcatgttcatcgtttgggtcccaattatcatcagatccctgtgaatgctcctaaaaatgcacctgaaaccagctatcagcgtgatgggttcatgcgaattgatgccaatggaggaagtggaccaaattactggccaaacagttttggtggtcctgccccggaccctgatgctctgaagccaccattcgaagtttccggtaaagcagatcgtacgccttatgtccactccaatgatgactttgtgcaggcaggtaacctgtatcgtgacgtaatggatgatcaggctcgtgagaaccttgtgggtaatattatttcacatctctcgggtgcacaaaagcgtattcaactcagacagactgctctgttcttcaaagccgatcccgattacggagggcgtgtggctgatggattgggtttggatgtaaaagaaattgagcgtcttgccaatatgacccaaacggaacgtgtaaaagctacagaaaagtaa

SEQ ID NO: 42890 - protein, 504 aa, Methanococcoides burtonii DSM 6242
MSDEKTSSLTTAFGIPVGDDQNSLTAGERGPVLIQDVHLLEKLGHFNRERIPERVVHAKGAGAGGYFEVTADVTKYTKAKFLSEIGKRTEVFARFSTVGGEKGSADAARDPRGFAIKFYTEDGNHDLTGNNTPVFFIRDPLKFPDFIHTQKRNPATNCKDPNMFWDFLSLTPESIHQVTILFSDRGTPATFRNMNGYSSHTYKWYNDKGEYFWVQYHFKTDQGTKTLTREEAEKLSGTDPDHAVRDLYDAIEKGDYPSWTLEMQIMTPEQAEEYRFDILDITKVWPHGDFPTIKIGKMVLNRNPTNYFAEVEQSAFSPGNLVPGIDISPDKMLQARVFSYHDSHVHRLGPNYHQIPVNAPKNAPETSYQRDGFMRIDANGGSGPNYWPNSFGGPAPDPDALKPPFEVSGKADRTPYVHSNDDFVQAGNLYRDVMDDQARENLVGNIISHLSGAQKRIQLRQTALFFKADPDYGGRVADGLGLDVKEIERLANMTQTERVKATEK

SEQ ID NO: 42891 - DNA, 1527 bp, Haemophilus influenzae R2846
  CDS (1)..(1527)
atgagttctcaatgccctttctcgcacttagctgcgacaaacttaacaatgggtaacggtgcacccgttgctgataaccaaaacagcttaacagctggtccgcgtggtccattactttcacaagatttatggcttaacgaaaaattagctgatttcgtacgtgaagtgatcccagagcgtcgtatgcacgctaaaggttctggtgcatttggtacctttactgtgacacacgatattactaaatatactcgtgcaaaaatttttagtgaagtgggtaaaaaaacggaaatgttcgcacgttttaccaccgtggcaggcgaacgtggtgcagcagatgctgagcgtgatattcgtggttttgcattaaaattctatactgaagaaggtaactgggatttagtaggtaacaatacgccagtattcttcttacgtgatccacgtaaattccctgacttaaacaaagcggtaaaacgtgatccgcgtactaatatgcgttcagcaactaataactgggatttctggacattattaccagaagcattacaccaagtaactgttgtaatgagtgatcgtggtattccagcaagttatcgtcatatgcacggtttcggttctcacacttatagtttctggaatgaagcaggcgaacgtttttgggtaaaattccacttccgtactcaacaaggcattaaaaatttaacaaatgctgaagcagcagaaattattgcaaatgaccgtgaaagccatcaacgtgatttatatgaagcgattgaacgtggtgatttccctaaatggacattatttgtacaaattatgccggaagcagatgcggaaaaagtgccttatcacccattcgacttaactaaagtatggccgaaaaaagactatccattaattgaagtcggcgagtttgaattaaaccgtaacccagaaaacttcttcgctgatgtagaacaatctgcatttgcaccaagtaacttggttccgggtattggcgcaagccctgacagaatgttacaagcccgtttatttaactatgcggatgcacaacgttaccgtttaggtgtgaactaccgtcaaattccagtaaaccgtccacgttgcccagttcatagcaaccaacgtgatggtcaaggtcgtgtagatggcaactacggtagcttgccacactacgagccaaacagcttcagccaatggcaacaacaaccagactttgctgaaccaccacttcgtatcaacggagatgcagcacactgggattatcgtaacgatgataacgattacttcagccaacctcgtgcattatttaacttaatgaatgcagagcaaaaacaatcattattcaacaacacggcagcagcaatgggcgatgcacctgatttcatcaaatatcgtcatattcgtaactgccactggtgtgatgccgcatacggtgaaggcgttgcgaaagcattaggtttaaccgttgaagatgcattaaaagctcgtgatactgatcctgcattaggtcaaggtggattgttataa

SEQ ID NO: 42892 - protein, 508 aa, Haemophilus influenzae R2846
MSSQCPFSHLAATNLTMGNGAPVADNQNSLTAGPRGPLLSQDLWLNEKLADFVREVIPERRMHAKGSGAFGTFTVTHDITKYTRAKIFSEVGKKTEMFARFTTVAGERGAADAERDIRGFALKFYTEEGNWDLVGNNTPVFFLRDPRKFPDLNKAVKRDPRTNMRSATNNWDFWTLLPEALHQVTVVMSDRGIPASYRHMHGFGSHTYSFWNEAGERFWVKFHFRTQQGIKNLTNAEAAEIIANDRESHQRDLYEAIERGDFPKWTLFVQIMPEADAEKVPYHPFDLTKVWPKKDYPLIEVGEFELNRNPENFFADVEQSAFAPSNLVPGIGASPDRMLQARLFNYADAQRYRLGVNYRQIPVNRPRCPVHSNQRDGQGRVDGNYGSLPHYEPNSFSQWQQQPDFAEPPLRINGDAAHWDYRNDDNDYFSQPRALFNLMNAEQKQSLFNNTAAAMGDAPDFIKYRHIRNCHWCDAAYGEGVAKALGLTVEDALKARDTDPALGQGGLL

SEQ ID NO: 42893 - DNA, 2139 bp, Methylobacillus flagellatus KT
  CDS (1)..(2139)
atgaagaacaaaacggagaaagtcaaaagccaactggcagggtcaaccgctccagacaagaaaaacaccactgcaaaaacgcgcgatctagagtcgtacaagtcggatgccaccgggcagccactgaggaccaatcagggcgtcaagattgcagacaacaagaactccctgcgtgccggcagccgtgggccctccctgctggaagacttcattctcagggagaagattacccattttgatcatgagcgcatcccggaacgaatcgtccatgcacgtggcgtcggcgcccatggttattttgaatcctatgccgaccactcttcactcaccaaggcgggattcctcggcgaaaaaggcaagcaaaccccggtcttcgtcaggttttccaccgtccagggccccaggggctctgccgacacggtacgggacgtgcgcggctttgccatcaagttttataccgaggagggcaacttcgacctcgtaggcaataatattcccgttttttttatccaggatgccatcaagtttcccgacttcgtccatgcggtcaagcccgagcctcacaatgagatcccgacgggcgccagcgcccacgacaccttctgggattttgtttcgctacagccggagtcggcgcatgccgtcatctgggccatgtccgaccgtgccattcccaggagcttgcgcgccatgcagggatttggcgtccataccttcaggctcatcaatgccaagggcgttgccaagttcgtcaagttcatctggaccccgaagcagggggtgctgtcgctggtatgggatgaagcgcagaagatcgcgggcaaggatcccgacttccaccggcgcgacctgggcgaatccattgagctcggcaattatcctgaatgggaattcggcgtgcagatcattgacgaacaagacgagcacagcttcgatttcgacatcctcgaccccaccaagatcgtgcccgaagaactggttccgatcacgccgctgggcaagctggtactgaatcgcaacccggataatttttttgccgagaccgagcaaatcgccttttgccccgggcacatcgtgcccggcctggacttcagcaacgatccgctcctgcaaggccgtctgttctcttacacggatactcagctgagccggctgggcggacccaatttccatgaaatccccatcaacaagccggtatgccctttccacaacaaccagcgggacgcattgcacagaacgacgatacacaagggccaggctgcctacgagcctaactcgatcgacggaggctggccgcaggaaacgccgccagcagccaaggatggcggcttcgagagctactacgagcgcatcgatgcacacaaggtcagggaaaggtcggcgtcgttcaaggaccatttctcccaacccaggcttttttacaagagcttgagcgccacggaacaactacacattgcagaggcttacagcttcgagctgggcaaggtcaagaggcaacatatccgggaaagagtcgtcaacgagatcctgtccaatatcgacctgggcctggcaggcaccgttgcgcagaagctgggcattccggcgcccaagaaaccgaccatcaaggtgcccgaacccagcctgaagcaatcgtcggcgctgagccagatgaagctgactccccaggacctgcaggggaagaaaatcgcggcactggtgttcgacggcttgtccgccaaggccatccgcccgctgcttgactgggcacaacagcacagcatcgcgctacagcttcttggccccacttctgcgccagtcaagaccagcgagggaaaatcgttggcggtggatggctcaatcaagggagaaccctcgattttgttcgacgcggcgatagtaccggatatcccgacggaccatacggcgctactagacaatggacaagccgtgcacttcatcctcgaaacattcaagcacctgaagccgctggcactgaccgggccaggcgcgagcctgataaaagcacttcatctggaggaagatgcgggcttgttgcaggccaaggatttcagtgcagtacgcgagcagttcgagcgcgccttgctggctcatcgtgtatgggagcgggaaaagaaggccgaacgcatcccggcatga

SEQ ID NO: 42894 - protein, 712 aa, Methylobacillus flagellatus KT
MKNKTEKVKSQLAGSTAPDKKNTTAKTRDLESYKSDATGQPLRTNQGVKIADNKNSLRAGSRGPSLLEDFILREKITHFDHERIPERIVHARGVGAHGYFESYADHSSLTKAGFLGEKGKQTPVFVRFSTVQGPRGSADTVRDVRGFAIKFYTEEGNFDLVGNNIPVFFIQDAIKFPDFVHAVKPEPHNEIPTGASAHDTFWDFVSLQPESAHAVIWAMSDRAIPRSLRAMQGFGVHTFRLINAKGVAKFVKFIWTPKQGVLSLVWDEAQKIAGKDPDFHRRDLGESIELGNYPEWEFGVQIIDEQDEHSFDFDILDPTKIVPEELVPITPLGKLVLNRNPDNFFAETEQIAFCPGHIVPGLDFSNDPLLQGRLFSYTDTQLSRLGGPNFHEIPINKPVCPFHNNQRDALHRTTIHKGQAAYEPNSIDGGWPQETPPAAKDGGFESYYERIDAHKVRERSASFKDHFSQPRLFYKSLSATEQLHIAEAYSFELGKVKRQHIRERVVNEILSNIDLGLAGTVAQKLGIPAPKKPTIKVPEPSLKQSSALSQMKLTPQDLQGKKIAALVFDGLSAKAIRPLLDWAQQHSIALQLLGPTSAPVKTSEGKSLAVDGSIKGEPSILFDAAIVPDIPTDHTALLDNGQAVHFILETFKHLKPLALTGPGASLIKALHLEEDAGLLQAKDFSAVREQFERALLAHRVWEREKKAERIPA

SEQ ID NO: 42895 - DNA, 1470 bp, Exiguobacterium sp. 255-15
  CDS (1)..(1470)
atgagtgaaaaacgattaaccacaaaccagggtgtcccgattggtgacaatcagaattcgcgtacggccggtcgtcgcggtccaacactgcttgaagactatcaactgattgagaaaatggcccatttcgaccgggaacgtgttcctgagcgtgttgtacacgcccgcggttttggtgcacacggcgtcttcacggtaaaaaattcgatgaagaaatatacaaaagcggcattccttcaaaacgaagggaccgaggttcctgtattcgcccgtttctcaaccgttattcacggtacacattctcctgaaacgttacgtgatccacgtggcttctcggttaagttctatacagaagaaggaaactgggatttcgtcggaaacaacttaccggtcttctttattcgcgattcgatgaagttcccggatatggtccactcgctgaaaccggatccacgcacgaatattcaagaccctgaccgctactgggacttcatgacattacgcccggaatctacaaatatgttgatgcacctctttacggatgagggaattccggcaagctaccgtaaaatgcgcggttcgtccgtccatgcttttaaatgggtgaacgctcacggcaatacggtttatgtcaagttacgttgggtgccaaaagtcggtgttcataacctgtcagcagatgaagcgacagagattcaaggaaaagactttaaccatgcatcaaacgacacgtatcaggcgattgaagacggagaattcccggagtgggatctgttcgtccaagttcttgatccggctgatgtcgacaacttcgacttcgatccactcgatgcaacaaaagattggtttgaagatgtcatcccgttccaacacgtcggaacgatggtattaaacaaaaacgtcgacaactactttgctgaaacggaatcggtcggctttaacccgggtgtactgatcccaggcatgttgccgtcagaagataaattgctccaagggcgtctcttctcgtattccgatacacagcgttaccgtatcggaacgaactatcaacagttgccgattaactgcccgttcgctcaggtcaacaactatcaacgtgacggtgcaatgccggtcggacaacaaacaagcccggtcaactacgaaccaaaccgttaccaggacgagccgaaacaaacgccggaatacacggaagaaaaccagccgttgtatgatgacattcacggtcgtcttgaaatcgaaaaaacaaataacttcggtcaagccggtgaagtgtaccgtcgtatgacagaagaagaacaaacggcactcctgaacaatttagtggatgacttaaaacaagtccgccatgaaaacactgtcttgcttgccatctgtaacttctaccgtgcggacgaatcgctcggcaagaaattatcagaagcgttacaagtcgatatccaaccgttcttgcaacagatgcaaaaataa

SEQ ID NO: 42896 - protein, 489 aa, Exiguobacterium sp. 255-15
MSEKRLTTNQGVPIGDNQNSRTAGRRGPTLLEDYQLIEKMAHFDRERVPERVVHARGFGAHGVFTVKNSMKKYTKAAFLQNEGTEVPVFARFSTVIHGTHSPETLRDPRGFSVKFYTEEGNWDFVGNNLPVFFIRDSMKFPDMVHSLKPDPRTNIQDPDRYWDFMTLRPESTNMLMHLFTDEGIPASYRKMRGSSVHAFKWVNAHGNTVYVKLRWVPKVGVHNLSADEATEIQGKDFNHASNDTYQAIEDGEFPEWDLFVQVLDPADVDNFDFDPLDATKDWFEDVIPFQHVGTMVLNKNVDNYFAETESVGFNPGVLIPGMLPSEDKLLQGRLFSYSDTQRYRIGTNYQQLPINCPFAQVNNYQRDGAMPVGQQTSPVNYEPNRYQDEPKQTPEYTEENQPLYDDIHGRLEIEKTNNFGQAGEVYRRMTEEEQTALLNNLVDDLKQVRHENTVLLAICNFYRADESLGKKLSEALQVDIQPFLQQMQK

SEQ ID NO: 42897 - DNA, 1467 bp, Listeria monocytogenes str. 1/2a F6854
  CDS (1)..(1467): transl_table=11
atgacagatagaaaaaatttaacgacgaatcaaggtgtgccagttggtgataaccaaaattcaatgacagcgggacgtaaaggacctactttgatagaagattatgtgcttattgagaaattggcgcattttgatagagaacgagttcctgagagggttgtacatgctcgtggtgctggtgcgcacgggaaatttgttactaaaaaaagcatgaaaaaatatacaatggctaaatttttgcaagaagaaggaacggaaacagaggtttttgctcgtttttcaacagtaattcatgggcaacattctccagaaacattacgtgatccacgcggtttctccgttaagttttatacggaagagggaaattatgactttgtcggaaataatttgccagtatttttcattcgtgatgcgattaagtttccagatgttattcattccttgaagcctgacccgcgcacaaatattcaagatggcaatcgttactgggatttctttagccttacaccggaagctacgacgatgattatgtacttattcagtgatgaaggaacgccggcttcttaccgcgaaatccggggctctagtgttcatgcgttcaaatggattaacgaagaaggcaaaacagtttatgtaaaattgcgctgggttccaaaagcaggaatagtgaacctttcgacggagcaagcttctcaaattcaagcaaaagaatttaaccatgcaagtcgtgatttgtacgaagcaattgaaaatggagactatcctgaatgggatttatatgtgcaagtgttggatccgaaagacttagatagctttgatttcaatccattagatgctacaaaagattggtttgaagatgtattcccttatgaacacgtaggaacaatgacgctagaccgcaacccagataatatttttgcggagacagaatcagttgggtttaaccctggtgtacttgtacgcggaatgctaccttctgaggatcgtttgttgcaaggtcgtttattctcgtattcagatacgcaaagacatcgcgtggggccaaactacttacaactgccaattaacagcccgaaagcgcctgtcgctaacaaccaacgtgacggtcatatgccatttaaacaacaaacgagctcgattaattatgagccaaatagctatgatacagaaccaaaagaaaatccagcatttatcgaaccggagcaagaaatccgtggtgatgtagctggtcgtctgattgctgaaaaaccaaataactttggtcatgcaaaagaagtatgggatcgctattcagatgctgaacgtgcggcgcttgtgaaaaacattgttgacgattggtctgcagtgcgtgaggatattaaaatccgcaacctacgtaatttctatcaagtagatccggaattcgctagtcgagttgctgcgagaactggtattaatcttgaagaacatgtaactgatttaaaataa

SEQ ID NO: 42898 - protein, 488 aa, Listeria monocytogenes str. 1/2a F6854
MTDRKNLTTNQGVPVGDNQNSMTAGRKGPTLIEDYVLIEKLAHFDRERVPERVVHARGAGAHGKFVTKKSMKKYTMAKFLQEEGTETEVFARFSTVIHGQHSPETLRDPRGFSVKFYTEEGNYDFVGNNLPVFFIRDAIKFPDVIHSLKPDPRTNIQDGNRYWDFFSLTPEATTMIMYLFSDEGTPASYREIRGSSVHAFKWINEEGKTVYVKLRWVPKAGIVNLSTEQASQIQAKEFNHASRDLYEAIENGDYPEWDLYVQVLDPKDLDSFDFNPLDATKDWFEDVFPYEHVGTMTLDRNPDNIFAETESVGFNPGVLVRGMLPSEDRLLQGRLFSYSDTQRHRVGPNYLQLPINSPKAPVANNQRDGHMPFKQQTSSINYEPNSYDTEPKENPAFIEPEQEIRGDVAGRLIAEKPNNFGHAKEVWDRYSDAERAALVKNIVDDWSAVREDIKIRNLRNFYQVDPEFASRVAARTGINLEEHVTDLK

SEQ ID NO: 42899 - DNA, 1467 bp, Bacillus cereus G9241
  CDS (1)..(1467): transl_table=11
atgaatccaaataatcgcttaacaacaaaccaaggtgctccagttggagacaatcaaaattctcgtacagctggtcgccgtggaccggtattattagaagactatcatttagtagaaaaattggctcactttgatcgtgaacgtattccagagcgtgttgtacacgcacgtggtgcaggtgctcacggtgtattcgttacgaaaaatagcatgaagcaatatacgaaagcagcatttttacaaaatgaaggaactgaaacgcctgtatttgttcgtttttcaacggttattcatggtcaaggttctccggaaacagctcgtgatccacgtgggttcgctgttaaattttatacagaagaaggaaactatgatatcgtaggtaatcatttaccggtcttcttcattcgtgatgcaattaaattccctgatatggtgcattctttaaaaccagcacctgatacaaatattcaaacaccagatcgttactgggatttcatgacgttaagtccagaatctacacatatgatgacgtgggtattttctgattacggtacaccagcaagctatcgtgaaatggaagggttcggtgtacattcatttaaatggattaatgcagaaggtaaaattgtctacattaaatatcactggaaaccacagcaaggtgtacgtaacttaagtgcaaaagaagtgcaagaagtacaaggaaaagacttcaaccatgcaactcgtgacttattcgatgcaatcgaaaaagggaattatccaaagtgggatttacacgtacaagtgatgcaactagaagaaacggattctttagatttcgatccgttagatccaacgaaagtttggccagaagatcgtttcccgttaatggaagtagggacaatgacgttaaatcgtaacccgaaaaacttctttgcggaagtagaacaagtggcgttctctccaagtgcaactgtaaatggtattgaaccatctgaagataaattattacaaggtcgtttattctcttatccagatacacagcgttatcgccttggtgcaaactacttacaaattcctgtaaactgcccatacgcagctgttcataaccaacaacgtgatggtgcgatgcaaatcaatcaaaacccatctacaatcaattacgaaccgagccgtcatgctgaaaatccagttgaagacccagcttaccgcgattcaactatgaaagtagaaggctatgtatctcgtgaaaaaattgacaaaccaaatgacttcaaacaagcaggtgagcgttaccgttcattctctaaagaagagcaagacaacttaattgccaacttaacaaatgacttaaaagacgtaagtgaacgaacgaaattactagctgtttgtaacttcttccgtgcagatcaagagtacggtatgcgtttagcgcaatcgttaaatgttgatattacgcaatatgtaggaaatgctccgaaataa

SEQ ID NO: 42900 - protein, 488 aa, Bacillus cereus G9241
MNPNNRLTTNQGAPVGDNQNSRTAGRRGPVLLEDYHLVEKLAHFDRERIPERVVHARGAGAHGVFVTKNSMKQYTKAAFLQNEGTETPVFVRFSTVIHGQGSPETARDPRGFAVKFYTEEGNYDIVGNHLPVFFIRDAIKFPDMVHSLKPAPDTNIQTPDRYWDFMTLSPESTHMMTWVFSDYGTPASYREMEGFGVHSFKWINAEGKIVYIKYHWKPQQGVRNLSAKEVQEVQGKDFNHATRDLFDAIEKGNYPKWDLHVQVMQLEETDSLDFDPLDPTKVWPEDRFPLMEVGTMTLNRNPKNFFAEVEQVAFSPSATVNGIEPSEDKLLQGRLFSYPDTQRYRLGANYLQIPVNCPYAAVHNQQRDGAMQINQNPSTINYEPSRHAENPVEDPAYRDSTMKVEGYVSREKIDKPNDFKQAGERYRSFSKEEQDNLIANLTNDLKDVSERTKLLAVCNFFRADQEYGMRLAQSLNVDITQYVGNAPK

SEQ ID NO: 42901 - DNA, 1488 bp, Pseudomonas fluorescens PfO-1
  CDS (1)..(1488)
ttggccgccagcctgctgaccctttccgtgaacgccgcccccctgacccgggataacggtgcggcagtcggcgacaaccagaactcgcaaaccgccggcgccaatggcccggtgctgttgcaggacgtgcaactgatccagaagctgcaacgtttcgaccgtgaacgcattcccgaacgtgtcgtgcatgctcgcggcaccggtgcccatggcacgttcaccacaaccaacgatctgagtgatctgagcaaggccaaggtgtttaccgccggccaggtcacgccggtgttcgtacgtttctcggcggtggttcacggcaatcactctccggaaaccctgcgtgaccctcgggggttcgcaaccaagttctacaccgctgacggcaattgggatctggtgggcaacaactttccgacgttcttcatccgcgatgcgatcaagtttccggacatggtgcatgccttcaagcccgatccgcgtactaaccttgacgatgactcgcgtcgcttcgatttcttctcccatgtaccggaagctacccgcacattgaccgagttgtattccaactcgggcactccggccagctatcgggagatggacggcaatagtgtgcacgcctacaagttggttaacgccaagggcgatgtgcactatgtgaagtttcactggaaaagtttgcaaggcatcaaaaatctcgatccgaaacaagttgagaaagttcaggggcgcgactacagccacatgactcacgacttggtagaaaacattcaaaaaggaaactttcccaagtgggacttgtacattcaagtcttgaatccgcaagacttgtccaagtttgaattcgatcctcttgatgcaaccaagatctggccaggtgttccagagcgaaaagttggacaaatggtgttgaaccgtaatcctgcgaatgtcttccaggaaactgaacaggtcgccatggcgccatcgaatgtggtgccgggcatcgagccttcggaagaccgtctgttgcaaggccggatatttgcctacgccgatacccagatgtatcgccttggcgccaacgccctgcaattgccgatcaatgccgccaaaactgctgtcaacaatggcaatcaggatggcgcgatgaatgccggtgcgagcacctcgggcgtcaactatgagcctagccgtctgcagccgcgtgaagagacggcaggcgcgcgatacagccagaccgcgctgcagggcagcacgcaacaggcgaagatccagcgtgaacagaacttcaagcaggccggagatctgtatcgctcgttcagcaagaaggaacgtcaggatctgatcgagagctttggcggttcgctggcgagtgccgatgacgagagcaagcacatcatgctgtccttcctctataaggcggatccggaatacggcgccggggtgaccaaagtggccaagggtgacctgagtcgggtcaaggcgttggcggccaaactggccgactga

SEQ ID NO: 42902 - protein, 495 aa, Pseudomonas fluorescens PfO-1
MAASLLTLSVNAAPLTRDNGAAVGDNQNSQTAGANGPVLLQDVQLIQKLQRFDRERIPERVVHARGTGAHGTFTTTNDLSDLSKAKVFTAGQVTPVFVRFSAVVHGNHSPETLRDPRGFATKFYTADGNWDLVGNNFPTFFIRDAIKFPDMVHAFKPDPRTNLDDDSRRFDFFSHVPEATRTLTELYSNSGTPASYREMDGNSVHAYKLVNAKGDVHYVKFHWKSLQGIKNLDPKQVEKVQGRDYSHMTHDLVENIQKGNFPKWDLYIQVLNPQDLSKFEFDPLDATKIWPGVPERKVGQMVLNRNPANVFQETEQVAMAPSNVVPGIEPSEDRLLQGRIFAYADTQMYRLGANALQLPINAAKTAVNNGNQDGAMNAGASTSGVNYEPSRLQPREETAGARYSQTALQGSTQQAKIQREQNFKQAGDLYRSFSKKERQDLIESFGGSLASADDESKHIMLSFLYKADPEYGAGVTKVAKGDLSRVKALAAKLAD

SEQ ID NO: 42903 - DNA, 2115 bp, Rhodospirillum rubrum
  CDS (1)..(2115)
atggccaaacgctcaaccgacgccctgaccccggccgaaatcgccgacgccaaaattctgcgcggcaccgggggcgaaacccatcagatcgccgagggcgacacccccgtgctgacgacccagcaggggatcccagtggccgacgatcagaattccctgcgcatcggcccacgtggaccaaccctgctggaagacttcgccttccgcgaaaagatcttccatttcgaccacgagcgcattcccgagcgcatcgttcatgcccgggggttcggcgcccatggcaccttcgaaacctatgaagacctaagcgccctgacctcggccgatatctttcagcgcgccggcgaaaagacccccgccttcgtccgcttctcgacggtggcgggcaatctcggctcgtccgatgtcgcccgcgatgtgcggggattcgccgtcaagctttataccaagcaaggtaattgggacatcgtcggcaacaacatcccggtgttcttcatccaagacgccatcaagtttcccgatctgatccacgccgccaaacaggaacccgacagcggcttcccccaggcgcaaaccgcccacgacaatttctgggacttcatctccctgatgccggaatcgctgcatatggcgttatggatcatgtccgatcgcaccatcccgcgctcgttccgcttcatggaaggctttggcgttcataccttccgactggtcaccgccgagggcaaatccagcttcgtcaaatttcactggaagcccaagcttggcctgcagtcggtggtgtggaacgaggcggtcaagatcaacggcgccgatcccgatttccaccgccgcgacctgtggtcggcgatcaagcgcggcgattatcccgaatgggacttgggtctgcaggtttttgatgacgccttcgccgacagcttccccttcgatgtgctggacgccaccaagctgatccccgaggaattggtgccgatccgcatcgtcggccgcctggtgctagatcgcaccgtcgataacttcttcgccgaaaccgaacaggtggccttccataccgccaacatcgtgcccggcatcgatttcaccaatgatcccctgcttcagggccgcaatttctcctatctcgacacccagatcaaacgcctgggcggccccaatttcacccatctgccgatcaatgccgccaagtgtcccttccacagcttccagcaagacggccatatggccttcgtcaatccgaaaggtcgggccaattacgagccgaattcctggggaccgggcatcggcggcccccgggaatcacccgaaagcggcttccacagctttcccgccgaggacggcggcgagaagcgccgggtgcgcggcgagttgttcgccgatcactacagtcaggcccgccagttctaccggagccagacgcccgtcgagcaaacccacatcaaagattcgttcgtttttgaactgagcaaggtcgaaaccccggccatccgcgcccgggtggtgtcgcatctgctgaccatcgatcagactctggcccagaaagtggccgatggcctggggctggccgagctgccggaagcggctaaaccggcccgcccgctggtcgaggatctgcccgcctcgccggcgctcagcatccttctcaacccgcccaaggatttctccggacgcaaggtcggcgtgctggtcagcgatggcgtcgacggcgcctttcttgacgagatcgagcgcctcctgacggcggaaggcgcccaaatggaggtgatcgcccccagggtcggcggcttcaccgccaaggatggcaccctgcgcccggcccaccagaaggtgaacggcgccccttccgtgctgtacgacgccgtcgccgttcttctgtcgaccgagggcgccaagcttctgctgaacgaagccaccgccaaggatttcgtcagcgacgccttcgcccatgccaaggtcatcgcctttacccaggccgcccagcccttgctggaaaaggccggggtgatcgccgacgagggctgcctgctgcttgatacccccgccaaggccgaaacgttcctcggcctctgccgcaagggccggcgttgggaacgcgaggccaaggttcacgcggtctag

SEQ ID NO: 42904 - protein, 704 aa, Rhodospirillum rubrum
MAKRSTDALTPAEIADAKILRGTGGETHQIAEGDTPVLTTQQGIPVADDQNSLRIGPRGPTLLEDFAFREKIFHFDHERIPERIVHARGFGAHGTFETYEDLSALTSADIFQRAGEKTPAFVRFSTVAGNLGSSDVARDVRGFAVKLYTKQGNWDIVGNNIPVFFIQDAIKFPDLIHAAKQEPDSGFPQAQTAHDNFWDFISLMPESLHMALWIMSDRTIPRSFRFMEGFGVHTFRLVTAEGKSSFVKFHWKPKLGLQSVVWNEAVKINGADPDFHRRDLWSAIKRGDYPEWDLGLQVFDDAFADSFPFDVLDATKLIPEELVPIRIVGRLVLDRTVDNFFAETEQVAFHTANIVPGIDFTNDPLLQGRNFSYLDTQIKRLGGPNFTHLPINAAKCPFHSFQQDGHMAFVNPKGRANYEPNSWGPGIGGPRESPESGFHSFPAEDGGEKRRVRGELFADHYSQARQFYRSQTPVEQTHIKDSFVFELSKVETPAIRARVVSHLLTIDQTLAQKVADGLGLAELPEAAKPARPLVEDLPASPALSILLNPPKDFSGRKVGVLVSDGVDGAFLDEIERLLTAEGAQMEVIAPRVGGFTAKDGTLRPAHQKVNGAPSVLYDAVAVLLSTEGAKLLLNEATAKDFVSDAFAHAKVIAFTQAAQPLLEKAGVIADEGCLLLDTPAKAETFLGLCRKGRRWEREAKVHAV

SEQ ID NO: 42905 - DNA, 1455 bp, Rhodospirillum rubrum
  CDS (1)..(1455)
atgaccacgcgcctgaccaccaccgccggtgccccggtcgccgataatcaaaacagcctgaccgccggaccccgggggccggtgctgctgcaggattatcagttgatcgagaagctggcccaccagaaccgggaacgcattcccgaacgcgtcgtccacgccaagggctggggcgcccatggcaccttgaccatcacccatgacatcagccgctatacccgagccaagctgttctcggcggtcggcaaaacgacaccggtgctcgcccgcttttcgacggtggcgggcgaattgggggcggccgacgccgaacgcgacgtgcgcggcttttcgctgaagttctataccgaggaaggcaactgggatctggcgggcaacaacaccccggtgttcttcgtgcgcgatcctttgaagtttcccgatttcatccatacccagaaacgccatccgcgcacccatctgcgctcgcccaccgccatgtgggatttctggtcgctcagcccggaaagcctgcatcaggtcaccatcttgatgagcgatcgcggtctgccgcttgatcccatgcatatgaacggctacggcagccacacctattccttctggaacgacgccggcgagcgcttttgggtgaagttccacttcaagacccaacagggccatgctcatctgaccaatgccgccgccaaggtcgtggtcggcgagtcgcgcgaaagctatcaggaggcgctgtttggcaccatcgagtcgggtcacttcccgcgctggacgctgtttgtgcagatcatggccgaacgcgaggccgaaaccaccccctataaccccttcgacctcaccaaggtctggccgcacggcgattttccgctgatcgaggtcggggtgctggaactcaaccgcaacgccgagaactatttcgccgagatcgagcaggcggccttttcgccgtcgaacgtcgtcccgggcatcggccattcgcccgacaagatgcttcaagcccgggtgttcgcctatgccgacgcccatcgctatcgcctgggcacccattacgaggccctgccggtgaacgccccgctcagcccggtcaatcactaccacaaagacgggccgatgcgctttttccccaataatcccaacgccgacgcctattacgagcccaacagcttcggtggacccaaagaggacccctcggtcaaggagccgccgctgcgcatcaacggcgatgccgatcactacaaccaccgcgagggcaacgacgattacgtccaggtcggcgccctcttcgccctgtttgacgagggcgagcgccagcgtctgttctccaatatcgccgaggccatggccggcgtgcccgaggagatcatccgccgccagttggtccatttccaccgcgccgatccggcttacggcgagggcgtggccaaggcgctgggactggccccggtttcccaaccggcctga

SEQ ID NO: 42906 - protein, 484 aa, Rhodospirillum rubrum
MTTRLTTTAGAPVADNQNSLTAGPRGPVLLQDYQLIEKLAHQNRERIPERVVHAKGWGAHGTLTITHDISRYTRAKLFSAVGKTTPVLARFSTVAGELGAADAERDVRGFSLKFYTEEGNWDLAGNNTPVFFVRDPLKFPDFIHTQKRHPRTHLRSPTAMWDFWSLSPESLHQVTILMSDRGLPLDPMHMNGYGSHTYSFWNDAGERFWVKFHFKTQQGHAHLTNAAAKVVVGESRESYQEALFGTIESGHFPRWTLFVQIMAEREAETTPYNPFDLTKVWPHGDFPLIEVGVLELNRNAENYFAEIEQAAFSPSNVVPGIGHSPDKMLQARVFAYADAHRYRLGTHYEALPVNAPLSPVNHYHKDGPMRFFPNNPNADAYYEPNSFGGPKEDPSVKEPPLRINGDADHYNHREGNDDYVQVGALFALFDEGERQRLFSNIAEAMAGVPEEIIRRQLVHFHRADPAYGEGVAKALGLAPVSQPA

SEQ ID NO: 42907 - DNA, 1446 bp, Ralstonia metallidurans CH34
  CDS (1)..(1446)
atgaataagctcacgaccgcatttggcgcgcccgttgtcgataaccagaacgttcagaccgccggcccgcgtggccccgccctgctccaggatgtctggttcctcgaaaagcttgcccacttcgaccgtgaagtgattccggaacgccgcatgcacgccaagggcgccggcgcttacggcacgttcacggtcacgcatgacatcaccaagtacacgcgcgcgaacctgttctcacaggttggcaagaaaaccgacctgttcctgcgcttctcgtcggtggccggcgagcgcggcgcggccgatgcggaacgcgacatccgcggctttgcgatcaagttctacaccgaggaaggcaactgggacctggtgggcaacaacaccccggttttcttcctgcgcgaccccctgaagttccccgacctgaaccacgccgtgaagcgcgacccgcgcacgggcatgcgtagcgccgaaagcaactgggacttctggaccggcctgcccgaagccctgcaccaggtcacgatcgtgatgagtgaccggggtatcccgcgcacctggcgtcatatgcacgggttcggcagccatacctacagcttcatcaacgccaacatggagcgtttctgggtgaagttccacttcgtcacccagcagggcatccagaacctgactgacgaggaagctgcggagatcacgggccaggaccgcgaatatcaccagcgcgatctgtttgaatcaatcgaacgtggcgatttcccgcgctggaagctctgcgtgcagatcatgccggaagccgaagccagcaaggttccctaccacccgttcgacctgaccaaaatctggccgaagaaggactacccgctgatcgaagtcggcgtgctggaactgaaccgcaatccggacaacttcttcgccgaagtcgaacaggcatcgttcgcgccgtcgacgatcgtccctggcgtcggtttctcgcccgacaagatgttgcagggccgtctattctcgtacggcgacgccgcgcgctatcgcgtcggcgtgaatcatcaccagattccggtgaactcgccgaaagccgcgaagtacgtcaacagctatcaccgcgacggcacgatgcgcgtcgacggcaaccggggggccgccatcggctatgagcccaatacgaagggcgagtgggccgagcaacccgacttccgcgaaccgccgctgacgctggaaggcactgccgaccactggaaccatcgcgaggacggcgactacttctcgcaggtcggcgcgttgttccgcctgatgtcgccgacgcagcagcaggcgctgttcgacaacacggcccgctcgatcaagggtgtgtcgaaacacatccagcagacccacatcaagcattgcacggcggctgaccccgcctatggtgcgggtgtcgcggctgctatcgagatgatcgaggccaagtaa

SEQ ID NO: 42908 - protein, 481 aa, Ralstonia metallidurans CH34
MNKLTTAFGAPVVDNQNVQTAGPRGPALLQDVWFLEKLAHFDREVIPERRMHAKGAGAYGTFTVTHDITKYTRANLFSQVGKKTDLFLRFSSVAGERGAADAERDIRGFAIKFYTEEGNWDLVGNNTPVFFLRDPLKFPDLNHAVKRDPRTGMRSAESNWDFWTGLPEALHQVTIVMSDRGIPRTWRHMHGFGSHTYSFINANMERFWVKFHFVTQQGIQNLTDEEAAEITGQDREYHQRDLFESIERGDFPRWKLCVQIMPEAEASKVPYHPFDLTKIWPKKDYPLIEVGVLELNRNPDNFFAEVEQASFAPSTIVPGVGFSPDKMLQGRLFSYGDAARYRVGVNHHQIPVNSPKAAKYVNSYHRDGTMRVDGNRGAAIGYEPNTKGEWAEQPDFREPPLTLEGTADHWNHREDGDYFSQVGALFRLMSPTQQQALFDNTARSIKGVSKHIQQTHIKHCTAADPAYGAGVAAAIEMIEAK

SEQ ID NO: 42909 - DNA, 1485 bp, Thermobifida fusca
  CDS (1)..(1485)
ttgaccgagaccaacgaggcactgtccactgcgagcaacgccacgggctccacgctcgactctggtgcgcctgcggctagcgaccgcaactcgctgagcgtgggcagcaacggcccgctgctgctgcacgacgtacggctcgttgagacgctcgcccacttcaaccgtgagcgggtccccgagcgcaacccgcacgccaagggcgccggtgccttcggtgtcttcgaaaccacggaggacgtctcccagtacaccaaggctgccctgttccagaagggtgcccgtaccgagatgctcgcccggttctccacggtcgctggtgagcagggctccccggacacctggcgggacgtgcgcggtttcgctctgaagttctacacctctgagggcaactacgacctggtcggcaacaacacgccgatcttcttcgtccgcgacccgatgaagttcccgcacttcatccgctcccagaagcggatgccggacacgggtctgcgcgacaacaacatgcagtgggacttctggaccctcaacccggagaccgcccaccaggtcacctacctcatgggtgaccgcggcctgccgcggacctggcgccacatgaacggctacggttcgcacacctacatgtggatcaacgccaagggcgagaagttctgggtcaagtaccacttcaaaaccgaccagggcatcgagaacatgaccaacgaggaagccgagcgtctcgccggtgtggacgccgacttccaccgtcgtgacctggtcgaggccatcgaacgcggggactacccgagctggaccctctacgtgcaggtcatgccgtacgaggacgccaagacctaccggttcaacccgttcgacctgaccaaggtctggccgcacagcgactacccgctcatcaaggtcggcaagatgaccttgaaccgcaacccggagaacttcttcgccgagatcgagcaggccgcgttcgcgccgtcgaacctggtcccgggtatcggcgtctccccggacaagatgctgctgggccgcgtcttcgcctacgcggacgcccaccgggcccggatcggcaccaactacttccagctgccggtgaacaagccgcgggtgaaggtcaactcctacaccttcgacgggcacatgacctacgagcactccggcaaggccccggtgtacgcgcccaactcctacggccgtccctggtctgaccagaccggcccggtcgaggacagctgggaggccgacggcgagctggtgcgcagcgcctacgagctgcacgctgaggacgacgacttctcgcaggccggcaccctggtccgcgaggtcttcgacgacgcccagcgggaccggctcgtggagacggtcgccgaccacctgtccaagggtgtcgtcgagccggtgctctcccgggccttccagtactggaagaacatcgacgagaccatcggcgagcggatcgagaagcggtaccacgagatcgctcggtga

SEQ ID NO: 42910 - protein, 494 aa, Thermobifida fusca
MTETNEALSTASNATGSTLDSGAPAASDRNSLSVGSNGPLLLHDVRLVETLAHFNRERVPERNPHAKGAGAFGVFETTEDVSQYTKAALFQKGARTEMLARFSTVAGEQGSPDTWRDVRGFALKFYTSEGNYDLVGNNTPIFFVRDPMKFPHFIRSQKRMPDTGLRDNNMQWDFWTLNPETAHQVTYLMGDRGLPRTWRHMNGYGSHTYMWINAKGEKFWVKYHFKTDQGIENMTNEEAERLAGVDADFHRRDLVEAIERGDYPSWTLYVQVMPYEDAKTYRFNPFDLTKVWPHSDYPLIKVGKMTLNRNPENFFAEIEQAAFAPSNLVPGIGVSPDKMLLGRVFAYADAHRARIGTNYFQLPVNKPRVKVNSYTFDGHMTYEHSGKAPVYAPNSYGRPWSDQTGPVEDSWEADGELVRSAYELHAEDDDFSQAGTLVREVFDDAQRDRLVETVADHLSKGVVEPVLSRAFQYWKNIDETIGERIEKRYHEIAR

SEQ ID NO: 42911 - DNA, 2175 bp, Novosphingobium aromaticivorans DSM 12444
  CDS (1)..(2175)
atggctacccccacgaaaggcaaggcccccgctcgtgccgcgaaggagcgctcgcccgcgctcgacaatgcgcttcgcgaccatcagcccggagcgggccagaccgatgaagcgactgctctcggcaatgccggggaaatccaccaggaggctgctgccgaaaacgatgcggctgccttcctgaccgacaacttcggccatcgcctgtccgacaaccagaatagcctcagggccggaatgcgcggtccgacgctgatcgaggacttcatcctccgcgagaagatcttccacttcgaccacgagcgcattccggagcggatcgtccacgcgcgcggatcgggtgcgcacggcgtgttcgaggtgacgcgcgcgatccccgacctgaccagggccgggttgttccagaaaaagggccagacctgcccggtcttcgtgcgcttttccaccgtggccggcggggccggctcgatcgacaccccgcgcgacgtgcgcggcttcgcggtcaaattctataccgacgagggcaactgggacctggtcggcaacaacatcccggtgttcttcatccaggacgcgatgaagtttcccgatctggtccattcggtgaagatggaagccgatcgcggctatccgcaggcggccagtgcccatgacaccttctgggacttcatcgggctgatgccggaatcgatgcacatgatcatgtgggcgatgagcgaccgcgccattccccgcacgctgcgcatgatggaaggctttggcgtgcacaccttccgcttcgtcaatgcggcgggcgaggggcggttcgtcaagttccactggaagccggtgctgggcatggaatcgctgatctgggacgaggcggtgaaggtcgccggggccgatcccgatttccatcgccgcgacctgttcgaatccatcgctgccgggcacttcccggcgtgggaccttggggtccaggtcttcgacgaggaattcgccgcgagccagccgtacgatgtgctcgatgcgaccaagctgattccggaagaggacgtccccgtcgagatcgtcgggcgcatgacgctgaaccgcaatgtcgacaacttcttcgccgagaccgagcaggtggcgttcctgccatcgaacgtgatcccgggtatcgacttctcgaacgacccgttgctgcaagggcgcctgttctcctacctcgatacgcagaaatcgaggcttggcacgacaaacttccaccagattccggtcaatgcgcccaagtgcccgttccataacatgcagcgcgacggcctgatgcagacgctggtgcccacaggccgcgccaactacgagcccaattcgctcgacgaagcgggcgaggacagcgggccgcgcgcctgcccggaaaccggcttcacgtcgttccgcgagaatggcgagcgccacgatccgaccgaaaaggtgcgcgtgcgggcggatctcttcgccgaccactacagccaggcggcgctgttcttccactcgcagaccgagagcgaacaggcgcacatcgcctctgcgctggtgttcgaactgtccaaggtcgcgctggaacatgtccgggcgcgggtcgtgtcgcggttgcgcaacattgacgagacgctggcgcagcgcgttgccgatggccttgcgatggacctgccggaaaaggcgcctgccgcacgccagccggtgaagatgaagccatcggacgccctgtcgatccagaagcaggcgaagaagacctttgccggacgcaaggtcggcattctctttgccgaaggatcggacaaggcgacgatcgacaagctgaaggcgggtgtggaggaggcgggtggcaccgtcttcctcgtcgcgcccaaggtcggcggcatcccggtcaagggcggcacgctgaaggccgatggcaagctggatggatcgccctccgtcctgttcgacgcggtggcatcggtgctgatgccggaagcggcggcgaagctcgccatgcagggtgcggccgtgcagtggttcatggatgcctatggccactgcaagacaatcgcccactgcaacggcacccggatcatcctcgagaaggccggggtggagcctgacgagggcgtggtgcccaatgaaaagctgctcgaagtcggccctgtgcgccacttcgcgcgtgagccgaaggttcgcgatctggcctga

SEQ ID NO: 42912 - protein, 724 aa, Novosphingobium aromaticivorans DSM 12444
MATPTKGKAPARAAKERSPALDNALRDHQPGAGQTDEATALGNAGEIHQEAAAENDAAAFLTDNFGHRLSDNQNSLRAGMRGPTLIEDFILREKIFHFDHERIPERIVHARGSGAHGVFEVTRAIPDLTRAGLFQKKGQTCPVFVRFSTVAGGAGSIDTPRDVRGFAVKFYTDEGNWDLVGNNIPVFFIQDAMKFPDLVHSVKMEADRGYPQAASAHDTFWDFIGLMPESMHMIMWAMSDRAIPRTLRMMEGFGVHTFRFVNAAGEGRFVKFHWKPVLGMESLIWDEAVKVAGADPDFHRRDLFESIAAGHFPAWDLGVQVFDEEFAASQPYDVLDATKLIPEEDVPVEIVGRMTLNRNVDNFFAETEQVAFLPSNVIPGIDFSNDPLLQGRLFSYLDTQKSRLGTTNFHQIPVNAPKCPFHNMQRDGLMQTLVPTGRANYEPNSLDEAGEDSGPRACPETGFTSFRENGERHDPTEKVRVRADLFADHYSQAALFFHSQTESEQAHIASALVFELSKVALEHVRARVVSRLRNIDETLAQRVADGLAMDLPEKAPAARQPVKMKPSDALSIQKQAKKTFAGRKVGILFAEGSDKATIDKLKAGVEEAGGTVFLVAPKVGGIPVKGGTLKADGKLDGSPSVLFDAVASVLMPEAAAKLAMQGAAVQWFMDAYGHCKTIAHCNGTRIILEKAGVEPDEGVVPNEKLLEVGPVRHFAREPKVRDLA

SEQ ID NO: 42913 - DNA, 2136 bp, Cytophaga hutchinsonii
  CDS (1)..(2136)
atgaaaaagcctacttcaaagacagaaggtacagatcctaaatttcaggatctccaaaaaaacacatcggatgccaccgatcaatttatgacaacggatcagggattgaaaattaatgatgataataattcattaaaagccggagagcgtgggccttctttactggaagattttattttaagagaaaaaattacacattttgatcacgaacgtattcctgaacgcatcgtacatgcgcgtggatctgcggcacatggctatttccaggtgcacgaatcgatggcgcaatataccaaagccggctttttgcaggatccatcaatcaaaacacctgtcttcgtaagattctctacagttgctggttccagaggctctacagatctcgcgcgcgatgtacgtggattttctgttaaattttatacagcggaaggaaattatgatcttgtaggaaataacatgcccgtcttttttattcaggatgcagcaaaatttcccgacctgatccatgctgtaaaaccggaaccgcatcatgaaatgccgcaggcagcttctgcgcacgatactttctgggattttatttcactgatgcccgaatccatgcacatgatcatgtgggtcatgtctgaccgtgcaattccacgcagtttaaggatgatggaaggttttggggtacatacgttccgatttataaataagaataatgaatctcattttgtaaaattccactggaaaccgaaacaaggtacgcatagtgtagtatgggatgaagcacaaaaaatttccggtaagaattgtgattttcaccgtcaggatttgtgggaagcaatcgaaagcggcaattttccggaatgggaattgggtgtgcaattgattccggaagcggatgaacacaaatttgcatttgacctgctggatcctaccaagcttgtgcctgaagaggaagtgccggttaccattataggaacaatggtactgaaccggaatccggataatttctttgctgaaacagaacaggtggctttccatcccggacatttggtaccgggcattgattttacaaacgatccattactgcagggaagattgttctcttatacggacacacaattatcccgcctcggcagtcccaattttcatgagattccgattaaccgcagtgttgctcctactcataacaatcaacgcgatggccacatgcgccaggaaattaataccggacgtgtaagttatcacccgaattcattgggcggcggctgccccttccaggcaaagatggctgaaggtggtttcaccagcttcaacgaacgtattgatgcaaagaaagttcgggaacgcagtgaaagtttctcggaccatttcagccaggctaccctattctttaacagccagacagaagtagagaaagggcatattattaaagcacttcgctttgaactgggcaaagttgaaacagaagcaatccgcgtacgcatggttggtttgctttctcagattgacaaaacactggcaacgaaagtagctgccggacttggtatcgcagttcctgctcctgcatttcctatgaatcatggtgtgggcgcagatgatgattttgaaaagcatgagcctaaaaaagcagagcaggtaacaaaatcttctgatgcacttaccatattgagaaatccaacggttaccccttctattgcaacaaaacagattgcctttttatgtgcagatgaggtaagtggtgcgtctgtggtgagttataaaaatgcgttggaaagaaaaggtgctgtagtgaagatcattgcgcctcaccttggatttatcaaaacagaagaaggtaaaaaaataaaagtggatcaaagtttattgattgctgcttcggtattatttgatgctgtttttattcctgcagggaaaggaattaaacaattaaaaggtataaaagaagtagctgaatttatcaccgatacatacaaacattgtaaagtaattggtggcgaagacgaaggtgctttagtaattcaatctgtacaagcgattatggaggccggaaaaaatgcagatgaaggaattgttctgaataaagacacaacggcatttgttaaagcacttggcaaacatcgtttctgggaacgcgaagaagcggtgtaa

SEQ ID NO: 42914 - protein, 711 aa, Cytophaga hutchinsonii
MKKPTSKTEGTDPKFQDLQKNTSDATDQFMTTDQGLKINDDNNSLKAGERGPSLLEDFILREKITHFDHERIPERIVHARGSAAHGYFQVHESMAQYTKAGFLQDPSIKTPVFVRFSTVAGSRGSTDLARDVRGFSVKFYTAEGNYDLVGNNMPVFFIQDAAKFPDLIHAVKPEPHHEMPQAASAHDTFWDFISLMPESMHMIMWVMSDRAIPRSLRMMEGFGVHTFRFINKNNESHFVKFHWKPKQGTHSVVWDEAQKISGKNCDFHRQDLWEAIESGNFPEWELGVQLIPEADEHKFAFDLLDPTKLVPEEEVPVTIIGTMVLNRNPDNFFAETEQVAFHPGHLVPGIDFTNDPLLQGRLFSYTDTQLSRLGSPNFHEIPINRSVAPTHNNQRDGHMRQEINTGRVSYHPNSLGGGCPFQAKMAEGGFTSFNERIDAKKVRERSESFSDHFSQATLFFNSQTEVEKGHIIKALRFELGKVETEAIRVRMVGLLSQIDKTLATKVAAGLGIAVPAPAFPMNHGVGADDDFEKHEPKKAEQVTKSSDALTILRNPTVTPSIATKQIAFLCADEVSGASVVSYKNALERKGAVVKIIAPHLGFIKTEEGKKIKVDQSLLIAASVLFDAVFIPAGKGIKQLKGIKEVAEFITDTYKHCKVIGGEDEGALVIQSVQAIMEAGKNADEGIVLNKDTTAFVKALGKHRFWEREEAV

SEQ ID NO: 42915 - DNA, 1443 bp, Microbulbifer degradans 2-40
  CDS (1)..(1443)
atgagcaagtgtccgtaccaaacaacctctgctggcagcccagtagcagataaccaaaatagtcaaaccgctggcccacgtggcccagtattaatgcaagactatcaattactagaaaagctcgcccatcaaaatcgtgagcgcattcccgagcgcgtggtgcacgcaaaaggctggggtgcctttggtactttcaccgtaaccaaagatattagcaaatatactcgcgccaaaatttttgacaccgtaggcaagcaaacacctttattgacgcgtttttctaccgttgccggtgaattgggcgctgcggacgccgagcgcgatgtgcgcggttttgcggtaaagttttacaccgaagaaggcaactgggatttagtaggcaataacacgccagtgttttttattcgcgacccgttaaagttccccgactttattcacacgcaaaagcgtcacccaaaaacgaatttacgttcgccaacggcgatgtgggatttctggtcacagtcgcctgaatcattacatcaaataaccattttgatgagcgaccgcggcttgccaaccgatgtgcgtcacattaatggttatggttcacacacgttttctttctggaataatgacggcgagcgtttttgggtgaaatttcactttaaaacccagcagggccataggcattggacaaacgaagaagcagaaaaggtggtgggtaaaacgcgcgaatctacgcaagaagatttgttcagtgcgatagaaaacggcaattaccccaagtggacggtaaatgtgcaaattatgcctgaagcggatgcagagaaaacatcctacaacccgttcgaccttaccaaagtatggccgcacagcgagtacccgttaatcgaagtaggtgaaatggagttaaatcgcaatgccgaaaactattttgccgaaatagagcaagctgcgttttcgccatcgaatgtggtaccgggcattggcttttcgcccgacaaagtattacaggcgcgtatttttagttatgccgatgcgcaccgttatagaataggcactcactacgaagcgctaccggttaacgcccctaaatgcccagtgcaccattaccataaagatggctcgatgaatttctttggtaataaaagtggcagcaccgatgcatactacgaacccaattcatttggtggcgcagtacaaaacccagatgtggccgagccaccactaaaaataagtggcgatgccgacaggtataaccaccgtgaaggtaacgacgattttagtcagccagcggcattgtttaatttgtttgacgatgggcagaagcagcgtttatttaataatattgccggtgctatgcaaggtgtgccacaaaatattatcgataagcaattagccctattcgataaagtagacccagcctatggcgcaggtattcgagcagcgttaaaggcctag

SEQ ID NO: 42916 - protein, 480 aa, Microbulbifer degradans 2-40
MSKCPYQTTSAGSPVADNQNSQTAGPRGPVLMQDYQLLEKLAHQNRERIPERVVHAKGWGAFGTFTVTKDISKYTRAKIFDTVGKQTPLLTRFSTVAGELGAADAERDVRGFAVKFYTEEGNWDLVGNNTPVFFIRDPLKFPDFIHTQKRHPKTNLRSPTAMWDFWSQSPESLHQITILMSDRGLPTDVRHINGYGSHTFSFWNNDGERFWVKFHFKTQQGHRHWTNEEAEKVVGKTRESTQEDLFSAIENGNYPKWTVNVQIMPEADAEKTSYNPFDLTKVWPHSEYPLIEVGEMELNRNAENYFAEIEQAAFSPSNVVPGIGFSPDKVLQARIFSYADAHRYRIGTHYEALPVNAPKCPVHHYHKDGSMNFFGNKSGSTDAYYEPNSFGGAVQNPDVAEPPLKISGDADRYNHREGNDDFSQPAALFNLFDDGQKQRLFNNIAGAMQGVPQNIIDKQLALFDKVDPAYGAGIRAALKA

SEQ ID NO: 42917 - DNA, 2085 bp, Thiobacillus denitrificans ATCC 25259
  CDS (1)..(2085)
atgagccagaaaaaaaagccggcgaaggccggccccgacgaaaatttcgagcgcggcgccgggggtgaaatccaccagaccgccaacggcgcgcatccgccgctgacgactaacgacggtgtaccgatttccgacgaccagaattcgctgcgcagccacccgcgcggcccgacgctgctcgaggatttcgtcctgcgcgacaagatcacgcacttcgaccacgagcgcattcccgaacgcgtcgtccacgcccgcggcagcgcggcgcacggctacttcgaactgaccgaatcgctcgagaaatacacgaccgcgcgcatcctcaccgaggtcggcgagaagaccccggtgttcacgcggctctcgaccgtcgccggcggcgcgggctcggtcgacacgccgcgcgacgtgcgcggcttcgcggtcaagttctacaccaaggaaggcaactgggacctcgtcggcaacaacatccccgtgttcttcatccaggacgcgatcaagtttcccgacctcgtccactcgttcaagatggagcccgaccgcggctttccgcagtcgtcgacggcgcacgacaccttctgggactacgtgtcgctcacgcccgagtccatgcacatgattctgtggatcatgtccgaccgcacgacgccgcgctccctgcgcatgatcgaggccttcggcgtgcacagcttccgtctcgtcaatgcgaagggcgcgtcgaccttcgtcaaattccactggcgacccaagctcggcctgcaatcgacgatctgggacgagacggtcaagatcgccggcgccgaccccgacttccaccgccgcgaccttttcgaggcgatcagcgagggcaatttcccggaatgggagttcgccgtgcagctcttcaccgaggccgacgccgagcgcttccccttcgaccatctcgacgcgaccaagctcatccccgaagaactcgtgccgctcaaggtcatcggccgcatggtgctcgaccgctggccggacaatttcttcgccgagaccgaacaggtcgcctactgcccgacgcacgtcgtgcccggcatcgacttttccaacgacccgctgctgcagggccggctcttctcctacgtcgacacccagttgctgcgcttcaactcgccgaatttccaccaggtgccggtcaacatgccgaagtgcccgttcgccaacctgcagcgcgacggccacatgcagatggagcggccgaaggggcgcgtgaactacgaacccaacacgctcggcacggacacgccgcgcgagacgccgcaaggcttccgcagcgcggccgtgaccgaaagcggcgagaagggccgcatccgcgccgagcgtttcgccgaccactacagccaggcgcgccagttctacgtcagccagaccgaatacgagcaggcgcatatcgcgtcgacgctcgtgttcgagctcgccaaggtcgaccacgttcacatccgcgaggcgatggtcgggcatttgcgtcatgtcgacgaggacctcgcgcaccgcgtcgcgaaggggctcggcatcgatcccttgccgccggcgcccgaggccgccgcgcccgtgcaggacctgccgccctcgcccgccctgcagatcatcggcaacatgaaggacacgctcgaagggcgcatggtcggcatcctcgtcggcgacggctccgacggcgcgcgcgtcgaggcgctgcgccgggccgcgacggacgccggcgccgccgtgaagatcatcgccgcgcacgtcggtcaggtgaagctcgccaacggcaagatgctcaaggtcgacaagcagctcgccggaacgccgtcggtcctcttcgacgccgtggccgtcgtcgtctccgaggacgccgcgaagatgctgctgaaggagagcgcggcgctcgatttcgtccacgacgcgttcggccacctcaaggcgatcgcgagcgacgcgggcggccaggcgctgctcgacgccgtccacgtcgtgcgcgacgcgggtgtcgtcgatgcggccgacgtcggcgccttcatcgccgcggcaaaaacgcggcagtgggaccgcgaaccgtcggtgcgactactcgcgtga

SEQ ID NO: 42918 - protein, 694 aa, Thiobacillus denitrificans ATCC 25259
MSQKKKPAKAGPDENFERGAGGEIHQTANGAHPPLTTNDGVPISDDQNSLRSHPRGPTLLEDFVLRDKITHFDHERIPERVVHARGSAAHGYFELTESLEKYTTARILTEVGEKTPVFTRLSTVAGGAGSVDTPRDVRGFAVKFYTKEGNWDLVGNNIPVFFIQDAIKFPDLVHSFKMEPDRGFPQSSTAHDTFWDYVSLTPESMHMILWIMSDRTTPRSLRMIEAFGVHSFRLVNAKGASTFVKFHWRPKLGLQSTIWDETVKIAGADPDFHRRDLFEAISEGNFPEWEFAVQLFTEADAERFPFDHLDATKLIPEELVPLKVIGRMVLDRWPDNFFAETEQVAYCPTHVVPGIDFSNDPLLQGRLFSYVDTQLLRFNSPNFHQVPVNMPKCPFANLQRDGHMQMERPKGRVNYEPNTLGTDTPRETPQGFRSAAVTESGEKGRIRAERFADHYSQARQFYVSQTEYEQAHIASTLVFELAKVDHVHIREAMVGHLRHVDEDLAHRVAKGLGIDPLPPAPEAAAPVQDLPPSPALQIIGNMKDTLEGRMVGILVGDGSDGARVEALRRAATDAGAAVKIIAAHVGQVKLANGKMLKVDKQLAGTPSVLFDAVAVVVSEDAAKMLLKESAALDFVHDAFGHLKAIASDAGGQALLDAVHVVRDAGVVDAADVGAFIAAAKTRQWDREPSVRLLA

SEQ ID NO: 42919 - DNA, 2175 bp, Polaromonas sp. JS666
  CDS (1)..(2175)
atgccgcgacccaagcgcaaagctgctggccccacccggccagcggacggcgccagagacaagcaaacccagcttgatgcctttactgccggctcagccaatgtcttgaccaccaaccagggtctacagattccggacaatcacaactccctgaagggtggtgttcgcggccctaccctgctggaagatttcatcctccgcgaaaaaatcacgcattttgatcacgagcgcattccggaacgtgtcgtacacgcccggggttcaggcgcacacggctatttcaagccctacaagtcgatggtgcagtacaccagcgccgcctttttgcaggaccctgccattgaaacgcctgtatttgtgaggttttcaaccgtggccggctcccggggttcggcagacacggtgcgggatgtgcgggggttcgcggtcaagttttacaccgccgaaggcaactacgatttggtgggcaacaacattcctgttttctttatccaggacgccatcaaatttcccgacctgatccatgcggtcaaacccgaaccgcaccatgagatgccgcaagcagcaagtgcccatgacactttctgggatttcgcgtcgctgatgcccgagtcaacccacatgttgatgtggacgatgtcagaccgcgccctgccgcgcagctttcggatgatggaagggttcggtgttcatgctttccgctttatcaatgcgcggggggattctcatttcgtcaagtttcactggaagccaaaactgggggtgcatggcctggcttgggatgaggcgcagaagattgccggcaaagaccccgactttcaccggcgcgacctgtgggaagcgattgagagcggtcattttcccgagtgggagctgggcgttcagatcgtggacgacggccaggagagcgagcttggctttgacattctggacgctaccaaactcattccagaggagcaggttcccgtccagatcattggcaagctggtgctcaaccgcaatccggataattttttcgccgaaaccgaacaggtggcatttcatccaggccaccttgtgccaggcattgatttttcaaacgatcccctgttgcaggggcggctcttctcgtacaccgatacccagctgtccaggctcggcggtgcgaacttccatgaattacccatcaatcgggcagtttgcccaatgcataacttccagcgcgacgggatgcatcgccaggccatcagcaagggacgcgtggcgtacgagcccaatacgctgggcaatggcgcagagtaccgggttgatggcgcggcgcaaggcttccagtcttaccccgagcaactggagccgcccaaaatccggcggcgcagcccctcgtttgacgatcatttctcgcaggctaccctgttctggaacagccagagcgttgccgagaaagaccatatcgtcgcagcgttcaggtttgagctgtccaaggtggatgtgccggaaatccggcagcgcatcgtggacaaccttgcgcatgtggacctgaaacttgccggccgggttgctgtgactttgggcatcgccgccccggaccccaaagccgctgcgggccggctaggctttcgggattaccgaatcaccagcaaggtcgacgaagatcccacattgcgcatggttggcaggccgggcggtggcgtgaagacccgcaaggtggccattctggtggccaatggcgttgaatccgcccctctccgtcgcatccagcaggatttgacggaagccggcgccctgtgcaagctggttgcccagcacctgggtacagtcagcaccgccagcggccgccagctggcagtcgaccatacctttgccaacatgccgtccgtcatgtttgatgccgtgctgattcccggtggtgcgtccagcgccgcagcgctgagcgggctcggcgaggcggttcactttgtgctggaggcttacaaacacggcaagaccatttgtgcggtgaacgatggcgtgcagttgctcggcacgctgggcttcagccaggggaaaaatcccgagctggtaacagtacccacagtcggtgtcctgattgccgacgggcgcaaggtgctggatggacaggtgtcacaagacttcatggccgccattgcactgcaccgccactgggaccgcctcaacattgacgccattccggcctga

SEQ ID NO: 42920 - protein, 724 aa, Polaromonas sp. JS666
MPRPKRKAAGPTRPADGARDKQTQLDAFTAGSANVLTTNQGLQIPDNHNSLKGGVRGPTLLEDFILREKITHFDHERIPERVVHARGSGAHGYFKPYKSMVQYTSAAFLQDPAIETPVFVRFSTVAGSRGSADTVRDVRGFAVKFYTAEGNYDLVGNNIPVFFIQDAIKFPDLIHAVKPEPHHEMPQAASAHDTFWDFASLMPESTHMLMWTMSDRALPRSFRMMEGFGVHAFRFINARGDSHFVKFHWKPKLGVHGLAWDEAQKIAGKDPDFHRRDLWEAIESGHFPEWELGVQIVDDGQESELGFDILDATKLIPEEQVPVQIIGKLVLNRNPDNFFAETEQVAFHPGHLVPGIDFSNDPLLQGRLFSYTDTQLSRLGGANFHELPINRAVCPMHNFQRDGMHRQAISKGRVAYEPNTLGNGAEYRVDGAAQGFQSYPEQLEPPKIRRRSPSFDDHFSQATLFWNSQSVAEKDHIVAAFRFELSKVDVPEIRQRIVDNLAHVDLKLAGRVAVTLGIAAPDPKAAAGRLGFRDYRITSKVDEDPTLRMVGRPGGGVKTRKVAILVANGVESAPLRRIQQDLTEAGALCKLVAQHLGTVSTASGRQLAVDHTFANMPSVMFDAVLIPGGASSAAALSGLGEAVHFVLEAYKHGKTICAVNDGVQLLGTLGFSQGKNPELVTVPTVGVLIADGRKVLDGQVSQDFMAAIALHRHWDRLNIDAIPA

SEQ ID NO: 42921 - DNA, 1479 bp, Chlamydomonas reinhardtii
  CDS (1)..(1479)
atggacccagcgaagattcgcccctcgtccgcgtacaacaccccctactggaccaccaacagcggtgcgccggtatggaacaacaacaactccatgacagtggggacgcgcggtcccatcctcctggaggactaccacctggttgagaagctggcgcagttcgaccgggagcgcatccccgagcgcgtcgtgcacgcccgcggggctgcggcaaagggcttcttcgaggtgacgcacgacatctcagccctgacggcggccgacttcctgcccgccccgggcgtgcagacgcccgtcatcgtgcggttctccactgtggtgcacgagcgcggctcgcccgagaccctccgggaccctcggggcttcgcggtaaagttctacacacgtgagggcaatttcgacatggtcggcaacaacatgccggtgttcttcatccgcgacggcatgaagttcccggacatggttcacgccttcaagcccaaccccaagagccacatccaggaggcctggcgcattatggacttcctgtcgcaccaccccgagtcatgccacatgctgacgttcctgctggacgacgccggcatcccgctcaactaccgccacatgccgggctttggcgtgcacaccatgaagctgatcaacaaggccggccgcgagacgtatgtcaagttccactgggtgcccaagtgcggcgagaagtacctgctggacgacgaggcggtgatggtgggccggagcaaccacagccacgccaccaaggacctgttcgacgccatcgcagcgggcgactacccggagtgggcgctcatggtacagaccatggaccccgcggacgaggacaagtttgactttgaccctctggacgtgaccaagacctggcccgagtcgctgttccccatgcagccggtgggccgcatggtgctcaaccgcaacgtggacaacttcttcaacgagaatgagcaggtggccttctgccccgccatcatcgtgccgggcatcggctacagcgatgacaagctgctgcagacgcgcatcttctcctacgccgacacgcagcggcaccggttggtccccaactacctactgctcccggtgaacgcgccgcgcgccccccaccacaacaaccaccacgagggcttcatgaacttcatgcaccgcgacgaggaaatcaactacttccccagcaggtttgacccggtgcgcaacgcggaagggtggctgccgtgtcgagtcccgctgtctgggcgccgcgagaagatggtgatcgccaaggagaacaacttcatgcaggccggcgctcgctggcgcgcgttcgacgcggcgcggcaggagcggtttgtggtgcgggtggcggacatgctggcggacccccgctgcacgcaggagatccggcgcatctgggtgggctactggtcccaggccgacccgcagctgggcgcgggcattgccgccaagctgcagggccgcggctgcctgtag

SEQ ID NO: 42922 - protein, 492 aa, Chlamydomonas reinhardtii
MDPAKIRPSSAYNTPYWTTNSGAPVWNNNNSMTVGTRGPILLEDYHLVEKLAQFDRERIPERVVHARGAAAKGFFEVTHDISALTAADFLPAPGVQTPVIVRFSTVVHERGSPETLRDPRGFAVKFYTREGNFDMVGNNMPVFFIRDGMKFPDMVHAFKPNPKSHIQEAWRIMDFLSHHPESCHMLTFLLDDAGIPLNYRHMPGFGVHTMKLINKAGRETYVKFHWVPKCGEKYLLDDEAVMVGRSNHSHATKDLFDAIAAGDYPEWALMVQTMDPADEDKFDFDPLDVTKTWPESLFPMQPVGRMVLNRNVDNFFNENEQVAFCPAIIVPGIGYSDDKLLQTRIFSYADTQRHRLVPNYLLLPVNAPRAPHHNNHHEGFMNFMHRDEEINYFPSRFDPVRNAEGWLPCRVPLSGRREKMVIAKENNFMQAGARWRAFDAARQERFVVRVADMLADPRCTQEIRRIWVGYWSQADPQLGAGIAAKLQGRGCL

SEQ ID NO: 42923 - DNA, 2187 bp, Aspergillus fumigatus
  CDS (1)..(2187)
atgcgtctcacgttcatccccagcctcattggcgttgccaatgcggtatgtccctatatgaccggcgagctcaaccgtcgtgatgagatatccgatggcgacgctgccgcagccacagaggaattcttgtcccagtattatttcaacgacaatgatgccttcatgacgtccgatgtgggcggccctatcgaagatcagaatagtttcagtgccggagagcgtggtcccaccctgctcgaagatttcattttccgtcaaaagatacagcgtttcgaccatgaacgggtccccgagcgtgcggtccatgcccgtggtgccggcgcccatggagtcttcacttcatatggcgacttctcgaacatcactgcggcttctttcctggccaaggaaggcaagcaaacccctgtatttgtccgcttctcgacggtcgcaggaagcagaggcagttcggatctggcccgtgatgttcacggttttgccactcgtttctataccgacgagggcaatttcgatatcgttggaaacaatatccctgtattcttcatccaggatgctatcctcttccccgatctgatccacgccgtcaagcccagaggtgacaacgagatccctcaggctgcgactgctcatgactcggcctgggacttcttcagccagcagccaagcacgatgcacacactgctctgggctatgtctgggcatggcattcctcgttctttccgacatgttgatgggttcggtgtgcataccttccgattcgtgacagatgacggtgcatccaagctcgtcaaatttcactggaagtctttgcagggcaaggccagcatggtctgggaagaggcccagcagacctctggcaagaatcctgacttcatgcgtcaggatttgcacgatgcaatcgaggctggacgctatccggagtgggaactcggtgttcaaatcatggatgaggaggaccaactgcggttcggttttgacctcttggaccccacaaagatcgtgccagaggaattcgtgcccatcaccaagttgggcaagatgcaactgaaccgcaaccctcgcaactatttcgctgagaccgaacaagttatgttccaacctggtcacattgtccgtggtgttgacttcactgaagaccctctcctgcaaggccgtctgttttcgtacctggacactcagctgaaccgtcacggtggccccaactttgaacaactccccatcaaccaacctcgcgttcccgtgcacaacaacaaccgcgatggagcaggccaaatgttcattcccctcaaccctcacgcgtactcgcccaagacctccgtcaacggttccccaaaacaagccaaccagaccgtcggcgatggcttcttcacagctcctggacgtaccaccagtggcaagcttgtccgtgcggtcagctcaagctttgaggatgtctggtctcagccacggctcttctacaattctttggttcctgccgagaagcagttcgttattgacgccatccgcttcgaaaatgcaaacgttaaatctcccgtggtaaagaacaacgtcatcattcagttgaaccgcatcgataacgaccttgcacgacgcgttgcgcgcgctattggtgtcgccgagcctgagcccgacccgaccttctatcacaacaacaagactgccgatgtcggcacttttggaaccaagctgaagaagcttgatggcctcaaggtcggcgtcctgggttctgtccagcacccgggctcggttgagggagcttccaccctccgcgaccgtctgaaggacgacggtgtcgacgtggttcttgtcgcagagcgtctggccgacggtgttgaccagacctattctacttcagatgcaatccaatttgacgctgtggtcgttgccgccggtgcagagagtctcttcgcggcatcctcgtttaccggtgggtccgccaactcagctagtggtgcaagctctctgtaccccaccggtcggcccctgcagattctcattgacggattccggttcggcaagactgttggggcgctgggaagcggcacagctgctctccgcaacgcggggattgcaacgtctcgggacggcgtgtatgtggctcagtcagtcactgatgactttgccaatgatcttaaggagggccttagaacttttaagtttttggaccggtttcccgtggatcactag

SEQ ID NO: 42924 - protein, 728 aa, Aspergillus fumigatus
MRLTFIPSLIGVANAVCPYMTGELNRRDEISDGDAAAATEEFLSQYYFNDNDAFMTSDVGGPIEDQNSFSAGERGPTLLEDFIFRQKIQRFDHERVPERAVHARGAGAHGVFTSYGDFSNITAASFLAKEGKQTPVFVRFSTVAGSRGSSDLARDVHGFATRFYTDEGNFDIVGNNIPVFFIQDAILFPDLIHAVKPRGDNEIPQAATAHDSAWDFFSQQPSTMHTLLWAMSGHGIPRSFRHVDGFGVHTFRFVTDDGASKLVKFHWKSLQGKASMVWEEAQQTSGKNPDFMRQDLHDAIEAGRYPEWELGVQIMDEEDQLRFGFDLLDPTKIVPEEFVPITKLGKMQLNRNPRNYFAETEQVMFQPGHIVRGVDFTEDPLLQGRLFSYLDTQLNRHGGPNFEQLPINQPRVPVHNNNRDGAGQMFIPLNPHAYSPKTSVNGSPKQANQTVGDGFFTAPGRTTSGKLVRAVSSSFEDVWSQPRLFYNSLVPAEKQFVIDAIRFENANVKSPVVKNNVIIQLNRIDNDLARRVARAIGVAEPEPDPTFYHNNKTADVGTFGTKLKKLDGLKVGVLGSVQHPGSVEGASTLRDRLKDDGVDVVLVAERLADGVDQTYSTSDAIQFDAVVVAAGAESLFAASSFTGGSANSASGASSLYPTGRPLQILIDGFRFGKTVGALGSGTAALRNAGIATSRDGVYVAQSVTDDFANDLKEGLRTFKFLDRFPVDH

SEQ ID NO: 42925 - DNA, 1482 bp, Chlamydomonas reinhardtii
  CDS (1)..(1482)
atggacccagcgaagattcgcccctcgtccgcgtacaacaccccctactggaccaccaacagcggtgcgccggtatggaacaacaacaactccatgacagtggggacgcgcggtcccatcctcctggaggactaccacctggttgagaagctggcgcagttcgaccgggagcgcatccccgagcgcgtcgtgcacgcccgcggcgctgcggcaaagggcttcttcgaggtgacgcacgacatctcagccctgacggcggccgacttcctgcgcgcgccgggcgtgcagacgcccgtcatcgtgcgcttctccactgtggtgcacgagcgcggctcgcccgagaccctccgcgaccctcgcggcttcgcggtcaagttctacacacgtgagggcaatttcgacatggtcggcaacaacatgccggtgttcttcatccgcgacggcatgaagttcccggacatggttcacgccttcaagcccaaccccaagagccacatccaggaggcctggcgcattatggacttcctgtcgcaccaccccgagtcatgccacatgctgacgttcctgctggacgacgccggcatcccgctcaactaccgccacatgccgggctttggcgtgcacaccatgaagctgatcaacaaggccggccgcgagacgtatgtcaagttccactgggtgcccaagtgcggcgagaagtacctgctggacgacgaggcggtgatggtgggcggagccaaccacagccacgccaccaaggacctgttcgacgccatcgcagcgggcgactacccggagtgggcgctcatggtacagaccatggaccccgcggacgaggacaagtttgactttgaccctctggacgtgaccaagacctggcccgagtcgctgttccccatgcagccggtgggccgcatggtgctcaaccgcaacgtggacaacttcttcaacgagaatgagcaggtggccttctgccccgccatcatcgtgccgggcatcggctacagcgatgacaagctgctgcagacgcgcatcttctcctacgccgacacgcagcggcaccggctgggccccaactacctactgctgccggtgaacgccccgcgcgccccccaccacaacaaccaccacgagggcttcatgaacttcatgcaccgcgacgaggaaatcaactacttccccagcaggtttgacccggtgcgcaacgcggagcgggtggctgccgtgtcgagtgcgccgctgtctgggcgccgcgagaagatggtgatcgccaaggagaacaacttcatgcaggccggcgctgctggccgcgcgttcgacgcggcgcggcaggagcggtttgtggtgcgggtggcggacatgctggcggacccccgctgcacgcaggagatccggcgcatctgggtgggctactggtcccaggccgacccgcagctgggcgcgcgcattgccgccaagctgcagggccgcggctgcctgtag

SEQ ID NO: 42926 - protein, 493 aa, Chlamydomonas reinhardtii
MDPAKIRPSSAYNTPYWTTNSGAPVWNNNNSMTVGTRGPILLEDYHLVEKLAQFDRERIPERVVHARGAAAKGFFEVTHDISALTAADFLRAPGVQTPVIVRFSTVVHERGSPETLRDPRGFAVKFYTREGNFDMVGNNMPVFFIRDGMKFPDMVHAFKPNPKSHIQEAWRIMDFLSHHPESCHMLTFLLDDAGIPLNYRHMPGFGVHTMKLINKAGRETYVKFHWVPKCGEKYLLDDEAVMVGGANHSHATKDLFDAIAAGDYPEWALMVQTMDPADEDKFDFDPLDVTKTWPESLFPMQPVGRMVLNRNVDNFFNENEQVAFCPAIIVPGIGYSDDKLLQTRIFSYADTQRHRLGPNYLLLPVNAPRAPHHNNHHEGFMNFMHRDEEINYFPSRFDPVRNAERVAAVSSAPLSGRREKMVIAKENNFMQAGAAGRAFDAARQERFVVRVADMLADPRCTQEIRRIWVGYWSQADPQLGARIAAKLQGRGCL

SEQ ID NO: 42927 - DNA, 1476 bp, Raphanus sativus
  CDS (1)..(1476)
atggatccttacaagtatcgtccagcgagttcatacaactctccattcttcaccaactccggtgctcctgtatggaacaacaactcctccatgaccgttggacccagaggtcctatccttcttgaggattaccatctcgttgagaagcttgccaacttcgacagggagcgtattccagagcgtgtggttcatgctagaggagcaagtgcaaagggtttcttcgaggtcactcatgatatatctaacctcacgtgtgccgacttcctcagagctccaggtgttcagaccccagtcattgttcgtttctccactgtcatccatgagcgtggaagtcccgagaccttgagagaccctcgtggctttgccgtcaagttctacaccagagagggaaactttgatcttgtcggaaacaacttccctgtcttcttcatccgcgacggtatgaagttccctgacatggtccacgctcttaagccaaacccaaaatctcacatccaagagaactggagagtccttgacttcttctcccaccaccctgagagcttaaacatgttcactttccttttcgatgacatcggtatcccacaagactaccgccacatggaaggttcaggtgtcaacacatacatgctgatcaacaaatccggcaaagctcactacgtgaagttccactggaaaccaacatgtggagtcaagtctctgttagaagaagatgcaatccgcgttggtggaaccaaccacagccacgcgactcaggacttgtacgactccatcgctgctggtaactaccctgagtggaagctctttgttcagataatcgatccggcggatgaagacaagttcgactttgaccctctcgatgtgaccaagacctggcctgaggatctcttgcctctccagcccgttggtcgtatggtgttgaacaagaacattgataacttctttgcggagaatgagcagcttgccttctgccctgcgatcattgttccggggatacactactctgatgacaagctgcttcaaacacgtgtcttctcctatgcggatactcagagacaccgtcttggacctaactaccttcagctaccagtgaatgctccaaaatgtgctcaccacaacaaccaccatgagggcttcatgaatttcatgcacagggacgaggaggttaactacttcccttcgaggtatgacccggttcgccatgctgagaagtatccaactccaccagcagtctgctctgggaagcgtgagaggtgcattattgagaaagagaacaacttcaaggagcctggagagagataccgttcctttacaccagagaggcaagaacgtttcatcggtagatggattgatgctctatcagaccctcgcatcacacatgaaatccgcagtatctggatctcttactggtctcaggctgataagtcactgggacagaagctggcaagccgtctgaacgtgagaccaagcatctaa

SEQ ID NO: 42928 - protein, 491 aa, Raphanus sativus
MDPYKYRPASSYNSPFFTNSGAPVWNNNSSMTVGPRGPILLEDYHLVEKLANFDRERIPERVVHARGASAKGFFEVTHDISNLTCADFLRAPGVQTPVIVRFSTVIHERGSPETLRDPRGFAVKFYTREGNFDLVGNNFPVFFIRDGMKFPDMVHALKPNPKSHIQENWRVLDFFSHHPESLNMFTFLFDDIGIPQDYRHMEGSGVNTYMLINKSGKAHYVKFHWKPTCGVKSLLEEDAIRVGGTNHSHATQDLYDSIAAGNYPEWKLFVQIIDPADEDKFDFDPLDVTKTWPEDLLPLQPVGRMVLNKNIDNFFAENEQLAFCPAIIVPGIHYSDDKLLQTRVFSYADTQRHRLGPNYLQLPVNAPKCAHHNNHHEGFMNFMHRDEEVNYFPSRYDPVRHAEKYPTPPAVCSGKRERCIIEKENNFKEPGERYRSFTPERQERFIGRWIDALSDPRITHEIRSIWISYWSQADKSLGQKLASRLNVRPSI

SEQ ID NO: 42929 - DNA, 1479 bp, Nicotiana glutinosa
  CDS (1)..(1479)
atggatccttacaagtaccgtccgtcaagtgccttcaattctccattctgcaccactaattctggtgctcctgaaaaaaacaacaattcatatcttactgttggtgcaagaggtctcgtattgcttgaggattaccatttggtggagaaacttgccaattttgacagggaacgtgtccctgaacgtgttgttcatgcccgaggtgctagtgccaaagggtttttcgaagttacccatgacatcactcaccttacctgtgctgatttccttcgagctccgggagtccagactcctgtcattgtgagattctccactgttatacatgagaggggtagtcctgaaactctgagggaccctcgtggttttgctgtcaagttctacaccagagagggaaactttgatctggtagggaacaacttccccgtattcttcatccgtgatggaatgaagttccctgacatggtccatgctctgaagccaaatcctaagtcccatatccaggagaattggagggtccttgattttttctctcatgttcctgaaagcctgcacatgttcactttcctcttcgacgatattggtattccacaagattacaggcatatggacggatctggtgtccacacattcacattgatcaacaaggctgggaaatcaacctatgcgaagttccactggaagcccacatgtggtgtacagtccttgttggaagatgaggcagcccgtgtcggaggagcaaatcatagccacgctactcaggacctctatgactctattgcagctggaaattatcctgaatggaagctcttcattcagactatggatccaagtcatgaagacagatttgatttcgatccgcttgatgtgactaaaacttggccagaggatatcttgcctttgcagccggtgggaagattagttctgaacaagaacattgataacttctttaatgaaaatgagcagctagctttctgcccttctattgtggttccaggagtttattactcagatgataagatgcttcaaactcgtattttctcgtactctgatacccagaggtatcgactgggaccaaactatttgcaacttcctgctaatgctccaaagtgcgctcatcacaacaatcactacgatggctccatgaattttatgcacagggatgaggagatcgactacttcccttcaaggtatgatcctgttcgccacgctgagaagtatcctattccttctacaatgtgcactggcaaacgcgagaagtgtgtcattctgaaagagaacaatttcaagcaaccaggagaaaggtaccgctcattcacaccagacaggcaagaacgctttattcgtcggtgggtggaggccttgtctgatcctcggatcactcacgagatacgcagcatttggatctcatactggtctcaggctgacaaatctctgggtcaaaagcttgcttctaggcttaatgtgagaccaagcatatga

SEQ ID NO: 42930 - protein, 492 aa, Nicotiana glutinosa
MDPYKYRPSSAFNSPFCTTNSGAPEKNNNSYLTVGARGLVLLEDYHLVEKLANFDRERVPERVVHARGASAKGFFEVTHDITHLTCADFLRAPGVQTPVIVRFSTVIHERGSPETLRDPRGFAVKFYTREGNFDLVGNNFPVFFIRDGMKFPDMVHALKPNPKSHIQENWRVLDFFSHVPESLHMFTFLFDDIGIPQDYRHMDGSGVHTFTLINKAGKSTYAKFHWKPTCGVQSLLEDEAARVGGANHSHATQDLYDSIAAGNYPEWKLFIQTMDPSHEDRFDFDPLDVTKTWPEDILPLQPVGRLVLNKNIDNFFNENEQLAFCPSIVVPGVYYSDDKMLQTRIFSYSDTQRYRLGPNYLQLPANAPKCAHHNNHYDGSMNFMHRDEEIDYFPSRYDPVRHAEKYPIPSTMCTGKREKCVILKENNFKQPGERYRSFTPDRQERFIRRWVEALSDPRITHEIRSIWISYWSQADKSLGQKLASRLNVRPSI

SEQ ID NO: 42931 - DNA, 1479 bp, Nicotiana tabacum
  CDS (1)..(1479)
atggatccatacaagtaccgtccgtcaagtgccttcaattctccattctgcaccactaattctggtgctcctgtttttaacaacaattcatctcttactgttggtgcaagaggtcctgtattgcttgaggattaccatttggtggagaaacttgccaattttgacagggaacgtgtccctgaacgtgttgttcatgcccgaggtgctagtgccaaagggtttttcgaagttacccatgacatcactcaccttacctgtgctgatttccttcgagctcccggtgtccagactcctgtcattgtgagattctccactgttatacatgagaggggtagtcctgaaactctgagggaccctcgtggttttgctgtcaagttctacaccagagagggaaactttgatctggtagggaacaacttccccgtcttcttcatccgtgatggaatgaagttccctgacatggtccacgcgctgaagccaaatcctaaatcccatatccaggagaattggagggtccttgattttttctctcatgttcctgaaagcctgcacatgttcactttcctcttcgacgatattggtattccacaagattacaggcatatggatggttctggtgtccacacattcacattgatcaacaaggctgggaaatcaacctatgtgaagttccactggaagcccacatgtggtgtcaagtccttgttggaagaagaagcagcccgtatcggaggagcaaatcacagccacgctactcaagacctctatgactctattgccgctggaaattatcctgaatggaagctcttcattcagactatggatccagatcatgaagacagatttgattttgatccacttgatgttacaaaaacttggccagaggatatcttgccgttgcagccggtgggaagattagttctgaacaagaacattgataacttctttaatgagaatgagcaactcgctttctgcccttctattgtggttccaggtgtttattactcagatgacaagatgcttcaaactcgtattttctcctactctgatacccagaggtatcgacttggaccaaactatttgcaacttcctgctaatgctccaaagtgtgctcatcacaacaatcactatgatggctctatgaattttatgcacagggacgaggagatcgactacttcccttcaaggtatgatcctgttcgccatgctgagaagtatccaattccttctacaatgtgcactggcaaacgagagaagtgtgtcattcagaaagagaacaattttaagcaaccaggagataggtaccgctcattcacaccagacaggcaagaacgctttattcgtcggtgggtggaggccttgtctgatcctcgtatcacttatgagatccgcaccatttggatctcatactggtctcaggctgacaaatctctgggtcaaaagcttgcttctaggcttaatgtgagaccaagcatatga

SEQ ID NO: 42932 - protein, 492 aa, Nicotiana tabacum
MDPYKYRPSSAFNSPFCTTNSGAPVFNNNSSLTVGARGPVLLEDYHLVEKLANFDRERVPERVVHARGASAKGFFEVTHDITHLTCADFLRAPGVQTPVIVRFSTVIHERGSPETLRDPRGFAVKFYTREGNFDLVGNNFPVFFIRDGMKFPDMVHALKPNPKSHIQENWRVLDFFSHVPESLHMFTFLFDDIGIPQDYRHMDGSGVHTFTLINKAGKSTYVKFHWKPTCGVKSLLEEEAARIGGANHSHATQDLYDSIAAGNYPEWKLFIQTMDPDHEDRFDFDPLDVTKTWPEDILPLQPVGRLVLNKNIDNFFNENEQLAFCPSIVVPGVYYSDDKMLQTRIFSYSDTQRYRLGPNYLQLPANAPKCAHHNNHYDGSMNFMHRDEEIDYFPSRYDPVRHAEKYPIPSTMCTGKREKCVIQKENNFKQPGDRYRSFTPDRQERFIRRWVEALSDPRITYEIRTIWISYWSQADKSLGQKLASRLNVRPSI

SEQ ID NO: 42933 - DNA, 2151 bp, Claviceps purpurea
  CDS (1)..(2151)
atggtgcgaacttcgctagctgccttctccctggcagtcgccggcctggccagcgcacaatgccccttcgcagacccaggacgtcttgccgcaagagctcagggcctagatgaatcgtccagaggccatctggctggtttcgaagtcgacgacagcgagggctacctgacgtccgacgtcggtggcccaatcgaggatcagaacagtctcaaagccggggaccgaggccctacactgctggaagattttattttccgacagaaaatcacccattttgaccacgagcgagttcccgaaagagctgttcacgcccgaggaacaggcgcccacggcaccttcaccagctacggcgattatagcaatatcaccgcagcctcatttttgggccaaaaggacaagaagacgcccgtatttgttcgtttctccactgtagcgggctctcgtggaagtgcggacacagctcgtgacgtgcacggatttgccgttcgattgtataccgacgaaggaaacttcgatatcgtgggcaacaatgttcctgtgttcttcattcaggatgctatccaattccccgatcttatccattcggtcaagccacgccaggacaatgagatcccacaggctgccactgctcacgactcagcgtgggacttcttctcgcaacagacgtcgactctgcacactttgttctgggccatggctggttatggtatcccacgtagtttgcgccacatggacggttttggtgtacacacataccgactcgttaccgatgatggcacgtccaagctggtaaagtggcactggaagtctaagcagggcaaagccagtctagtttgggatgaggcccagcgcgccgccggcaagaatgccgactaccacagacaggatctcttcgacgccatccagtcgggcaactatcccgagtgggagctcaacctgcaaatcatcaacgaggatcaagccctagcctttggattcgacgtgctcgatcctaccaagatcattcctgaggaatatgcccctctgatgccggtcggtgtcatgagactcgatgccaatccttccaactattttgctgagactgaacaagtcatgttccaacctggccatattgtgcgaggcgtcgacttcacggaggaccctctgctgcagggccgcatcttctcgtacctggatactcaaattaacagacacggtggccccaactttgagcagcttcccatcaacaggcctgtcgttcctattcacaacaacaatcgcgatggagctggccagaatttcattcataagaacaatgctccttatacccccaacactctgaacaagggatttcccaagcaagccaaccagaaggaaggcaagggctttttcaccgctcccggacgcaaggtctctggctccctgcaacggcgtctcagcaacacgttccttgatcactggacccagccccgtctattcttcaactccatcacgcctatcgagcagcagttcttgattaatgcgatccgcttcgaaacctcgcacctcagccaggttgtgcagaagaacgtcctcgcgcagctcaacaagatcagccacgatgttgccgtccgcgtcggcaaggctcttggcctggacgcaccccccgcagatgacaagtactaccacaacaaccagaccaagggcctgtccatctttggcgaggagctgcccaccatcgctaccctcatcgtcggcgtcttggcctctactgcatccaaaaactcgctggcccaggcccaggccctcaaggacgccttcaaaaccagggaggtcaacgtcatcgtggtggctgaatccctcgccaccggtgtggaccagacatacgacgccgccgacgcagtcagcttcgacggcatcgttgtcgccgacggagtcgaggccctctttgacaacaccaagaaatcctcgctcttccagcctggtcgtcctagccaaatcgtaaacgacggatacaactggggcaaacccatgggattcctcggcagcgccaagagggccgttaaggcgacttctgtggtggagggtgccggtgtgtacatgagaaacagcacggctactctggtgggagacttccagaaggggcttgccaagttcaagtttacggaccggttccctatggacactaaataa

SEQ ID NO: 42934 - protein, 716 aa, Claviceps purpurea
MVRTSLAAFSLAVAGLASAQCPFADPGRLAARAQGLDESSRGHLAGFEVDDSEGYLTSDVGGPIEDQNSLKAGDRGPTLLEDFIFRQKITHFDHERVPERAVHARGTGAHGTFTSYGDYSNITAASFLGQKDKKTPVFVRFSTVAGSRGSADTARDVHGFAVRLYTDEGNFDIVGNNVPVFFIQDAIQFPDLIHSVKPRQDNEIPQAATAHDSAWDFFSQQTSTLHTLFWAMAGYGIPRSLRHMDGFGVHTYRLVTDDGTSKLVKWHWKSKQGKASLVWDEAQRAAGKNADYHRQDLFDAIQSGNYPEWELNLQIINEDQALAFGFDVLDPTKIIPEEYAPLMPVGVMRLDANPSNYFAETEQVMFQPGHIVRGVDFTEDPLLQGRIFSYLDTQINRHGGPNFEQLPINRPVVPIHNNNRDGAGQNFIHKNNAPYTPNTLNKGFPKQANQKEGKGFFTAPGRKVSGSLQRRLSNTFLDHWTQPRLFFNSITPIEQQFLINAIRFETSHLSQVVQKNVLAQLNKISHDVAVRVGKALGLDAPPADDKYYHNNQTKGLSIFGEELPTIATLIVGVLASTASKNSLAQAQALKDAFKTREVNVIVVAESLATGVDQTYDAADAVSFDGIVVADGVEALFDNTKKSSLFQPGRPSQIVNDGYNWGKPMGFLGSAKRAVKATSVVEGAGVYMRNSTATLVGDFQKGLAKFKFTDRFPMDTK

SEQ ID NO: 42935 - DNA, 1479 bp, Mesembryanthemum crystallinum
  CDS (1)..(1479)
atggatccctacaagtaccgaccgtcaagtgctttcaattctccttacttcaccaccaattcaggtgctccggtttataacaacaactcttcattgactgtcggtaccagaggtccaattcttctggaggattaccatctagtggaaaagcttgcgaactttgaccgggagcgtataccagagcgtgttgttcacgccagaggagcaagtgccaagggtttttttgaagttactcatgatgtttcacaccttacatgtgccgatttcctgcgtgcccctggtgtccagacacctgtgattgtccggttctccactgttattcatgagcgtggaagtcctgaaactatcagggaccctcgaggttttgctgtgaagttctacaccagagagggtaactttgatatggtaggaaacaatttccctgtgttcttcatccgtgatggtatgaagttccccgatatggtgcatgctctcaaacccaaccccaaatcccacatccaagagaattggagagtcctcgatttcttctcccaccatcccgagagtttgcacatgttcactttcctctttgatgatgtgggagtccctacagactacaggcacatggaaggctctggtgtcaacacatacactttgattagcaagtctggcaaagtgcactatgtgaagttccattggaaaccaacctgtggtgtcaaatgtctgttggaggaagaggcagtcaaaattggaggagctaaccacagccatgcgactcaggacctctatgactcaattgcggctggaaactatcctgagtggaaactctacatccaaacaatcgacccagctgatgaagataaatttgactttgacccactagatgttaccaagacttggcctgaggacattttgccgctgcagccagtgggtcgtttggttttgaacaaaaacattgacaacttctttgcagaaaatgagcagctggccttttgccctggtattgtggttcctggtgtctactactcagatgataagctcctgcagactagaattttctcgtacgctgatacccagagacaccgtcttggacccaactacctgcagcttccagttaatgcaccaaagtgtgctcaccacaacaatcactatgatggtcaaatgaactttatgcatagggatgacgaggttgattacttcccatcaagatatgatcctgttcgtcatgcggagagatatcccattccaccaaacgtcttgaatggaaaccgtgataggcaaatcatccagaaggagaacaacttcaagcaaccaggagagagatacaggtcatgggacccagcaaggcaagagagatttatttgcagatgggttgacgctctttctgatcctcgtatcactcacgagattcgcaacatttggatctcttactggtctcaggccgacaaatctgtgggtatgaaactagcaagcagacttaatgtgaggccaaccatgtga

SEQ ID NO: 42936 - protein, 492 aa, Mesembryanthemum crystallinum
MDPYKYRPSSAFNSPYFTTNSGAPVYNNNSSLTVGTRGPILLEDYHLVEKLANFDRERIPERVVHARGASAKGFFEVTHDVSHLTCADFLRAPGVQTPVIVRFSTVIHERGSPETIRDPRGFAVKFYTREGNFDMVGNNFPVFFIRDGMKFPDMVHALKPNPKSHIQENWRVLDFFSHHPESLHMFTFLFDDVGVPTDYRHMEGSGVNTYTLISKSGKVHYVKFHWKPTCGVKCLLEEEAVKIGGANHSHATQDLYDSIAAGNYPEWKLYIQTIDPADEDKFDFDPLDVTKTWPEDILPLQPVGRLVLNKNIDNFFAENEQLAFCPGIVVPGVYYSDDKLLQTRIFSYADTQRHRLGPNYLQLPVNAPKCAHHNNHYDGQMNFMHRDDEVDYFPSRYDPVRHAERYPIPPNVLNGNRDRQIIQKENNFKQPGERYRSWDPARQERFICRWVDALSDPRITHEIRNIWISYWSQADKSVGMKLASRLNVRPTM

SEQ ID NO: 42937 - DNA, 1482 bp, Mesembryanthemum crystallinum
  CDS (1)..(1482)
atggatccctacaagtatcggccatcgagttcttacaacactagtttcatgaccactaaaactggtcaaccagtttggaatgatgactcttcattgactgttggagcaagaggtccaatccttttggaggattaccatctgttggaaaagattgctagctgggatagagagcgtatacctgaacgtgttgttcatgctaggggagctagtgctaaggggttttttgaagttaccaatgatattactcacctcacatgtgccgacttcttgcgcgctcctggtgttcaaacacctgttattgttcgtttctctactgttattcatgagcgtggcagtcctgaaaccatgagggatcctcgtggttttgctctcaagttctacactagagagggtaacttcgatttagtaggaaacaatttccctgtgtttttcaaccgtgatgcaatgaaatttcctgatgtagtccgggctttcaaacccaacccaaaatctcacattcaagagatgtggaggattctggatttctgctctcaccttcctgagagtttgcacacatttgcttggttctttgatgatgtgggaatcccaataaactacaggcacatggaagggtttggtgtgcatacattcactatgctcaacagggctggcaaagaaacatatgtcaagttccactggaagccaacctgtggagtgaaatctatcgtcaccgaagaagaagctattcaagtaggaggagcaaaccacagtcatgcaactcaggatctctatgactccattgcagctgggaattaccctgagtggaggttgttcattcaaacaatggatcctgcagatgaagataaattcgactttgacccgttagatattaccaagacatggccagaggacattctgcccctgcagccagtgggtcgtttggtgttgaacaagaacatcgacaactttttcactgagaatgaaatgctggcttttaacccggctagtatagttcccgggatccacttctcacatgacaagatgctccaggctcggacttttgcttatgctgatacccagagacatcgtcttggtgtcaacttccttctgcttcctgttaatgctcctaagtgtgctcatcacaatgatcatcatgatggattcatgaacttcatgcaccgtgatgaggaggttaattacttcccttcaagaagtaatgtctgtcatcatgctgagagattccccattccatcacataccttgactggaaggcgagaaaggcgaattattccaaaggaaaacaacttcaagcagcctggagacagatacagatcatgggacccagccaggcaagagagataccttgcgagatgggtaaaggctctgtctgatccaaaggtcactcctgagatccggggcgtttgggtctcatggttgtctcagtcggacagatctcttggcatgaaactagctaataaactcaatgtgaggccgaccatgtga

SEQ ID NO: 42938 - protein, 493 aa, Mesembryanthemum crystallinum
MDPYKYRPSSSYNTSFMTTKTGQPVWNDDSSLTVGARGPILLEDYHLLEKIASWDRERIPERVVHARGASAKGFFEVTNDITHLTCADFLRAPGVQTPVIVRFSTVIHERGSPETMRDPRGFALKFYTREGNFDLVGNNFPVFFNRDAMKFPDVVRAFKPNPKSHIQEMWRILDFCSHLPESLHTFAWFFDDVGIPINYRHMEGFGVHTFTMLNRAGKETYVKFHWKPTCGVKSIVTEEEAIQVGGANHSHATQDLYDSIAAGNYPEWRLFIQTMDPADEDKFDFDPLDITKTWPEDILPLQPVGRLVLNKNIDNFFTENEMLAFNPASIVPGIHFSHDKMLQARTFAYADTQRHRLGVNFLLLPVNAPKCAHHNDHHDGFMNFMHRDEEVNYFPSRSNVCHHAERFPIPSHTLTGRRERRIIPKENNFKQPGDRYRSWDPARQERYLARWVKALSDPKVTPEIRGVWVSWLSQSDRSLGMKLANKLNVRPTM

SEQ ID NO: 42939 - DNA, 2223 bp, Pleurotus ostreatus
  CDS (1)..(2223)
atgtcctccgtcacagcagcagcaaagcaggcggtatcgagtatcaccgacaatgcaaaaatggctagtttgactcaattccgcgtcgagtgtggtccttcgcagcggatgaccaccgaccagggacttcatgtagccgacacagacaactgtaactcaaacgtaggaccagcattgcttgaagaccacatcgcacgagagaagattatgcgctttgaccacgagcgcatcccagaacgagtggtacacgcacgaggcgctggtgcgcatggctatttcaaagcgtatgattcgagtgcagagcagtggacgaaggccaaagtcctcatggatccgtcacgtacgacaccggtattcgtgcggtttagcacggtgcaaggctccagaggaagtgctgacactgttcgcgacgtcaggggctttgcggtgaaattctacaccgaggaggggaattgggacatcgtggggaacaatatcccggtgttcttcatccaggatgcgatcaagttccctgatatcatccatgcggtcaagcctgagcctcacaacgaagtacctacagggcagagcgcgcacaacaacttctgggactttgttgggcttcaaccagagtcggcgcatatgatcatgtgggtgatgtctgaccgcgcgatccctcgttcgtaccggatgatgcagggttttggcgtgaacacgtacacgctcttaaacgctacgggcgagaagcactttgtgaagtttcattggatcccagagctcggtgtccacagcctagtctgggatgaagctcttaaaatcgcgggtcaagatcctgatttccatcgcaaagatttgaatgaagccatcgagtccggggcctatcctaaatggcgtctagcactccaagtcatctctgagaaggacgaacacaacttcgacttcgatatcctcgacgcgacgaagatatggcccgaggagttggtgccactgcattttgtgggcgagatggttctgaacaaggtggttgatgagtattttgccgaggtggagcaggttgctttttgtaccagcaacattgtaccaggaatcgggttcagcgacgacccgctgctccaaggcaggaactttagttacctcgacacgcagcttagccgtctaggtatcaactggcaacagattcccattaaccgacctgtctgccctgtgatgaatttccagcgcgatgggcaaatgcagatgaagatccacaagggcaccgtcaactattggcccaaccgccaggaagccgttcagcccgtcgctgtttcggaaggcggctacgatgatcatgttcgcaagatctccggaatagcccaacgcatgcgtggaccaaaattcaacgagcactactctcaggcccagctcttctacaactccctctcgcctacggagcaaacacacctgcagagcgcgcttgccttcgagctcagccactgcgaggacccggccgtgtaccgcaactacattaacatcctcaacaacatcgactatcagctcgcgaagtatgtcgccgtcgccgtgggaggcgacgtccccgatgcgtcagcgaagcccaacgaggggaacaaaagcgctaggctgagccaggtgtactatgcgccgaaggagccgactatcaaaggccggcgcatcgccattctgctggcggatgggttcgataaggcggaggttgtggctatcaaggcactcattacgtcggcgtcggcgaatgcgttcgttattgggccgaggaggggcaaggtctacgctgctggcgagaagattggtgtcgaaggaggcgggattgatgcggatcatcactttgaagggcagcgtagcacaatgttcgatgcgctcgtcattccgagcggggagcatgttgcgttgttgatgaagagtgggcgcgctgtgcattggttgagagaggcgttcgggcattgcaaggcgatcggtgccgttggggaagctatactcttcgtgcaacaggccatcaaccttccagaagtccaatacgcagaccccaccgatagttctatggaagttgtagcgtcgtacagcgtagtgacaacggcccactatggcgtatcgacggctatcggagacgctacgaagatgacgctgaacattggtgagaaggggttcatggaaaggtttgcgtacgaggtcagcaagcaccggtgcttcaagagggaggaggacgggttgactgcgaggattgcgtactga

SEQ ID NO: 42940 - protein, 740 aa, Pleurotus ostreatus
MSSVTAAAKQAVSSITDNAKMASLTQFRVECGPSQRMTTDQGLHVADTDNCNSNVGPALLEDHIAREKIMRFDHERIPERVVHARGAGAHGYFKAYDSSAEQWTKAKVLMDPSRTTPVFVRFSTVQGSRGSADTVRDVRGFAVKFYTEEGNWDIVGNNIPVFFIQDAIKFPDIIHAVKPEPHNEVPTGQSAHNNFWDFVGLQPESAHMIMWVMSDRAIPRSYRMMQGFGVNTYTLLNATGEKHFVKFHWIPELGVHSLVWDEALKIAGQDPDFHRKDLNEAIESGAYPKWRLALQVISEKDEHNFDFDILDATKIWPEELVPLHFVGEMVLNKVVDEYFAEVEQVAFCTSNIVPGIGFSDDPLLQGRNFSYLDTQLSRLGINWQQIPINRPVCPVMNFQRDGQMQMKIHKGTVNYWPNRQEAVQPVAVSEGGYDDHVRKISGIAQRMRGPKFNEHYSQAQLFYNSLSPTEQTHLQSALAFELSHCEDPAVYRNYINILNNIDYQLAKYVAVAVGGDVPDASAKPNEGNKSARLSQVYYAPKEPTIKGRRIAILLADGFDKAEVVAIKALITSASANAFVIGPRRGKVYAAGEKIGVEGGGIDADHHFEGQRSTMFDALVIPSGEHVALLMKSGRAVHWLREAFGHCKAIGAVGEAILFVQQAINLPEVQYADPTDSSMEVVASYSVVTTAHYGVSTAIGDATKMTLNIGEKGFMERFAYEVSKHRCFKREEDGLTARIAY

SEQ ID NO: 42941 - DNA, 1455 bp, Rhizobium sp
  CDS (1)..(1455): transl_table=11
atgaaaaagctgaccaacgccaccggggcaccggttgccgacaacttcaatatccagaccgccggcccccgtggaccggccctcttgcaagacatctggttgctggaaaaactcgcccacttcgaccgtgagctgatcccggaacggcgcatgcacgccaagggtgcgggcgcctacggcaccttcaccgtcacccatgacatcacccgttatacaaaagccagcatcttcagctcggtgggcaaggaaacgccgctgttcgtgcgtttttcctcggtggccggcgagcgcggcagcgcggatgccgagcgtgatatccgtggcttcgcggtgaagttctacaccgacgaaggcaactgggacattgtcggcaacaacacgccggtgtttttcttccgcgacccgctgcgtttctccgacctcaaccacgtggtcaagcgcgaccccagcccggccctgcgcaatgccaccagcaactgggacttctggaccctgctgcccgaagcgctgcaccaggtgaccagcgtgatgagcgatcgcggattacctaccagcttccgtcacatgcacggtttcggcagtcacaccttcagcctgatcgaccgcgacaacaaacgggtgtgggtgaagtttcattttgtctgccagcaaggcatcgaaaacctctcggacgccgaggccgaagcagtggttggcaaggaccgcgaaagcaatctgcgcgacctttacgaagtcatcgagcagggcaacttcccgcgctggaaattgtgcattcaggtgatggaggaagaacaggcgctcaactatcggcacaacccgttcgacttgaccaaggtctggccacacgctgcccgcgtgattgaagtgggcatcatggagctcaatcgcaacagccgaaaagccaactttgccgaaatcgaacaggcagcgttttcgccggccaacgtggtgccgggcgtgagtttttcgccggaccgcatctccagggcgcggctgttttcctatggtgatgcccagcgttatcgcctttggctgaacttcaaccacatcccggtcaatgcgccgcgctgcccggccagcagctaccaccgcagctaccaccgcgacggcgccatgcacgccgacggcaacctcggcggtaccgccagttacttcccgaacagtgtcggtgaatggcaggactcgccggaacgtgccgagccgccgctgccgctggaaggctttgaccagcattatgatcatcggttggaagaggatcattacgaacagccgggtaacctgtttcgactgctcgatccggcccgcaacgagttgctgttcgacaacaccgcacgcgccatgaacggcgtgccgcagcgaatccgccagcgtcatatgacaattgcaccaaagccgagtcctgcgtacggatttggcgtggccgaggcgttggagcggttggtgccgctagggtaa

SEQ ID NO: 42942 - protein, 484 aa, Rhizobium sp
MKKLTNATGAPVADNFNIQTAGPRGPALLQDIWLLEKLAHFDRELIPERRMHAKGAGAYGTFTVTHDITRYTKASIFSSVGKETPLFVRFSSVAGERGSADAERDIRGFAVKFYTDEGNWDIVGNNTPVFFFRDPLRFSDLNHVVKRDPSPALRNATSNWDFWTLLPEALHQVTSVMSDRGLPTSFRHMHGFGSHTFSLIDRDNKRVWVKFHFVCQQGIENLSDAEAEAVVGKDRESNLRDLYEVIEQGNFPRWKLCIQVMEEEQALNYRHNPFDLTKVWPHAARVIEVGIMELNRNSRKANFAEIEQAAFSPANVVPGVSFSPDRISRARLFSYGDAQRYRLWLNFNHIPVNAPRCPASSYHRSYHRDGAMHADGNLGGTASYFPNSVGEWQDSPERAEPPLPLEGFDQHYDHRLEEDHYEQPGNLFRLLDPARNELLFDNTARAMNGVPQRIRQRHMTIAPKPSPAYGFGVAEALERLVPLG

SEQ ID NO: 42943 - DNA, 1467 bp, Streptomyces coelicolor
  CDS (1)..(1467): transl_table=11
ttgcctgagaacaaccagaagccgctgaccacggtcgccggtccgccggttcccgacaaccagaactccctgacctccggcccgcgccgcccgatgctcctgcaggacgtgtggttcctggagaagctcgcgcacttcgaccgggaggtcatcccggagcgccggatgcacgccaaggggtcggggctgttcggcactttcacggtcactcacgacatcacccggtacaccagcgcgaagatcttctccgagatcggcaagaagaccccgctgttcacccggttctccaccgtcgccggtgagcgcggtgccgccgacgccgagcgcgacatccgcggcttcgccgtgaagttctacacggacgagggcaactgggacctggtcggaaacaacaccccggtcttcttcttccgcgacccgctgaagttcccggacctcaaccacgcggtgaagcgcgacccgcgcaccaacctgcgcaacgccgagaacaactgggacttctggaccaacctccccgaggccctgcaccaggtcacgatcgtgatgtcggaccgcggcatcccggcctcctaccggcacatgcacgggttcggctcgcacacgtacagcctgatcaacgccgagggcgagcggttctgggtcaagttccaccaccgcacccagcagggcatcaagaacctcaccgacgccgaggccgaggccctggtcggcaaggaccgcgagtcccaccagcgcgacctcttcgacgcgatcgaggacggcgacttcccgaagtggaagctgttcatccaggtcatgccggaggccgacgcggagaactaccgcttccaccccttcgacctcaccaaggtctggtcgaagaaggactacccgctgatcgaggtcggcgagtgggagctcaaccgcaaccccgacaactacttcgcggacgtggagcaggccgccttcagcccggccaacgtggtcccgggcatcgaggcttcccccgaccggatgctgcagggccgcctcttctcctacggcgacgcccagcgctaccgcctcggcgtcaaccaccaccaccagatcccggtcaacgccccgaagaacccggtgaactcctaccaccgcgacccggccatgcgcgtcgacggcaaccagggagccaccccgggcatcgagcccaactcctacggccgctggcaggagcagccggcctaccgcgacccggcccaggccgtgggcgccgtcgccgaccggttcaactaccgcgaggacgacgacaactacttcgagcagcccggcaacctgttccggcagatgagcccggagcagcagcaggttctgttcgagaacacggcacgcgccatcgacggcgcctcggcgcagaccatcgagcgccacatcggcaactgcacccaggccgacccggcctacggcgcgggcgtccgcaaggcgatcgaggccctggccgccggcaacctctga

SEQ ID NO: 42944 - protein, 488 aa, Streptomyces coelicolor
MPENNQKPLTTVAGPPVPDNQNSLTSGPRRPMLLQDVWFLEKLAHFDREVIPERRMHAKGSGLFGTFTVTHDITRYTSAKIFSEIGKKTPLFTRFSTVAGERGAADAERDIRGFAVKFYTDEGNWDLVGNNTPVFFFRDPLKFPDLNHAVKRDPRTNLRNAENNWDFWTNLPEALHQVTIVMSDRGIPASYRHMHGFGSHTYSLINAEGERFWVKFHHRTQQGIKNLTDAEAEALVGKDRESHQRDLFDAIEDGDFPKWKLFIQVMPEADAENYRFHPFDLTKVWSKKDYPLIEVGEWELNRNPDNYFADVEQAAFSPANVVPGIEASPDRMLQGRLFSYGDAQRYRLGVNHHHQIPVNAPKNPVNSYHRDPAMRVDGNQGATPGIEPNSYGRWQEQPAYRDPAQAVGAVADRFNYREDDDNYFEQPGNLFRQMSPEQQQVLFENTARAIDGASAQTIERHIGNCTQADPAYGAGVRKAIEALAAGNL

SEQ ID NO: 42945 - DNA, 1479 bp, Oryza sativa
  CDS (1)..(1479)
atggatccctacaagcatcggccgtccagcgggagcaattccaccttctggaccaccaactccggcgcccccgtctggaacaacaactccgccctcaccgtcggagagcgaggccctatcctccttgaggactatcatctgattgaaaagcttgcacagtttgacagggagcgtatccctgaacgtgtcgttcatgcaaggggagccagtgccaagggattttttgaggttactcatgatatttctcacctcacatgtgctgattttctccgtgctcctggtgttcagaccccagttattgttcggttctccacagtcgtgcatgagcgtggaagccctgagacattgagggatccacgtggttttgctgtcaagttttacactagagagggtaattttgatcttgttgggaacaatatgcctgtcttttttatccgagatgggatgaaattccctgacatggtccatgctttcaagccaagtccaaagaccaatatgcaggagaactggagaatagttgatttcttttcacaccacccagagagcctgcacatgttctccttcctctttgacgatgtaggcatcccactcaactacaggcacatggagggttttggtgtcaacacctacaccctaatcaataaggatggaaagcctcaccttgtcaaattccactggaagcctacctgtggtgtcaaatgcctgttggatgatgaagctgtgactgttggcggcacctgccacagccatgccacgaaggacttgactgattctattgcagcagggaattacccagagtggaagctttacatccagactattgatcctgatcatgaggacagatttgacttcgatcctcttgatgtcaccaagacatggccagaggatatcatccccctgcagccagttggacggatggtcctgaacaaaaacattgataacttctttgcagaaaatgaacagcttgctttctgcccagcgataattgtccctggaatccattactctgatgataagctgctccagacaagaattttctcctatgctgatacccaaaggcaccgtcttggcccaaactatttgatgcttcctgtgaatgcaccaaaatgtgcataccacaacaaccaccacgatggctccatgaatttcatgcacagggatgaagaggttaactacttcccttcaaggtttgatgctgcacgtcatgctgagaaggtccctattcctcctcgtgttctaacaggctgtcgggaaaagtgtgtcattgacaaggagaacaatttccaacaggctggtgagagataccggtcatttgaccctgccaggcaagatcgttttctccagcggtgggttgatgctctctcagatcctcgtattacacatgaactccgtggcatctggatctcctactggtcgcagtgtgatgcgtcccttgggcagaagctggcttcacgtctcaacctgaaaccaaacatgtag

SEQ ID NO: 42946 - protein, 492 aa, Oryza sativa
MDPYKHRPSSGSNSTFWTTNSGAPVWNNNSALTVGERGPILLEDYHLIEKLAQFDRERIPERVVHARGASAKGFFEVTHDISHLTCADFLRAPGVQTPVIVRFSTVVHERGSPETLRDPRGFAVKFYTREGNFDLVGNNMPVFFIRDGMKFPDMVHAFKPSPKTNMQENWRIVDFFSHHPESLHMFSFLFDDVGIPLNYRHMEGFGVNTYTLINKDGKPHLVKFHWKPTCGVKCLLDDEAVTVGGTCHSHATKDLTDSIAAGNYPEWKLYIQTIDPDHEDRFDFDPLDVTKTWPEDIIPLQPVGRMVLNKNIDNFFAENEQLAFCPAIIVPGIHYSDDKLLQTRIFSYADTQRHRLGPNYLMLPVNAPKCAYHNNHHDGSMNFMHRDEEVNYFPSRFDAARHAEKVPIPPRVLTGCREKCVIDKENNFQQAGERYRSFDPARQDRFLQRWVDALSDPRITHELRGIWISYWSQCDASLGQKLASRLNLKPNM

SEQ ID NO: 42947 - DNA, 1485 bp, Secale cereale
  CDS (1)..(1485)
atggatccctgcaagttccggccgtcgagcagcttcgacaccaagacgacgacgacgaacgccggccagccggtgtggaacgacaacgaggcgctcaccgtcggcccgcgtggcccgatcctgctggaggactaccacctgctggagaagatcgcccacttcgcgcgcgagcgcatcccggagcgcgtcgtccacgcgcggggcgcctccgccaagggcttcttcgagtgcacccacgacgtcacgggcctcacctgcgccgacttcctccgcgcgcccggggcgcgaacgccggtgatcgtccgcttctccaccgtcatccacgagcgcggctcccccgagaccatccgcgacccgcgcggcttcgccgtcaagttctacacgcgcgagggcaactgggacctcctcggcaacaacttccccgtcttcttcatccgggacggcatcaagttccccgacgtcatccacgccttcaagcccaaccccaagtcccacgtgcaggagtactggcgcgtcttcgacttcctttcccaccaccccgagagcctccacaccttcttcttcctcttcgacgatgtcggcatccccaccgactaccgccacatggacggcttcggcgtcaacacctacaccttcgtcacccgcgccgggaagtcccactacatcaaggtccactggcgccccacctgcggcgtcagctgcctcatggacgacgaagccaccctcgtcggcggcaagaaccacagccacgccacccaggacctcttcgactccattgacgccggtaacttccccgagtggaagctcttcgtgcaggtcatcgaccccgaggaggaggaccgctttgactttgacccgctggatgacaccaagacgtggcccgaggacctcgtccccctccagcccgtggggcgcctcgtgctcgaccgaaacgtagataacttcttcaacgagaacgagcagctggccttcggccccggcctcgtcgtgcccgggatctactattctgatgacaagatgctgcagtgcagggtgttcgcttacgccgacacgcagcgctaccgcctggggccaaactacctgatgctccccgtcaacgcgcccaagtgcggcttcaagaacaaccactacgacggcgccatgaacttcatgcaccgcgacgaggaggtggactactacccgtcacgccacgcgccgctccggcaggcggagccggccagcttccccgtgccaacgcgacccgtcgtcggaaaaagggagaagacgaggatcaagaaggagaacgacttcgtgcagcccggggagaggtaccgcagctgggcgcccgaccgccaggacaggttcgtgcgccgcttcgccgacgccctcgcccaccccaaggtcagccacgagctacgcgtcatctggatcgacttcctctccaagtgtgacaagtcgtgcgggatgaaggtggcaaaccgtctcaacgtgaagccaagcatgtga

SEQ ID NO: 42948 - protein, 494 aa, Secale cereale
MDPCKFRPSSSFDTKTTTTNAGQPVWNDNEALTVGPRGPILLEDYHLLEKIAHFARERIPERVVHARGASAKGFFECTHDVTGLTCADFLRAPGARTPVIVRFSTVIHERGSPETIRDPRGFAVKFYTREGNWDLLGNNFPVFFIRDGIKFPDVIHAFKPNPKSHVQEYWRVFDFLSHHPESLHTFFFLFDDVGIPTDYRHMDGFGVNTYTFVTRAGKSHYIKVHWRPTCGVSCLMDDEATLVGGKNHSHATQDLFDSIDAGNFPEWKLFVQVIDPEEEDRFDFDPLDDTKTWPEDLVPLQPVGRLVLDRNVDNFFNENEQLAFGPGLVVPGIYYSDDKMLQCRVFAYADTQRYRLGPNYLMLPVNAPKCGFKNNHYDGAMNFMHRDEEVDYYPSRHAPLRQAEPASFPVPTRPVVGKREKTRIKKENDFVQPGERYRSWAPDRQDRFVRRFADALAHPKVSHELRVIWIDFLSKCDKSCGMKVANRLNVKPSM

SEQ ID NO: 42949 - DNA, 1593 bp, Gallus gallus
  CDS (1)..(1593)
atggctgacggacgggacgtcgcctcggagcagctgaagcggtggcaaagccagcgaggctctcagaagccagatgccttgaccactggtgctggcaacccaataggagataagctgaatattatgacagttgggccacgtggacctcttcttgttcaagatgttgttttcactgatgagatggctcattttgacagagagaggattcctgaaagagttgtgcatgcgaaaggagcaggtgcctttggctattttgaagtgactcatgatattaccaagtactgcaaggcgaaagtgtttgaacacattggaaaaagaactccaattgctatacggttctccactgttgctggagaatctgggtcagctgatacagttcgtgaccctcgaggctttgcaatgaaattctatacagaagaaggtaactgggatcttgtgggaaataatactcctatcttctttattcgggatgcaatgttgtttccatccttcatccatagccagaagaggaaccctcagactcatttgaaggatccagatatggtatgggacttcttgagtcttcgccctgagtctttacatcaagtgtctttcctgtacagtgatcgtggtattcctgatggatttcgccatatgaatggatatggatctcatacttttaaacttgttaatgctagtgggggagctgtttactgcaagttccacgttaagaccgatcagggtatcaaaaatctttctgttgaagaagcagcaagactggcttctactgatcctgattatggaattcgtgatctttacaatgccatagccaatggaagctatccttcctggtctttctacattcaagttatgacttttgaagaagcagagaggttcccatttaatccttttgatttgactaagactaagatttggccacatggtgactaccctctcattccagtgggcaagattgtcttgaacaggaatcctgtcaattactttacggaggtagaacagatggcgtatgaccctagcaacatgccacctggtattgaacctagccctgataagatgctgcagggtcgtctctttgcgtatcctgacacgcatagacatcgtctaggaccaaactatctgcaaattcctgtgaattgcccctacagggctcgcgtggccaattatcagagggacgggccaatgtgtgtgtctgacaaccaaggtggcgccccgaactattatccaaatagctttacaggcccagaagatcagcctgttctgaaggagagccgcatgtccgtttcaggagatgtgcagcgtttcagtagtgcaaatgaagataatgtgtctcaggtgcgagacttctatctcaaagtgttgaaagaggatgaacgccaaaggctgtgtaagaatatcgctgatcatcttaaagacgctcaacttttcattcagaagagagctgtgaaaaacttcactgatgttcatcctgactatggcgcacgtattcaggcactgctggacaaatacaatgctgaagctgggaaaaaggatgtaattaggacatacacgcaagccacttctcgtgtgtctgccaaagagagatccaacttgtaa

SEQ ID NO: 42950 - protein, 530 aa, Gallus gallus
MADGRDVASEQLKRWQSQRGSQKPDALTTGAGNPIGDKLNIMTVGPRGPLLVQDVVFTDEMAHFDRERIPERVVHAKGAGAFGYFEVTHDITKYCKAKVFEHIGKRTPIAIRFSTVAGESGSADTVRDPRGFAMKFYTEEGNWDLVGNNTPIFFIRDAMLFPSFIHSQKRNPQTHLKDPDMVWDFLSLRPESLHQVSFLYSDRGIPDGFRHMNGYGSHTFKLVNASGGAVYCKFHVKTDQGIKNLSVEEAARLASTDPDYGIRDLYNAIANGSYPSWSFYIQVMTFEEAERFPFNPFDLTKTKIWPHGDYPLIPVGKIVLNRNPVNYFTEVEQMAYDPSNMPPGIEPSPDKMLQGRLFAYPDTHRHRLGPNYLQIPVNCPYRARVANYQRDGPMCVSDNQGGAPNYYPNSFTGPEDQPVLKESRMSVSGDVQRFSSANEDNVSQVRDFYLKVLKEDERQRLCKNIADHLKDAQLFIQKRAVKNFTDVHPDYGARIQALLDKYNAEAGKKDVIRTYTQATSRVSAKERSNL

SEQ ID NO: 42951 - DNA, 2106 bp, Xanthomonas oryzae
  CDS (1)..(2106): transl_table=11
atggccaagtcttccggcaaacctgcatccgccgtctccgtcgaccgttccgcaagcgcgcctgatgcgcgcggtactggcgacgaattgcaccagaaggcccgcggtaggcatccgcagctgaccaccaaccagggcattcccgttggtgacaaccaaaactcgctgcgcgcaacaccacgcggcccgacgctgctggaagatttcatcctgcgcgagaagatcacccacttcgatcacgagcgcatccccgagcgcatcgtgcatgcgcgtggcagcgcctcgcacggctacttcaagctcaccaagtcgttgagccaatacaccactgccaagatctttaccgaggtcggtgaaaaaacaccgctatttacccgtttttctaccgttgcgggcggcgccggctcggtggacacgccgcgcgatgtgcgcgggtttgccgtgaagttctataccaaggaaggcaattgggatctggtgggcaacaatatcccggtgtttttcatccaggatgcgatcaagttccctgacctgatccatgcagtgaagatggaaccggatcgcggttttccgcaggctgccagcgcacacgacacgttctgggatttcatctcgctgacccccgaatcgatgcacatgatcatgtgggcgatgagcgaccgcaccatcccgcgctcgctgcgcatgatcgaagggttcggcatccacagcttccgtttcctcaatgacaaaggcgaaagcaccttcgtcaaattccattggcgtcccaagctgggcctgcaatcgaccatctgggacgaggcggtcaagattgccggcgccgatcaggacttcccaccccgtgatctgttcgaggcgatccagaacggcgacttcccggaatgggaacttggcgtgcaattgttcaccgaggccgaggcggatgcattcccgttcgaccatctggattcgaccaagatcattcccgaagagttggtgccgctgcaaatcgtcggccgcatggtgctcgaccgctggccggacaacttctttgccgaaaccgaacaggttgcctactgcccggccaacatcgtgcccggcatcgacttcagcaacgacccgctgctgcaaggccgcctgttctcctatctggatacgcagctgagccgcctgggcgggccgaatttccatcagattccgatcaacgcccccaagtgtccattcgccaacaatcagcgcgatggtcatatgcagatggacgtaccgaaggcccgtgttgcctacgagcccagcttactgcaggcagatgcgccgcgtgaagcgctgcgtggattccccagccattcaaccccggctgaggatggcgccaagggccgcgtgcgtgcagaacgcttcgccgatcattacagccaggcaagactgttcttccgcagccagaccgcaccggaacaggcacatatggcgtcggccctggtgttcgaactgtcgaaggtcgaaaccgcacacgtgcgcgaagccatcgtggggcatctgcgccacatcgaccagaagctcgcgcagcgtgtggccgatggcatgggtatgaccaccttaccgccggcaccaccggctgcagtagcgccgatcgacatgccactgtcgcccgccttgcaggtcatcggcaagatgaaagacacattgaagggacgcacggtcggtatcctgattcacgacggctccgatgcatcgacgatcaaagcggtgcgcaaggcagcggaagctgagggcgcaacagtcaagatcgtcgcccccaagcttggcggcgccaagctcagcgatggcaagcaactggccgccgatgggcagctggcagggacgccctcggtggtgttcgatgccgtggcagtcctactgtcttcggaagcggccaagctgctgacacgcgaatcggccgcactggatttcgtgagctgtgcctgggcgcatctgaaggccatcgcattcgacgaaggcgcgcagttgttgttgaaagcgggcaatatcggcaaggatgcgggcgtggttccggccgccgataccaaggcattcatttccgcagcaaaaacccgacagtgggcacgcgagccgaaggtgcgcatgctggcctaa

SEQ ID NO: 42952 - protein, 701 aa, Xanthomonas oryzae
MAKSSGKPASAVSVDRSASAPDARGTGDELHQKARGRHPQLTTNQGIPVGDNQNSLRATPRGPTLLEDFILREKITHFDHERIPERIVHARGSASHGYFKLTKSLSQYTTAKIFTEVGEKTPLFTRFSTVAGGAGSVDTPRDVRGFAVKFYTKEGNWDLVGNNIPVFFIQDAIKFPDLIHAVKMEPDRGFPQAASAHDTFWDFISLTPESMHMIMWAMSDRTIPRSLRMIEGFGIHSFRFLNDKGESTFVKFHWRPKLGLQSTIWDEAVKIAGADQDFPPRDLFEAIQNGDFPEWELGVQLFTEAEADAFPFDHLDSTKIIPEELVPLQIVGRMVLDRWPDNFFAETEQVAYCPANIVPGIDFSNDPLLQGRLFSYLDTQLSRLGGPNFHQIPINAPKCPFANNQRDGHMQMDVPKARVAYEPSLLQADAPREALRGFPSHSTPAEDGAKGRVRAERFADHYSQARLFFRSQTAPEQAHMASALVFELSKVETAHVREAIVGHLRHIDQKLAQRVADGMGMTTLPPAPPAAVAPIDMPLSPALQVIGKMKDTLKGRTVGILIHDGSDASTIKAVRKAAEAEGATVKIVAPKLGGAKLSDGKQLAADGQLAGTPSVVFDAVAVLLSSEAAKLLTRESAALDFVSCAWAHLKAIAFDEGAQLLLKAGNIGKDAGVVPAADTKAFISAAKTRQWAREPKVRMLA

SEQ ID NO: 42953 - DNA, 1518 bp, Penaeus vannamei
  CDS (1)..(1518)
atgccgcgtgacaagtgtgcagagcaattgaatgacttcaagaaacaacagacggctcccgataacctgaccacgagccatgggtgcccacttgcggacaagcttaattccctgactgtaggtccaaggggccccatcctcctgcaggacattcaactccttgatgagatggctcacttcgaccgtgagcgcatcccagagagggttgtgcatgctaagggagcaggtgcctttggttattttgaggtaacacatgatatatccaagtattgtaaggctgctttgttcagtgagattgggaaacgaactcctattgctgttcgttactccactgtaggaggtgagagtggatcaactgacactgccagggatcctcgaggctttgccgtgaagttttacacagaagaaggaaattgggatcttgtggggaacaacactcccattttcttcatcagggatcctattctgttcccatccttcattcacacgcagaagaggaatcctgcaactcatctaaaggattgtgacatgttttgggacttcattagtttgcgaccagaaacaacacaccaagtgtcattcctcttctctgacagaggaacccctgatggctatcgtcacatgaatggctatggttctcgtacttccaagcttgtcaatgaaaagggagaggccgtctactgcaagttccattacaagacggaccaaggcatcaagtgtcttagcagcaagaaggctgatgaactggcaggttctgacccagattatgcaacaagggacctatacaatgcgatttcaagtggcgattacccctcatacactatgtgtattcaggtgatgacattcgaagaagcagagaagtggaagtttaatccattcgaccttaccaaagtatggcctcatggggaattcccactcatcccagtaggccgtcttacttttgaccgcaatccaaagaattactttgctgaggtggagcagattgcgttctcttctgccaacatggtgccgggtattgaggcttcccctgacaaaatgttgcaaggtcgcctcttttcttacaacgacactcaccgtcaccgtctgggtgccaactacacccagatccccgtgaactgcccgtaccgtgcccgtacaaggaactaccagagagatggccccatgtgtgttgatggcaatcaggaaagtgctcctaactacttccccaacagctttagtggcccacaggactgcaggaaacacactgctcctaaattttctgtttctgctgatgttgatcgctacaacagtgctgatgaggacaactttacccaagttggcattttctatcgtcaggtgctgaatgaggcagaacgtcagcgtttggtggagaacattgctggtcacatggttggagcccaagagttcatccaggatcgagcaatcaaaaactttacccaggctgatccagaatatggtgctaacatccggcgtgcgattgacaagataaagatgagccaggcttcatctaaaacttaa

SEQ ID NO: 42954 - protein, 505 aa, Penaeus vannamei
MPRDKCAEQLNDFKKQQTAPDNLTTSHGCPLADKLNSLTVGPRGPILLQDIQLLDEMAHFDRERIPERVVHAKGAGAFGYFEVTHDISKYCKAALFSEIGKRTPIAVRYSTVGGESGSTDTARDPRGFAVKFYTEEGNWDLVGNNTPIFFIRDPILFPSFIHTQKRNPATHLKDCDMFWDFISLRPETTHQVSFLFSDRGTPDGYRHMNGYGSRTSKLVNEKGEAVYCKFHYKTDQGIKCLSSKKADELAGSDPDYATRDLYNAISSGDYPSYTMCIQVMTFEEAEKWKFNPFDLTKVWPHGEFPLIPVGRLTFDRNPKNYFAEVEQIAFSSANMVPGIEASPDKMLQGRLFSYNDTHRHRLGANYTQIPVNCPYRARTRNYQRDGPMCVDGNQESAPNYFPNSFSGPQDCRKHTAPKFSVSADVDRYNSADEDNFTQVGIFYRQVLNEAERQRLVENIAGHMVGAQEFIQDRAIKNFTQADPEYGANIRRAIDKIKMSQASSKT

SEQ ID NO: 42955 - DNA, 1479 bp, Solanum tuberosum
  CDS (1)..(1479)
atggatccgtctaagtatcgcccatcaagcgcatacgacacccctttcttgacaacaaatgctggtggtcctgtgtacaacaatgtttcttccttgactgttggacctagagggcctgttctgcttgaggattattatctaattgagaaacttgcgacttttgatcgcgaaaagacacctgagcgtgttgttcatgctagaggtgctagtgctaagggattctttgaagttactcatgacatttctcatcttacctgtgctgattttctccgagctcctggtgctcaaacgcctgttatttgtcgattctctactgttgtccatgaacgtggaagccccgagtcaatcagggacattcgcggttttgctgtcaagttttacaccagagagggtaactttgatcttgttggaaacaatgtccctgtgttctttaatcgtgatgctaagtcgttccctgacacgattcgtgcattgaaaccaaatccaaagtcacacattcaggagaactggaggatccttgatttcttctcgttccttcctgagagtttgcatacattcgccttcttctacgatgatgtttgtctcccaactgattacagacacatggaaggttttggcgttcacgcgtatcaattgattaacaaagaggggaaagcacattatgtgaagttccactggaagccaacttgtggtgtgaaaagtatgtctgaggaagaagctattagagtcggaggtactaatcatagtcacgcgaccaaggatctttacgattcaattgctgctggaaactatcctgagtggaaacttttcatccaaacaatggaccctgaggatgtagacaagttcgattttgatcctctagatgtaaccaagacatggcctgaggatctcttgccgttgatcccagttggtcgattggtattgaacaggaacattgataacttctttgctgagaatgagcagctcgcgtttaaccctggacatatcgtccctggtatttactattccgaggataagcttctccagactaggatattcgcgtatgctgatactcagaggcaccgtattggaccaaactatatgcagctcccagttaatgctcccaagtgtggtcatcacaacaatcatcgcgatggtgccatgaacatgacacatcgcgatgaagaggtggattatttgccctcgaggtttgatccttgtcgccctgctgagcagtacccaattcctgcttgtgtcttgaatggaaggcgtacaaattgtgtcattccgaaagagaacaacttcaaacaggcaggggagaggtacagatcctgggaatctgacaggcaagacagatacatcaccaaatgggttgagtctctatccgatccacgagtcactcatgagattcgcagcatatggatatcatacttgtctcaggctgacaagtcctgtggtcagaaggttgcttctcgtctcactgtgaagcctacaatgtga

SEQ ID NO: 42956 - protein, 492 aa, Solanum tuberosum
MDPSKYRPSSAYDTPFLTTNAGGPVYNNVSSLTVGPRGPVLLEDYYLIEKLATFDREKTPERVVHARGASAKGFFEVTHDISHLTCADFLRAPGAQTPVICRFSTVVHERGSPESIRDIRGFAVKFYTREGNFDLVGNNVPVFFNRDAKSFPDTIRALKPNPKSHIQENWRILDFFSFLPESLHTFAFFYDDVCLPTDYRHMEGFGVHAYQLINKEGKAHYVKFHWKPTCGVKSMSEEEAIRVGGTNHSHATKDLYDSIAAGNYPEWKLFIQTMDPEDVDKFDFDPLDVTKTWPEDLLPLIPVGRLVLNRNIDNFFAENEQLAFNPGHIVPGIYYSEDKLLQTRIFAYADTQRHRIGPNYMQLPVNAPKCGHHNNHRDGAMNMTHRDEEVDYLPSRFDPCRPAEQYPIPACVLNGRRTNCVIPKENNFKQAGERYRSWESDRQDRYITKWVESLSDPRVTHEIRSIWISYLSQADKSCGQKVASRLTVKPTM

SEQ ID NO: 42957 - DNA, 2280 bp, Paracoccidioides brasiliensis
  CDS (1)..(2280)
atggctagcaaggctacagaaggattacggaagatccaggggatggtggaaagcatgcatcccgggaacaaaaaggtcgcagacctcgcccgtgataccgtcgatgtccacgcgcctgctcctttcaccaccgaccacgggaccaaagtcagcaatacagacaattggttgagggctgcatccgaaaatcaaactggcccgtcgttgttggaggatcagattgctcgcgaaaagatccatcggtttgatcatgaaagaatcccagagcgcgttgtgcatgctcgaggaacaggtgccttcgggcacttcaaacttgttgagagcgcagaagacgcaacttctgccggcgtgttaactgatacttcacggacaactcctgtttttgtccgcttttctaccgtccaaggtagcaaaggcagtttcgatacagtccgtgatgtgcgtggtttcgccaccaagttttatacgcaagaaggcaattgggatcttgttggcaataatattcctgtcttttttatccaggatgccataaaatttgacataagtaagcaatcgatacctttttcttttttgagtcggtgttatttatcatcagttcacgctgtcaagccggaacgacaacgaagtcctcaaggcaactgccacaacaacttctgggacttcgtttcttgcatcctgaaagcgacccatatgtttatgtgggccatgtcggacagagcgatcccgcgaatcttacccgtatgcaggggatttggcgtcaacacatttgttcttgtgaatcgtcaaggaaaacgacatttcgtaaaattccattggatgccagaacttggagtccattcactcgtacccgatgagtctttcaaactcggaggtcaagatccggattaccatcgcaaagatctcatggaggccattgacaacaaagtctacccgaaatggaaatttgggatccaggtgattcctgaggagaaggaacatgaatttgagtttgacatccttgatgccactaagatatggcctgaagacttggtccccgttcgatatattggagagatggagctcaacaggaatgtggacgagttctttccacagaccgaacaagttgccttctgcacctcccatatcgtccctggaattgaattctccgatgatcctctactgcagggccgtaacttctcatatttcgatacccaaatctccagacttggtgtgaactgggaggaactgcctatcaatcgtcctgtgtgtcctgtcatgaaccacaacagagatggcgccatgcgccacaaaataactcagggaaccgtaaactattggccaaaccgctttgaagcctgcccacccacgaaccccgaggacggcggcttcgtcacataccctcagaagataaccagaacattaagttacatggttagcaataagttcgcgaacacatcaccagcacaattattttacaactccctttcttacgaacagctccatattcagaacgccttctgttttgagttagaccactgctatgacccggtcgttacaacagactcgtcgagcgacttactgaaatctccttaccgctcgcacgagctgtcgcaatcaaagtcggcgctccaacaccaaacaggcttagacgtcccaaccaaaggtcaaaaaaccattaacctcagccaagaatacataaacgagcgccagcctttctgtacccacaatccaaggggcgaaaataccatcctgattggtgatggtacgacccaatcgccctcgcctctgtcaaaccgcggcaatagccatgaatgctctgcccatcataatggtacaaaacgccaacccatctttgctgaccacgaagatagggagaccggtgcaggcgtaattcctgatcacaactatatcggccagcggtctactctcttgacgccacgttcatacccggtggctcgcatatcaaggagctgtgccagcctaggcgcttttagacattggattgcagaacagttcggacattgcaaggccataggtgctacaggggaagctgtggatcttatcgcccaggttctgaacagcctgcctggtctaaacgttgcgttggcctcatctagcgatgttgtcgaatggtacggcgttgtcacatcaagcaagctgcacgaaccccacactttgacagaagggttcaagttattccctgaggcgaaggatttcctgggcaagttcctgtaccaagtttcacaacatcggaattatcagagagatatggtaggattgactgatcaggtcgcattttaa

SEQ ID NO: 42958 - protein, 759 aa, Paracoccidioides brasiliensis
MASKATEGLRKIQGMVESMHPGNKKVADLARDTVDVHAPAPFTTDHGTKVSNTDNWLRAASENQTGPSLLEDQIAREKIHRFDHERIPERVVHARGTGAFGHFKLVESAEDATSAGVLTDTSRTTPVFVRFSTVQGSKGSFDTVRDVRGFATKFYTQEGNWDLVGNNIPVFFIQDAIKFDISKQSIPFSFLSRCYLSSVHAVKPERQRSPQGNCHNNFWDFVSCILKATHMFMWAMSDRAIPRILPVCRGFGVNTFVLVNRQGKRHFVKFHWMPELGVHSLVPDESFKLGGQDPDYHRKDLMEAIDNKVYPKWKFGIQVIPEEKEHEFEFDILDATKIWPEDLVPVRYIGEMELNRNVDEFFPQTEQVAFCTSHIVPGIEFSDDPLLQGRNFSYFDTQISRLGVNWEELPINRPVCPVMNHNRDGAMRHKITQGTVNYWPNRFEACPPTNPEDGGFVTYPQKITRTLSYMVSNKFANTSPAQLFYNSLSYEQLHIQNAFCFELDHCYDPVVTTDSSSDLLKSPYRSHELSQSKSALQHQTGLDVPTKGQKTINLSQEYINERQPFCTHNPRGENTILIGDGTTQSPSPLSNRGNSHECSAHHNGTKRQPIFADHEDRETGAGVIPDHNYIGQRSTLLTPRSYPVARISRSCASLGAFRHWIAEQFGHCKAIGATGEAVDLIAQVLNSLPGLNVALASSSDVVEWYGVVTSSKLHEPHTLTEGFKLFPEAKDFLGKFLYQVSQHRNYQRDMVGLTDQVAF

SEQ ID NO: 42959 - DNA, 1455 bp, Lactobacillus plantarum
  CDS (1)..(1455): transl_table=11
atgacggaaaaattaacgacggaaaccggccaaccatgggctaacaatgaacattcccaaacggcaggagctcgtggtcccgtattaatgcaagactataatcttttggaaaaactagcccattttgatcgtgaacgaattccagaacgggtcgttcatgctaagggggccggagcaaaaggtttttttgaacttgaaaacgacatgggggaatatactaaggcagacttatttaatggtgtcggtaagaaaactcccgtaatcttaaggttctcacaagttgccggtgaaaaaggttatcctgacaccgttcgagacgtgcgcggttttgccttaaaattttatactcagcaaggcaattatgatctcgttggaaacaacacaccggtcttttttgtaaacgaccctttaaaatttcctgacttcatccattcacaaaaacgggatcctaaaacgaaccgtcgtacacaaaatatgcaatgggatttttgggctcattctccagaatcattgcaccaggtcacttatttaatgggcgaccgaggacttcctgcgtcctatcgaaccatgaatggttacggttcccatacttttaaatgggttaatcagaatggcgaacagttttgggttaagtatcacttcatctcagaccaaggcgttaaaaatatgactgctcaagcagctgaaaaagcaatgagccaagatttagattatttacaagatgacttatatgatgcaattcaagaaaaaaattacccatcatggacgatgtatgtccaaatcttgccatatgaggaaggtctaaactataaatgggacatttttgatgtcactaaagtcatctcccacaaagactatccactaattaaagtcggcaaactaactttaaatgagaatcccactaataactttaccgatattgaagaggcggccatgtcgccagcaaattttgttcctggtatcgaaccatctcccgacaaattactacaaggtcgcctattctcctataaagatgcacagcgatatcggttaggtgccaactttgaagatttacccgtgaacaagccggttgttccagttcataattatgaacgtgatggttacatgaaaattaataatcaaggtgctgaggtcaactacgagcctaatgcactgcatgggccagaagaggtgccggatgccgcactttcacctgattctgttcgtggtgaaacacgcgcacagccttatcgctatcaagttgattacacaactcaagcaggcgacctatatcgcttaatgtcagaacccgagcaagaacgcttaattaatactatcaaagatgcgttaggccaagttactttgcctggtgtcaaagaactcgaaatcaagcaattttatgaggccgacaaaaactacggtacacgcgtggctaatgctctgggaatgaatattgctgatattatcagtgattaa

SEQ ID NO: 42960 - protein, 484 aa, Lactobacillus plantarum
MTEKLTTETGQPWANNEHSQTAGARGPVLMQDYNLLEKLAHFDRERIPERVVHAKGAGAKGFFELENDMGEYTKADLFNGVGKKTPVILRFSQVAGEKGYPDTVRDVRGFALKFYTQQGNYDLVGNNTPVFFVNDPLKFPDFIHSQKRDPKTNRRTQNMQWDFWAHSPESLHQVTYLMGDRGLPASYRTMNGYGSHTFKWVNQNGEQFWVKYHFISDQGVKNMTAQAAEKAMSQDLDYLQDDLYDAIQEKNYPSWTMYVQILPYEEGLNYKWDIFDVTKVISHKDYPLIKVGKLTLNENPTNNFTDIEEAAMSPANFVPGIEPSPDKLLQGRLFSYKDAQRYRLGANFEDLPVNKPVVPVHNYERDGYMKINNQGAEVNYEPNALHGPEEVPDAALSPDSVRGETRAQPYRYQVDYTTQAGDLYRLMSEPEQERLINTIKDALGQVTLPGVKELEIKQFYEADKNYGTRVANALGMNIADIISD

SEQ ID NO: 42961 - DNA, 2193 bp, Cochliobolus heterostrophus
  CDS (1)..(2193)
atggtacggtctaacgttttgacagcaattgctgctatttgccatgtcgctcacgctgtttgcccctacatggatgaccaaccactcgcccgccgcgagggtgccactgccatgtcaactgatgatttcatgaagcagtatgagattgacgacagcaaggcctacctcacgagtcctgtgggagggccccaacccgaccaagagagcctctcggctggtgagcgaggtccatcactgctcgaggatcaaattctccgccggaaaatcatgagctttgatcacgagcgtgttcctgagcgcgccgtgcacgcccgtggtgccggtgctcatggaacgttcaagtcatatggtgactggtctaatattaccggagcctccttccttgccaactctgagaaggaaaccccagttttcattcgattctctactgttgcaggaagccgtggctccgccgatactgcccgagatgttcatggctttgctgtcaggttctacaccgacgaaggcaactttgatattgtcggtaacaacattcctgttttctttatccaggatgccatcaagttccctgatctcatccacgctgtcaagcccaagccggaccgtgagattcctcaggcagcaacggctcacgattcggcatgggacttcttcagtcagcagcctagcaccatgcacaccctcctgtgggctatgagtggacatggtaccattcgttcctacaggcataccgatggctggggtgtacacactttccgctttgtccgtgacgacggcaagtccaagctcgtcaagttccgcttccgatctctccagggtaaggcctccctgttgtgggaagaggctcaaaccactgccggaatgaacgcggatatgcaccgacaggatctcttcgagagcatcgagaacggctactacccagaatggatctttgaggcccaaatcatggaggagtcggaccaacttcgattcggattcgacgttctcgaccccaccaagattgttcccgaagacattgttcctttcacccctcttggaaagttgaccttgaaccgcaaccctcgcaactactttgccgagactgagcaaattatgttccaacctggtcatctcgtccgcggtattgatgtttccgacgacccgctccttcaaggacgcatgttctcgtacttggacactcagttgaaccgcaacggtggtcccaactttgaacagatccctatcaaccagccccgtgttcccgtccacaacaacgagcgtgatggtgccggccaaatgtatattcctctcaacactgccgcctactcgcccaacaccttgaacggtggttaccccaagcaagccacccaggccgaaggtcgcgggttcttcacagcaccctctcgatccgtcagcggaaaccttgtccgcaccgtctccagcacctttgccgacaactggtcgcagcctcgtctgttctacaattccttgtccgcagtcgagcagcagtttgtcatcaatgccatccgatttgagacttcgcaactccagagcgaggttgtcaagcagaacgtcttgatccagcttaaccgtatcagccacgacattgctacccgtgttgctactgctcttggcatgactgcacccgcacctgatgacaagttctaccacaataacaagacgattggtgttaacccggctggcgagcccctgctcaagatcgagggcttgaaggttggataccttacctctgcgggatccactggcgacaagggcaaggcgctcaaggccgcgctcaaggacgagaaggttagcttgacggtagtcgctgagcaccttggcgctggcattgaccagacctactctgctacttcggccgttaactttgacgccatcatcgttgatggtagcgcttcagccctcttcgcccccgcgggcagcctcgccaactccaactccacggctgccaagggccgttccactttgtaccctgctggtcgccctctcgagatcctccagaccggttaccagtttggcaagcccgttggtgttctcggagccagcaactcgactctatctgctgctggtgttgtggccggcacccctggtgtttacagcttcgactccgccagcgacatggcggcagttgttaccaagatcactgagggtctgcgcactttcaagttccttgacaggtacccattggacaactag

SEQ ID NO: 42962 - protein, 730 aa, Cochliobolus heterostrophus
MVRSNVLTAIAAICHVAHAVCPYMDDQPLARREGATAMSTDDFMKQYEIDDSKAYLTSPVGGPQPDQESLSAGERGPSLLEDQILRRKIMSFDHERVPERAVHARGAGAHGTFKSYGDWSNITGASFLANSEKETPVFIRFSTVAGSRGSADTARDVHGFAVRFYTDEGNFDIVGNNIPVFFIQDAIKFPDLIHAVKPKPDREIPQAATAHDSAWDFFSQQPSTMHTLLWAMSGHGTIRSYRHTDGWGVHTFRFVRDDGKSKLVKFRFRSLQGKASLLWEEAQTTAGMNADMHRQDLFESIENGYYPEWIFEAQIMEESDQLRFGFDVLDPTKIVPEDIVPFTPLGKLTLNRNPRNYFAETEQIMFQPGHLVRGIDVSDDPLLQGRMFSYLDTQLNRNGGPNFEQIPINQPRVPVHNNERDGAGQMYIPLNTAAYSPNTLNGGYPKQATQAEGRGFFTAPSRSVSGNLVRTVSSTFADNWSQPRLFYNSLSAVEQQFVINAIRFETSQLQSEVVKQNVLIQLNRISHDIATRVATALGMTAPAPDDKFYHNNKTIGVNPAGEPLLKIEGLKVGYLTSAGSTGDKGKALKAALKDEKVSLTVVAEHLGAGIDQTYSATSAVNFDAIIVDGSASALFAPAGSLANSNSTAAKGRSTLYPAGRPLEILQTGYQFGKPVGVLGASNSTLSAAGVVAGTPGVYSFDSASDMAAVVTKITEGLRTFKFLDRYPLDN

SEQ ID NO: 42963 - DNA, 1644 bp, Cochliobolus heterostrophus
  CDS (1)..(1644)
atgcagagctcaaatgagggcccagcagacatcatcgccaaggttgctggggttactcagggtggaaagcgtgaagatgacggcccatatttcaccaacaatgaaggcattccatggcccgacgcagaacatagcaagaccatcggcggaatcccagtcgctagcgatgttttcctcttccagaagcagcagacatttaaccgctcaaaaaatctcgagcgcatggtgcacccctgtggttcaggtgcttttggttatttcgagaccaccaaagatgtcacccacctcaccaaggccgactttttgaagactgtaggtgagaagacgcccatattcatacgattcagtaccgttactcctggacgcgagtatcccgacgaagctcgtaaccctcgtggatttgccatcaagttctatactggagaaggcaactacgacatcgttgggttgaacttcccagttttcttctgccgtgatcctatccagggcccagatgtcatccgatcgcaatggcgtaaccccaagaacttccttttcgattacgatgctattttcgacttgcttgccaacacccccgagggtaaccacgctggcctaatgttcttcagtgaccatggcacgccccagggttggcgtttcaaccacgggtatggatgccacacgttcaagtgggtgaacaaggacggtcaattcgtgtacatcaagtaccactttgttgctgagcacggtcaaaagcaattcacccaggaacaagcgacacaaatgtgtggcgaggaccctgactattccaagcgtgatctatatgagactattgagaatggcgaggaggtagtctggaaagcacacgtacaggtcatgagcccagaggaagccgatcccgataagcttggcttcgatccttttgacgtcaccaaggtctggccgcgtaagcaatttcctatgcaagagtttggacgcctggttttgaacaagaaccctgaaaatttccatcgtgacgtcgagcaggcggccttctccccgggtagcatggtgcccggtgttgaagactcgcctgatccacttcttcagttccgcatgttcttctaccgcgatgcgcagtaccaccgtattggtgtgaacttgcaccagattcccgtcaactgcccattcatggccaagtctttcgcatccctcaattttgatggccagatgcgtgtcgatgccaatcatgctgggaacaagccgtatgccccaaacagcttcgcgcacaagttccggcccgatgtcgctgaagcaccataccaggtcaatgacaacatcatgagccgaaagagtcattattggcatgagggcaagaagaacgagtacgaccaggctaaggagctttggtcacgcgtaatgagcgtacaggagaagcaaaacaccatcaagaacaccgcaaacatgcttaagtttgtccgataccccgagattcagcaatataatatcggtaccgacctgtcgagaggcatttacgacctcctcccgaagccagcgttcgatttcagcgaagtcgaggagctttctcacacagcccatgagtggtataaggagaagaagtttaggtctatcgatggcgagaggcttacaggtttccctccatcgatgcctgtttataattactga

SEQ ID NO: 42964 - protein, 547 aa, Cochliobolus heterostrophus
MQSSNEGPADIIAKVAGVTQGGKREDDGPYFTNNEGIPWPDAEHSKTIGGIPVASDVFLFQKQQTFNRSKNLERMVHPCGSGAFGYFETTKDVTHLTKADFLKTVGEKTPIFIRFSTVTPGREYPDEARNPRGFAIKFYTGEGNYDIVGLNFPVFFCRDPIQGPDVIRSQWRNPKNFLFDYDAIFDLLANTPEGNHAGLMFFSDHGTPQGWRFNHGYGCHTFKWVNKDGQFVYIKYHFVAEHGQKQFTQEQATQMCGEDPDYSKRDLYETIENGEEVVWKAHVQVMSPEEADPDKLGFDPFDVTKVWPRKQFPMQEFGRLVLNKNPENFHRDVEQAAFSPGSMVPGVEDSPDPLLQFRMFFYRDAQYHRIGVNLHQIPVNCPFMAKSFASLNFDGQMRVDANHAGNKPYAPNSFAHKFRPDVAEAPYQVNDNIMSRKSHYWHEGKKNEYDQAKELWSRVMSVQEKQNTIKNTANMLKFVRYPEIQQYNIGTDLSRGIYDLLPKPAFDFSEVEELSHTAHEWYKEKKFRSIDGERLTGFPPSMPVYNY

SEQ ID NO: 42965 - DNA, 2073 bp, Antonospora locustae
  CDS (1)..(2073)
atggaagacagcaagagcagtgaaaacaaaaacctggcagatactaagaaaacaccagaaacacaccagcaggcaggtggaaataccccagtgatgaccaccgcacaggggataccaatcgcagacggacagaactctctacatccgtcaccatgcggccctactctcctcgaggatttcatataccgcgagaagatatttcactttgaccatgaacgcgttcccgagcgtgtagtccatgcccgtggctttggagcacatgggtacctggaaattcttgagccaattccccagtacacgaaggcagacatttttcagcgtacaggaagaacaccagcttttgtacgcttctccacagcgctgggcagcaagggctctcctgacctagccagagacgtgaggggctttgcagttaagatatacacaagaaagggaaactgggacattgtgggaaacaacatacccgttttctttgtccaggaggcaatcaagtttcccgacataatccatgcaggcaaggaagagcccgatagcggctttccacaggcacaaacagcacatgacagcttctgggacttcattagcctcaaccccgagtctctgcacatcacaatgtgggcaatgtcggacagagggattccgcgttccttccgattcatggagggctttggtgtccacacatttcgccttgtcaacgcaaaaaacgagtacacgtttgtaaagttccactggaagcccagactagggctgcagtccgtgacatggagcgaggcacagcggctcaacggcgcagacccggactttcatcggcgtgatttgtggaatgcaatcaaaacgggaaactatcccgagtgggacctaggtctccagatatttagcgaggagactgcaaagacatttgactttgatgtcttagatgcgacaaagctcattccagaagaacttgtgcctgtgagaagagtcgggcgccttgtcttggaccgctgtgtcgacaacttctttgcagagacagaacaggttgcattttgcacagcgaacatcgtgcccggcatcgacttcaccgacgaccctctgttgcagggaagaaacttctcgtatctggacacacaactgagccgcctgggcagtccaaacttcacccagctgccaataaacgcacccaagtgtcctgtgcgtcactttcaacaggacgggcgcatggccttttacaacatcattgggcctgcaaactacgagcccaactctttgggagacaagggcggtccgcgagagtcgcccgaagaggggtttgtgtcgtacccagcaaaggccacggggccaaagatgcgcgtgcgcccaagcagcttttcagaccactacagccaggccacgctgttctacaacagtcagacagatattgaacagaggcacatacagagcgcgttcacatttgagctgagcaaggtcaccagcccggccatacagatgcgtgtcatttcgcatctgctaaacatcaacgaggaccttgcaaaaaacattgctcacaacctaggcgtgagggagctgccaaagccagcgcccatgttggtgcccaaaaaggagggaataaaggaatcccctgcactgagcataataaaaaacggccctgtgacatttaagggaagaaggcttgggctgcttgtctccgaaaatagcgatttctcgctgattgatggtatagacacgcggatgaaaatggaggaggcagagcttgtagtgattgccccaaagatccagggcctccgcactgaaagcagtgggtggagaaagccttcacagtgtcttcagagcacacttgctgcctggtacgacgcagttgcattgcttttatcaacagcggacttgaagaaaatggacgggcctgcactggtcagctttgtccaagatagctactacaactacaagttcattgccttttcaggtgacgtggctcctctaatggaaagacttggtattcagaaggacgatggcatggttgaaataagggacaactgcgactgggatacgtttattacaaagtgcaggaagcttcgctactggcaaagaaaaatttga

SEQ ID NO: 42966 - protein, 690 aa, Antonospora locustae
MEDSKSSENKNLADTKKTPETHQQAGGNTPVMTTAQGIPIADGQNSLHPSPCGPTLLEDFIYREKIFHFDHERVPERVVHARGFGAHGYLEILEPIPQYTKADIFQRTGRTPAFVRFSTALGSKGSPDLARDVRGFAVKIYTRKGNWDIVGNNIPVFFVQEAIKFPDIIHAGKEEPDSGFPQAQTAHDSFWDFISLNPESLHITMWAMSDRGIPRSFRFMEGFGVHTFRLVNAKNEYTFVKFHWKPRLGLQSVTWSEAQRLNGADPDFHRRDLWNAIKTGNYPEWDLGLQIFSEETAKTFDFDVLDATKLIPEELVPVRRVGRLVLDRCVDNFFAETEQVAFCTANIVPGIDFTDDPLLQGRNFSYLDTQLSRLGSPNFTQLPINAPKCPVRHFQQDGRMAFYNIIGPANYEPNSLGDKGGPRESPEEGFVSYPAKATGPKMRVRPSSFSDHYSQATLFYNSQTDIEQRHIQSAFTFELSKVTSPAIQMRVISHLLNINEDLAKNIAHNLGVRELPKPAPMLVPKKEGIKESPALSIIKNGPVTFKGRRLGLLVSENSDFSLIDGIDTRMKMEEAELVVIAPKIQGLRTESSGWRKPSQCLQSTLAAWYDAVALLLSTADLKKMDGPALVSFVQDSYYNYKFIAFSGDVAPLMERLGIQKDDGMVEIRDNCDWDTFITKCRKLRYWQRKI

SEQ ID NO: 42967 - DNA, 1548 bp, Edwardsiella tarda
  CDS (1)..(1548): transl_table=11
atgcatatagtcaatggaatcaatggattaatcgcaaaaaagaatgtgttgtttttcttaacctccttagccatcagcccttccgtattggctgacaccttaacccgggataatggagcccccgtcggggataatcaaaactcacaaactgccggccctattggtccagtaatgctacaggatgtacagctattacaaaaactacagcgctttgatcgtgagcgtgttccagaacgcgtagtgcatgctcgcggtacaggcgctcacggtgtatttacgccaacggcggatatttcagatttaaccgttgcaaaagtatttacccccggtagtacaacgcctgtttttgtccgtttctcaagcgtggtgcatggaacccactcgccggaaaccctgcgcgatccgcgtggctttgcgacaaaattttatactgccgagggtaactgggacttggtaggcaataacttccccaccttctttattcgtgatgcaatcaagttcccggatatggtgcatgcgtttaagcccgatccccggacaaatcttgataatgatgcgcgacgctttgattttttctcacacctgcctgagtcaacgcggaccttgaccttgctctactctaacgagggtacgccgctatcctatcgcaatatggacggtaacagcgtacatgcctataagctgattaatgacaaaggcgaagtccactatgtgaagtttcactggaaaacgcgccaagggatcaagaatctggatccacagcaggttgaacagattcaaggtaaagattatagccatatgacgcaggatctggtgacggcaatcaaccgtggcgactatccaaaatgggatctgtacatccaggttctcaagcccgccgacctaaaaaacttcgatttcgatccgcttgatgccacgaaggtctggccagatgtgcctgagcgaaaaattggcgaaatggttcttaacaaaaaccctgataacgttttccaagagaccgagcaggtggcgatggcgccctcaaacctcatcccgggcattgaaccatcggaagataagctactgcaagggcgcctgttcgcctatgccgatacacaattttaccgtatcggcgccaatggacttagcctaccgataaacaagcctcatagcgcggtcaataatggcaaccaggatgggcaactcaacagtgggcatacgctagacaaaggggttaactaccagccaagccgtatttacccgcgggaagagttggtctccagccgttatagccagacgcccctgtcaggcaccacgcagcaaagtaaaatccagcgcgagcaaaatttcaaacaggcgggagagctttatcgctcgtacagtaaaaaagagcaaaatgacctcatcaatagcctgggaacctccctggctagcgctgacactgtcagtaaaaacattatgttatcctatttttataaagcggataaggactacggcactcgccttaccagcgtcgctaacggtgatttgccaacggtaaaaaacttggcggataagctccaagattaa

SEQ ID NO: 42968 - protein, 515 aa, Edwardsiella tarda
MHIVNGINGLIAKKNVLFFLTSLAISPSVLADTLTRDNGAPVGDNQNSQTAGPIGPVMLQDVQLLQKLQRFDRERVPERVVHARGTGAHGVFTPTADISDLTVAKVFTPGSTTPVFVRFSSVVHGTHSPETLRDPRGFATKFYTAEGNWDLVGNNFPTFFIRDAIKFPDMVHAFKPDPRTNLDNDARRFDFFSHLPESTRTLTLLYSNEGTPLSYRNMDGNSVHAYKLINDKGEVHYVKFHWKTRQGIKNLDPQQVEQIQGKDYSHMTQDLVTAINRGDYPKWDLYIQVLKPADLKNFDFDPLDATKVWPDVPERKIGEMVLNKNPDNVFQETEQVAMAPSNLIPGIEPSEDKLLQGRLFAYADTQFYRIGANGLSLPINKPHSAVNNGNQDGQLNSGHTLDKGVNYQPSRIYPREELVSSRYSQTPLSGTTQQSKIQREQNFKQAGELYRSYSKKEQNDLINSLGTSLASADTVSKNIMLSYFYKADKDYGTRLTSVANGDLPTVKNLADKLQD

SEQ ID NO: 42969 - DNA, 1479 bp, Homogyne alpina
  CDS (1)..(1479)
atggatccttacaagcagcggccggcaagcgcttacaactccccgtttttgaccacaaatgccggtttacctgtttacaacaatactgcatcattgactgtcggaaatagaggtccaattctgcttgaggactatcatttgattgagaaacttgccaattttactcgtgaacgaattccagaacgtattgtccatgcaagaggtgcaagtgcaaagggattcttcgaggtcacacatgacatcactcatctcacttgtgctgatttccttcgcgccccaggagttcaaactcctaccatcgttcgtttctctactgttatccatgaacgtggaagccccgaaactatcagagatccccgaggttttgcaacaaaattttatacccgagagggtaactttgatattgttggaaacaatttcccggtcttttttactcgtgatgcaatggcattccctgatgtgattcacgcgtttaaaccaaacccgaagtcacacatccaagaagactggagaattctcgacttcttatcacaccatcccgagagtttaaacacaatgacattctggcttgatgacatcggtatcccaacagattaccgacacatggaaggctcaagtgtcaacgctctaactctagtaaacaaagaagggaaaatgcactatgtgaaattcacatggaaaccaacttgtggagtcaaatgtttaatggacgaagaagcaatcaaaatcggaggagctaatcacagtcatgccacccaagatctttacgactcgattcaagctggtaatttccctgaatggaagttgtttcttcaagttattgatcctgatcatgaagatcggcttgactttgacccgcttgatgggacaatgacatggcctgatgacatcattcctttgcagcctgttggaaggatggttttgaataagaatatcgacaacttctttgctgagaatgaacagctggcgcttaacccgggccttgttgttcctgggatttattattctgatgataagatgctccaaggtcgaatctttgcgtattctgatactcagaggcaccgtcttggaccaaattaccttcagcttcctgttaatgcgcctaaatgtgctcatcgtaataatcactatgatggaaatatgaatttcatgcacagagatgaggaggttgattacttcccttcgaggtatgatcgtgttcagcatgctcagaagtacccgatcagtcctgctaaggttaccggaactcgtgataggactgttatcccgaaagctaatgatttcaagcagccgggagagagatacagatcatgggaaccagacaggcaagaacgattcattatccgaatggttaagatgttgtctgacccacgggtcacccatgagctccgcagtatttggatctcatactggacccaggctgaccagtctctggggcagaagatagcatcacgcctcaatgtgcgccccaactattga

SEQ ID NO: 42970 - protein, 492 aa, Homogyne alpina
MDPYKQRPASAYNSPFLTTNAGLPVYNNTASLTVGNRGPILLEDYHLIEKLANFTRERIPERIVHARGASAKGFFEVTHDITHLTCADFLRAPGVQTPTIVRFSTVIHERGSPETIRDPRGFATKFYTREGNFDIVGNNFPVFFTRDAMAFPDVIHAFKPNPKSHIQEDWRILDFLSHHPESLNTMTFWLDDIGIPTDYRHMEGSSVNALTLVNKEGKMHYVKFTWKPTCGVKCLMDEEAIKIGGANHSHATQDLYDSIQAGNFPEWKLFLQVIDPDHEDRLDFDPLDGTMTWPDDIIPLQPVGRMVLNKNIDNFFAENEQLALNPGLVVPGIYYSDDKMLQGRIFAYSDTQRHRLGPNYLQLPVNAPKCAHRNNHYDGNMNFMHRDEEVDYFPSRYDRVQHAQKYPISPAKVTGTRDRTVIPKANDFKQPGERYRSWEPDRQERFIIRMVKMLSDPRVTHELRSIWISYWTQADQSLGQKIASRLNVRPNY

SEQ ID NO: 42971 - DNA, 1479 bp, Acacia ampliceps
  CDS (1)..(1479)
atggatccttacaagtaccgaccatcaagtaccttcaatactccgttctggactaccaactccggtactccagtttataacaacgattcagctctcaccatcggatctagaggtccaattctgctagaggattaccacttggtggagaagattgcaaatttcaccagggaacgaaccccagaacgtgttgtgcatgcaaggggagctagtgctaagggtttcttcgaagtcacacatgatatcactcacctcacttgtgctgattttcttcgaggccctggagttcaaacccccgtcattgttcgtttctccactgttatccatgaacgtggtagccctgaaaccattagagaccctcgtggtttcgctgtcaagttttacaccagagagggtaacttcgatctagttggaaacaactttcctgtcttcttcatccgtgatggaatgaagtttccagatgtgattcatgctttcaaaccaaaccccaagtctcatatccaagagtactggagggtgcttgacttctgttcctatcttccagaaagccttcacacattcatgttcttatttgatgatgtgggtgtcccacaagattacagacacatggaaggttctagtgttaacacatatactttgatcaacaaagctggcaaagtacactatgtcaaatttcactggaaacctaccttgggtgtcaagtgtctgttggaggaagaagccattcgggtcggaggagccaaccatagtcatgcaactcaagatctttatgattcaattgcagccggaaactatcctgagtggaaactctacatccaaaccattgatcctgattttgaagacagatttgactttgacccacttgatggaaccaagacctggccagaggacctcgtacctctccaaccagttggtcgcttggtcttgaataggaacatcgacaacttctttgctgagaatgagcaacttgcattttcaccttcccttgttgtgcctggtatatacttctctgatgataaggtgctccaagctcgtatctttgcctatggtgatactcagcggcatagaattggaccaaactatctgcaacttcctgtaaatgctcctaagtgtgctcatcacaacaatcactatgacggaaccatgaacttcatgcacagggatgaggaggtcgattacttcccatcaaggtatgacacggctcgccatgcagagaagttcccaattcctcctgttaatctcatcggaaggcgtgataggcgcataattgagaaggagaacaacttcaagcaacccggggatctataccgaacctgggcacctgacaggcaagaaagatttatccgaagatggattggagttttatcagacccaaaggtcacccatgaggtccgcagcatctggatatcttacttgtctcaggctgatcgctctctgggtcagaaggtagcatcccatctgaacatgaggccaagtatctaa

SEQ ID NO: 42972 - protein, 492 aa, Acacia ampliceps
MDPYKYRPSSTFNTPFWTTNSGTPVYNNDSALTIGSRGPILLEDYHLVEKIANFTRERTPERVVHARGASAKGFFEVTHDITHLTCADFLRGPGVQTPVIVRFSTVIHERGSPETIRDPRGFAVKFYTREGNFDLVGNNFPVFFIRDGMKFPDVIHAFKPNPKSHIQEYWRVLDFCSYLPESLHTFMFLFDDVGVPQDYRHMEGSSVNTYTLINKAGKVHYVKFHWKPTLGVKCLLEEEAIRVGGANHSHATQDLYDSIAAGNYPEWKLYIQTIDPDFEDRFDFDPLDGTKTWPEDLVPLQPVGRLVLNRNIDNFFAENEQLAFSPSLVVPGIYFSDDKVLQARIFAYGDTQRHRIGPNYLQLPVNAPKCAHHNNHYDGTMNFMHRDEEVDYFPSRYDTARHAEKFPIPPVNLIGRRDRRIIEKENNFKQPGDLYRTWAPDRQERFIRRWIGVLSDPKVTHEVRSIWISYLSQADRSLGQKVASHLNMRPSI

SEQ ID NO: 42973 - DNA, 1479 bp, Prunus persica
  CDS (1)..(1479)
atggatccttacaagcaccgcccttcaagtgcttttgattccccatactggaccacaaacgccggtgctccagtttggaacaacgactcttctttgactgttggacctagaggtccagttctccttgaggactatcatctggtggagaaacttgccacctttgatagagaacgaatcccagagcgtgttgtccatgctaggggagccagtgcaaagggattctttgaggtcactcatgatatttctcagcttacttgtgctgacttccttcgagcccctggtgttcagacacctgtcattgtgcgtttctccactgttatccatgagcgtggcagccctgaaaccctgagggatcctcgtggttttgcagtgaagttttacaccagagagggtaattttgacctggttggaaacaatttccccgtcttttttgtccgtgatgcaatgaaattcccggacgcgatccgtgctttcaaaccgaaccccaagtcgcacatccaagagacttggaggatccttgacttcttctcccaccttccagaaagcctgcacacgttcgccttcttttatgatgatctgggagttccacaagattacaggcacatggaaggctctagtgttcacgcctataccctcatcagtaaggcagggaaagtacactatgtgaaatttcattggaaacctacttgtggagtcaagtgtttgttggaggatgaagctattaaggttggaggagctaatcacagccatgctaccaaggacctctatgattccattgcagctggcaactaccctgagtggaaactttatattcagacaatggatcctgatcacgaggacagatttgactttgaccctcttgacttaactaagacctggcctgaagatatccttcccctgcagccagttggccgtttggttctgaataaaaacatcgataacttctttgcagagaatgaacaacttgcgtttaaccctgcccatgttgtccctggtatctactattcagatgataaggtgctccaaactcgaatcttcgcatattctgatactcagaggcaccgtcttggcccgaactatctgcagctcccagtgaatgctcccaagtgtcctcatcataacaatcatcatgagggattcatgaatttcatgcacagggatgaggaggttaattacttcccttcaaggcatgatcctgttcgtcatgctgagcgctaccccattccttctaatatcctttctggaaagcgtgagaagtgcgtcattgagaaggagaacaactttaagcaacctggagagagatacagatcttgggcgccagacaggcaagagcgattcatccgccgatgggtggatgccctatcagaccctcgtgtcacccatgagattcgcagcatttggatctcatactggtctcaggcagataagtctctgggtcaaaagcttttatcccgtctcaatgtgaggccaagcatttga

SEQ ID NO: 42974 - protein, 492 aa, Prunus persica
MDPYKHRPSSAFDSPYWTTNAGAPVWNNDSSLTVGPRGPVLLEDYHLVEKLATFDRERIPERVVHARGASAKGFFEVTHDISQLTCADFLRAPGVQTPVIVRFSTVIHERGSPETLRDPRGFAVKFYTREGNFDLVGNNFPVFFVRDAMKFPDAIRAFKPNPKSHIQETWRILDFFSHLPESLHTFAFFYDDLGVPQDYRHMEGSSVHAYTLISKAGKVHYVKFHWKPTCGVKCLLEDEAIKVGGANHSHATKDLYDSIAAGNYPEWKLYIQTMDPDHEDRFDFDPLDLTKTWPEDILPLQPVGRLVLNKNIDNFFAENEQLAFNPAHVVPGIYYSDDKVLQTRIFAYSDTQRHRLGPNYLQLPVNAPKCPHHNNHHEGFMNFMHRDEEVNYFPSRHDPVRHAERYPIPSNILSGKREKCVIEKENNFKQPGERYRSWAPDRQERFIRRWVDALSDPRVTHEIRSIWISYWSQADKSLGQKLLSRLNVRPSI

SEQ ID NO: 42975 - DNA, 1479 bp, Prunus persica
  CDS (1)..(1479)
atggatccatacaagtaccgcccttcaagtgcttttgattccccattctggaccacaaactccggtgctcctgtttggaacaacaactcttctttgactgttggatctagaggcccaattctccttgaggactatcatctggtggagaaacttgccaactttgatagagaacgaatcccagagcgtgttgtccatgctaggggagccagtgcgaagggattctttgaggtcactcatgatatttctcagcttacatgtgccgacttccttcgagcccccggtgttcagacacctgtcattgtgcgtttctccactgttatccatgagcgtggcagccctgaaaccctgagggatcctcgtggttttgcagtgaagttttacaccagagagggtaattttgacctggttggaaacaatttccctgtcttttttgttcgtgatggaatgaaattcccggacatggtccatgctctcaaaccgaaccccaagtcgcacattcaagagccttggaggatccttgacttcttctcccaccacccagaaagcctgcacatgttcaccttcctatttgatgatctgggagttccacaagattacaggcacatggaaggctctggtgttaacacctatacccttatcaataaggcggggaaagcacagtatgtgaaatttcattggaaacctacgtgtggagtcaagtgtttgttggaggatgaagctattaaggttggaggagctaatcacagccatgctaccaaggatctctatgattccattgcagctggcaactaccctgagtggaaactttatattcagacaattgatcctgatcatgaggacagatttgactttgacccacttgatgtaactaagacctggcctgaagatattcttcctctgcagccagttggccgtctggttctgaataaaaacattgataacttctttgcagagaatgaacaacttgcattttgccctgccattgttgtccctggtgtctactattcagatgataagttgctccaaactcgaatcttctcctattctgatactcagaggcaccgtcttggcccgaactatctgcagctcccagtgaatgctcccaagtgttctcatcataacaatcatcatgagggattcatgaatttcatgcacagggatgaggaggttaattacttcccttcaaggtatgatcctgttcgtcatgctgagcgcttccccattcctcctaatatcctttctggaaagcgtgagaagtgcatcattgagaaggagaacaactttaagcaacctggagagagatacagatcttgggcgccagaccggcaagagcgattcatccaccgatgggtggatgccctatcagacccacgtgtcacccatgagattcgcagcgtttggatctcatactggtctcaggcagataagtctctgggtcaaaagctcgcatcccgtctcaatgtgaggcccagcatttga

SEQ ID NO: 42976 - protein, 492 aa, Prunus persica
MDPYKYRPSSAFDSPFWTTNSGAPVWNNNSSLTVGSRGPILLEDYHLVEKLANFDRERIPERVVHARGASAKGFFEVTHDISQLTCADFLRAPGVQTPVIVRFSTVIHERGSPETLRDPRGFAVKFYTREGNFDLVGNNFPVFFVRDGMKFPDMVHALKPNPKSHIQEPWRILDFFSHHPESLHMFTFLFDDLGVPQDYRHMEGSGVNTYTLINKAGKAQYVKFHWKPTCGVKCLLEDEAIKVGGANHSHATKDLYDSIAAGNYPEWKLYIQTIDPDHEDRFDFDPLDVTKTWPEDILPLQPVGRLVLNKNIDNFFAENEQLAFCPAIVVPGVYYSDDKLLQTRIFSYSDTQRHRLGPNYLQLPVNAPKCSHHNNHHEGFMNFMHRDEEVNYFPSRYDPVRHAERFPIPPNILSGKREKCIIEKENNFKQPGERYRSWAPDRQERFIHRWVDALSDPRVTHEIRSVWISYWSQADKSLGQKLASRLNVRPSI

SEQ ID NO: 42977 - DNA, 1587 bp, Melopsittacus undulatus
  CDS (1)..(1587)
atggctgacaaccgggacgacgcctcggaccagctgaagcagtggcggagccagcgaggctcgcagaaaccagatgtcttgaccactggtgctgggaaccctgtaggggataagctgaatatcctgacagtagggccacgtggtcctcttcttgttcaagatgttgttttcactgatgagatggctcattttgacagagagaggattcctgaaagagtcgtgcatgcaaagggagcaggagcctttggttattttgaagttactcatgatattacccagtattgcaaggcaaaagtgtttgaacacattggaaaaagaactccgattgctatccgattctccactgttgctggagaatctgggtcagctgacacagttcgggaccctcgaggctttgcaatgaaattctacacagaagagggtaactgggatcttgtaggaaataatactcccatcttctttattcgggacgcaatgctgtttccatccttcatccatagccaaaagaggaaccctcagactcatttgaaggatccagacatggtgtgggacttctggagtcttcgccctgagtttttgcatcaagtgtctttcttgttcagtgaccgtggtattccggatggttatcgccatatgaatggatatggatcgcatacttttaaactggtgaatgctagtggaagagcagtttactgcaaattccatgcgaagacagatcagggcatcaaaaatcttcctgttgaagaagcaggaaggctggcttctactgatcctgattatggaatacgtgatctttacaatgccattgccaaaggggactatccgtcatggtctttcttcattcaagttatgacatttgaagaagcagagaaatttccatttaatccttttgatttaactaagatctggccacatggtgactaccccctcatccctgtgggaaagcttgtcttgaacaggaatcctgtcaattactttgcagaggtagaacagatggcatttgatcctagcaacatgccacctggtattgaacctagccctgacaaaatgctgcagggtcgtctcttttcgtatcctgacactcatagacaccgtctgggacccaactatctacaaattcctgtgaactgccccttcagaactcgtgtggccaattaccagagggatggaccgatgtgcgtttctgacaaccaaggtggtgccccaaactattacccaaacagttttactggtccagaagatcagcctgtgtggaaggagtcccgcatgtctatttcgggagatgtgcagcgcttcaacagtgccaatgaagataatgtgactcaggtgcgagacttctataccaaagtgctgaaagaggatgaacgccaaaggctgtgcaaaaacattgctgatcatcttaaggatgcacaactcttcattcagaagagagctgtgaaaaacttcactgatgttcatcctgactatggtgctcgtattcaggctttgctggacaagtacaatgctgacagtgggaagaaggatgtaatcaggacatacacacagtccacatctcgtatgtctgccaaagagagatccaacttgtaa

SEQ ID NO: 42978 - protein, 528 aa, Melopsittacus undulatus
MADNRDDASDQLKQWRSQRGSQKPDVLTTGAGNPVGDKLNILTVGPRGPLLVQDVVFTDEMAHFDRERIPERVVHAKGAGAFGYFEVTHDITQYCKAKVFEHIGKRTPIAIRFSTVAGESGSADTVRDPRGFAMKFYTEEGNWDLVGNNTPIFFIRDAMLFPSFIHSQKRNPQTHLKDPDMVWDFWSLRPEFLHQVSFLFSDRGIPDGYRHMNGYGSHTFKLVNASGRAVYCKFHAKTDQGIKNLPVEEAGRLASTDPDYGIRDLYNAIAKGDYPSWSFFIQVMTFEEAEKFPFNPFDLTKIWPHGDYPLIPVGKLVLNRNPVNYFAEVEQMAFDPSNMPPGIEPSPDKMLQGRLFSYPDTHRHRLGPNYLQIPVNCPFRTRVANYQRDGPMCVSDNQGGAPNYYPNSFTGPEDQPVWKESRMSISGDVQRFNSANEDNVTQVRDFYTKVLKEDERQRLCKNIADHLKDAQLFIQKRAVKNFTDVHPDYGARIQALLDKYNADSGKKDVIRTYTQSTSRMSAKERSNL

SEQ ID NO: 42979 - DNA, 1521 bp, Acinetobacter calcoaceticus
  CDS (1)..(1521): transl_table=11
atgaatgacgatactaaaaaatgtcctttttcccaacttactactgattttggggctccagttgtagacaaccagaatagtatgacggcaggtgcaagaggacctctacttgctcaagacctatggctaaatgagaaactagctaactttgttcgtgaagtaattccagaacgtcgtatgcatgcaaaaggttcaggtgcattcggtactttcacagtgactcatgatattactcaatatacccgcgctaaaatatttagcgaaattggtaaaaaaacggaaatgtttgcccgatttaccacagtagctggtgaacgtggagcagcagatgctgaacgagatattcgcggctttgctttaaaattttatacagaagaaggtaactgggacatggtgggtaacaatacaccagtgttcttcttacgtgatccacgtaaatttccagatttaaataaagcagtaaaacgcgatccaaaaactaacttgcgtagcgcaacgaataactgggatttctggactttattacctgaagctttacatcaagtcactattgtcatgtctgatcgtggtattcctgcctcttaccgtcatatgcacggttttagtagccatacttatagtttcatcaatagtgtgaatgaacgtttctgggtgaaatttcatttccggacccaacagggaattaaaaacttaacagatgctgaagctggtgaattagtggggcatgatcgcgaaagtcatcaacgtgatttattcgatgcgattgaacgaaaagattttcctaagtggactttgtatgtacaagttatgcctgagcaagatgctgaaaaggttccatatcatccatttgatttaacaaaagtctggcctcatggagattatccgttaattgaggttggtgagtttgagttgaatcggaaccctgaaaacttcttcttagatgttgaacaatctgcttttgcgccaagtaatctcgttccaggtattagtgcttcaccagaccgcatgttgcaagcccgtttatttaactatgcggatgctcagcgttatcgtttaggtgtgaattatcagcaaatacctgtaaatgcagcacgttgtccagttcatagtaatcaccgtgacggtcaaggacgcattgatgccaattatggtggacttccacattacgagccaaatagttttggacaatggcaagagcagcctcagtacaaagaaccaccgttaaaaatcaatggagatgctgatttctggaattatcgtgaagatgacaacgattatttcagtcaacctcgtgctttgtttgaacttatgactcctgagcaacaacaggctttatttgataatactgaacgcgcaatgggtgatgctcttgatttcattaaatatcgccacattcgtaactgctatgcatgtcatccagcttatggcgaaggtgtggctaaggcgcttggtttgacagttgaaaatgctcaagcagctagagaaactgaccctgcacgtggtttaccaagttttatttaa

SEQ ID NO: 42980 - protein, 506 aa, Acinetobacter calcoaceticus
MNDDTKKCPFSQLTTDFGAPVVDNQNSMTAGARGPLLAQDLWLNEKLANFVREVIPERRMHAKGSGAFGTFTVTHDITQYTRAKIFSEIGKKTEMFARFTTVAGERGAADAERDIRGFALKFYTEEGNWDMVGNNTPVFFLRDPRKFPDLNKAVKRDPKTNLRSATNNWDFWTLLPEALHQVTIVMSDRGIPASYRHMHGFSSHTYSFINSVNERFWVKFHFRTQQGIKNLTDAEAGELVGHDRESHQRDLFDAIERKDFPKWTLYVQVMPEQDAEKVPYHPFDLTKVWPHGDYPLIEVGEFELNRNPENFFLDVEQSAFAPSNLVPGISASPDRMLQARLFNYADAQRYRLGVNYQQIPVNAARCPVHSNHRDGQGRIDANYGGLPHYEPNSFGQWQEQPQYKEPPLKINGDADFWNYREDDNDYFSQPRALFELMTPEQQQALFDNTERAMGDALDFIKYRHIRNCYACHPAYGEGVAKALGLTVENAQAARETDPARGLPSFI

SEQ ID NO: 42981 - DNA, 1479 bp, Hypericum perforatum
  CDS (1)..(1479)
atggatccgtacaagtaccggccgtcgagcgccttcaactcaccgttttggacgaccaactcgggtgctcccgtctacagcaacgaccactccctcaccgttggatctcgaggtcctatcctcctggaggactatcaccttgtggaaaagcttgccaactttgacagggagaggattcctgagcgtgtcgttcatgccagaggagcaagtgcaaagggattctttgaagtcacccatgatatctctcatctcagctgtgctgattttctgcgagcccctggagttcagacccctgtcattgttcgattctccactgtcatccatgaacgcggaagccccgagaccttgagagatcctcgtggttttgctgtcaagttctatacccgagagggtaactttgatcttgtggggaacaacttccctgtgttcttcattcgtgatggaatgaagttccctgacatggtgcatgccctgaagcccaaccccaagtcccacattcaggaggattggaggatccttgatttcttctctcaccatcctgaaagtttgcacatgttctccttcctctttgatgatattggcattcctcaagactacaggcacatggaaggctccggtgttaacacatacactctagtcaacaaggctggcaaagtccattacgtgaagttccactggaagcctacttgtggtgtgaagagtttgctagaggatgaagcaattaaagttggaggatctaatcacagccatgctacaaaagatctgtatgactcgattgctgctggtaactatccggaatggaagctcttcatccagacgattgatcctgatcatgaggataggtttgactttgaccctcttgatgtgaccaagacatggccggaagacattttgcctcttcagcctgttggccgcttggtcctgaacaagaacatcgacaacttctttgctgagaatgagcagcttgcattctgccctgccattgttgttcctggcatctactactcagacgataagcttcttcagactcgaatcttctcttactcggacactcagagacaccgtcttgggcccaactatcttcagctccctgtcaatgctcccaagtctgcccatcataacaaccatcatgaaggtttcatgaacttcatgcacagggatgaagaggttaattacttcccttcaaggtatgacccagttcgccatgctgagaaatatccaattcctcctgttgttctcaatggaagacgtgagaagtgcatgattgcgaaagagaacaactttaagcagcctggagagaggtaccggtcgttttcgccagacaggcaagaacgcttcctcaacagatggattagctcgctgtctgacccccgtgtcacccatgaaatcagagccatctgggtcacctactggtaccaggctgacaaatctcttggtcagaagctcgcgtctcgtctcaatgtcaggccaaacatgtga

SEQ ID NO: 42982 - protein, 492 aa, Hypericum perforatum
MDPYKYRPSSAFNSPFWTTNSGAPVYSNDHSLTVGSRGPILLEDYHLVEKLANFDRERIPERVVHARGASAKGFFEVTHDISHLSCADFLRAPGVQTPVIVRFSTVIHERGSPETLRDPRGFAVKFYTREGNFDLVGNNFPVFFIRDGMKFPDMVHALKPNPKSHIQEDWRILDFFSHHPESLHMFSFLFDDIGIPQDYRHMEGSGVNTYTLVNKAGKVHYVKFHWKPTCGVKSLLEDEAIKVGGSNHSHATKDLYDSIAAGNYPEWKLFIQTIDPDHEDRFDFDPLDVTKTWPEDILPLQPVGRLVLNKNIDNFFAENEQLAFCPAIVVPGIYYSDDKLLQTRIFSYSDTQRHRLGPNYLQLPVNAPKSAHHNNHHEGFMNFMHRDEEVNYFPSRYDPVRHAEKYPIPPVVLNGRREKCMIAKENNFKQPGERYRSFSPDRQERFLNRWISSLSDPRVTHEIRAIWVTYWYQADKSLGQKLASRLNVRPNM

SEQ ID NO: 42983 - DNA, 1491 bp, Dictyostelium discoideum
  CDS (1)..(1491)
atgtcagctccagttttaaccaccagtagtggttcaccaattgataacaatttaaactcaatgaccgcaggtgttaatggtccaattttaattcaagatttcactttaattgataaacttgctcatttcgatcgtgaacgtatcccagaacgtgttgtacatgctaaaggtgctggtgcccatggttatttcgaagttccctcaagtgatgtaccaaaatggtgtaaagctaaattcttaaataaagttggtaagagaacaccaatcttcacccgtttctctactgttggtggtgaaaaaggttcatccgattctgaaagagatccaagaggtttcgctgtcaaattttatactgaagaaggtaactttgatatggtcggtaataatactccagttttctttattcgtgatccatcaaaattcccagatttcattcatacacaaaaacgtaatccacaaacaaattgtaaagatccaaatatgttttgggattttttaggtcaaacaccagaatcaacacatcaagtatcaattttattctctgatagaggtacaccaaaatcatatcgtcatatgcatggtttctcatcacataccttaaaatttgttaatgctcaaggtaaaccatattgggttaaattacatttcaccagtgaaactggtattcaaaattacacagctgaagaagctgccaagatgtcaatgaacgatccagattcagcaactcgtgatctctttgaaaccatcgccaaaggtggtgaaccagcttggaaagtttccattcaattgatggaatttgaagatgccttaaagtatcgtttcaatccattcgatgtaacaaagatttggtcacacaaagactatccattaattcaaattggtcgtatggttttgaatcgtaatccagagaattactttgctgaagttgaacaagctgccttctcaccatcccacatggttccaggtattgaaccatcaccagataagatgttacaaggtcgtctcttctcttatccagatactcatcgtcatcgtttaggtgtaaactatcaacaaatcccagtcaattgtccattcgccgtaaagggtggtgttaaaaactaccaacgtgatggtttcatggctgtcaatggtaatggtggtaaaggtccaaactatcaaccaaactctttcggtggtccagagccacatccagaatttgctcaacataaatttgacgtctctggtttcgctgctcgtcaaccatacaatcatccaaatgacgactttgttcaaccaggtgatttatatagactcatgtctgaagatgccaaatctcgtttcgtctctaatttagtcggtcacatgtccggtgtcaccatcaaagaaattcaagttcgtgccgtttcaaacttttacaaggctgacaaagatttaggtgctcgtttatgtaagggtcttggtattgatgttaatgatgtcatcaaattcgctgctagatcaaacttgtaa

SEQ ID NO: 42984 - protein, 496 aa, Dictyostelium discoideum
MSAPVLTTSSGSPIDNNLNSMTAGVNGPILIQDFTLIDKLAHFDRERIPERVVHAKGAGAHGYFEVPSSDVPKWCKAKFLNKVGKRTPIFTRFSTVGGEKGSSDSERDPRGFAVKFYTEEGNFDMVGNNTPVFFIRDPSKFPDFIHTQKRNPQTNCKDPNMFWDFLGQTPESTHQVSILFSDRGTPKSYRHMHGFSSHTLKFVNAQGKPYWVKLHFTSETGIQNYTAEEAAKMSMNDPDSATRDLFETIAKGGEPAWKVSIQLMEFEDALKYRFNPFDVTKIWSHKDYPLIQIGRMVLNRNPENYFAEVEQAAFSPSHMVPGIEPSPDKMLQGRLFSYPDTHRHRLGVNYQQIPVNCPFAVKGGVKNYQRDGFMAVNGNGGKGPNYQPNSFGGPEPHPEFAQHKFDVSGFAARQPYNHPNDDFVQPGDLYRLMSEDAKSRFVSNLVGHMSGVTIKEIQVRAVSNFYKADKDLGARLCKGLGIDVNDVIKFAARSNL

SEQ ID NO: 42985 - DNA, 2244 bp, Aspergillus oryzae
  CDS (1)..(2244)
atggccaatattgtggctgggggcctccacaaggttcaagaagcagtgcagggcgctgcttccaaggataagaagctagttgacctagcacccgacacccataatgtacagtccagcaaggagccactgaccaccgaccatggtgtgcgtatcagcgatacggaccactggctgaaggaggtgaatgacaaccacaccggtcctatgatgcttgaggaccagattgcacgagagaagattcatcgtttcgatcatgagcgcattcccgagagagtcgtccatgcgcgtggcaccgctgcattcggaaacttcaagctccatgagagcgctgaagatgtatcctacgctggtatcttgacggatacctcaaggaacactccggttttccttcgtttctccacggtccagggcagtaaaggaagtgccgacaccgtccgtgacgttcgtgggtttgccgtgaaattctacaccgacgaaggaaattgggatctggttggaaacaacatccccgttttctttatccaagatgcgattaagttcccggattttgtccatgctgttaagcccgagccgcacaacgaggtaccacaggcccaaactgctcacaacaacttctgggactttgtctatcttcacccggaagccacccatatgttcatgtgggccatgtctgatcgggccattcctcggtcataccgtatgatgcagggtttcggtgtcaacacattcagtctcatcaacaaggaaggaaagcgccattttgtcaagttccatttcatcccccacctgggagtgcactctttggtgtgggacgaggctctgaaactggctggccaggaccccgatttccatcgcaaggatctcatggaggccattgataacggcgcatacccgaaatgggacttcgccatccaggtcatccctgaggagaaacaggatgacttcgaatttgacattttcgacgcgacgaagatctggcccgaggagctcgtgcctctgcgcgtgatcggcgaactggaactgaaccgcaacgtcgacgagttcttccctcaaaccgagcaagtcgccttctgcaccagccacatcgtccccggcattgacttcagtgacgacccgcttctccagggccgtaacttctcctacttcgacactcagatcagtcgactgggcatcaactgggaagaaatccccatcaaccgccccgtctgccccgttctgaaccacaaccgagacggcgccaaacgccaccgcatcgcccagggcactgtcactacttggtcgaaccggtccgaggccggaccacccgcaccagtagaacatggtggcttcgcgtcctaccctgcgaaactgaacggtatcaagaagcgcggcctgagccccaagttccgcgagcaccacaaccaggctcaactcttctacaactctctctccgagcacgagaaggtccacgtcaagaaggccttcggcttcgaactggaccactgcgacgaccccatcgtctacgagcgcctcgccggccaccgtctcgccgagatcgatctcactctcgcccaggaagtcgccgagctcgtcggcgccccgatcccagacaaggcacttcgcccgaaccatggaaagcgcagcaagcatctttcgcagaccgagttcccgggtaagcagccgacgatcgccagtcgccgaatcgccatcattatcggcgacggatacgaccccgtcgctttcaatggcctcaagggcgccatcacggcggttggagccttaccgttcgtcattggcaccaagcggtcacctatctacgccgacggtgaggacaaatcatcttccaagggcgtgatcgccgaccaccagtatgacggacagcgttcgacgatgtttgacgctaccttcatccctggcggtccgcacgtcgaaagcctcaaggccaatggccagatccggtactggatcattgagacattcggtcatctcaaggctctgggcgccactggtgaagcggcggctttcatcaaggaagccctgggctccgcgcttgatgtgaaggtcgctacgtctgataacccccagccggttgagtggtatggtgttgtcacggctggaaagatccacaaacctgagagcttcaaggagggtatccagattgtcaaggatgcgaaggatttcattagcaccttcttctaccagatcagtcagcatcggaactacaagcgtgaactggatggcctcgcctcgacagttgcattctaa

SEQ ID NO: 42986 - protein, 747 aa, Aspergillus oryzae
MANIVAGGLHKVQEAVQGAASKDKKLVDLAPDTHNVQSSKEPLTTDHGVRISDTDHWLKEVNDNHTGPMMLEDQIAREKIHRFDHERIPERVVHARGTAAFGNFKLHESAEDVSYAGILTDTSRNTPVFLRFSTVQGSKGSADTVRDVRGFAVKFYTDEGNWDLVGNNIPVFFIQDAIKFPDFVHAVKPEPHNEVPQAQTAHNNFWDFVYLHPEATHMFMWAMSDRAIPRSYRMMQGFGVNTFSLINKEGKRHFVKFHFIPHLGVHSLVWDEALKLAGQDPDFHRKDLMEAIDNGAYPKWDFAIQVIPEEKQDDFEFDIFDATKIWPEELVPLRVIGELELNRNVDEFFPQTEQVAFCTSHIVPGIDFSDDPLLQGRNFSYFDTQISRLGINWEEIPINRPVCPVLNHNRDGAKRHRIAQGTVTTWSNRSEAGPPAPVEHGGFASYPAKLNGIKKRGLSPKFREHHNQAQLFYNSLSEHEKVHVKKAFGFELDHCDDPIVYERLAGHRLAEIDLTLAQEVAELVGAPIPDKALRPNHGKRSKHLSQTEFPGKQPTIASRRIAIIIGDGYDPVAFNGLKGAITAVGALPFVIGTKRSPIYADGEDKSSSKGVIADHQYDGQRSTMFDATFIPGGPHVESLKANGQIRYWIIETFGHLKALGATGEAAAFIKEALGSALDVKVATSDNPQPVEWYGVVTAGKIHKPESFKEGIQIVKDAKDFISTFFYQISQHRNYKRELDGLASTVAF

SEQ ID NO: 42987 - DNA, 2178 bp, Aspergillus oryzae
  CDS (1)..(2178)
atgcgcgccctctcccttgccagcctcattggcattgctagtgcggcgtgtccgtacatgaccggtgagcttgaacgtcgcgacacaggaaccgacgatgccaccgccgcgacagaggaattcttgtcccagtactatatggccgacaatgacacattcctgacctccgacgtgggcggccctattgaggatcagaacagccttcaagtcggagaccgcggcccgacattgctggaggatttcatcttccgacagaagatccagcgcttcgatcacgaacgtgttcctgaacgtgcagtccacgctcgcggtgttggtgcccatggtgtcttcacctcgtacggtgactactctaacatcactgctgcctcgttccttggagctgagggcaaggagactccggttttcgtgcgattctcgactgttgcgggtagccgtggtagttcggatttggctcgcgatgttcatggctttgcgactcgtttctacactgatgagggtaacttcgatattgttggcaacaacattcccgtcttcttcatccaggacgctattcttttccctgatctcatccacgctgtcaagcctcgtggtgacaatgagatccctcaggctgccactgcccatgactctgcttgggacttcttcagccagcagcccagttccctgcacaccctgctctgggccatgtccggccatggtatcccgcgctctcttcgccacgtcgatggctttggtatccacaccttccgcttcgtcactgacaacggtgactccaagctcgtcaagttccactggaagtccctgcagggtaaggccagcatggtctgggaagaagcgcagcaggtctctggcaagaaccccgacttcatgcgccaggatctcttcgaagcgatcgaggcgggcagataccctgagtgggagctcggtgttcaaatcatggatgaggaagaccagctgaagtttggcttcgatctgtttgatcccaccaagatcgtccccgaggaatacgtgccaatcaccaagctgggcaagatgactctcaaccgcaaccctcgcaactactttgccgagactgagcaggtcatgttccaacctggccacatcgtccgtggtgttgacttcaccgaggatcctcttctccagggccgtctcttttcgtacctcgacacccagttgaaccgtcacggcggacccaacttcgagcagctgcccatcaatcagcctcgcgtgcctgtgcacaacaacaaccgcgatggagccggccagatgttcatccccctgaaccccaacgcctactctccgaacaccctcaacaagggctctcctaagcaggccaaccagactgtgggcaagggcttcttcacggctcctggacgcgagtctactggccgtttcacccgtgccgtcagcccgtccttcgaggacgtctggtcgcagccgcgtctgttctacaactcacttactcccgccgaacagcagttcgtcgtcgatgctattcgttttgagaactccaacgtcaagagctcggtcgtacgcaacaatgtcatcatccagctgaaccgcgtgtccaacgacctcgcccgccgcgtcgctcgcgctatcggcgttgaggagcctgaggctgacccgacctactaccacaacaacaagaccactgacgttggcactttcggacagaagctgaagaagctcgatggactgaaggttggcttcctggcttcggttgagacccctgcctccatcgaggcagcctctgagctcagcaagcagctttctgaggacggcgttgatgttgtcgtcgttgcggagcgtctgtccgatggcgttgatcagacttactccggatcggatgccatccagttcgatgctgtgatcgtcgcgcccggcgctgagggtcttttctctactttctccttcactgcgcctagcaatgccacctcctcgtccactctgttcccggccggccggcccctgcagattgtcatcgatggattccgtttcggaaagcctgttggtgccgtcggcagcgccgctactgcgctcaagaacgccggtatccagacttctcgcgacggtgtgtacgtcgacaagtcggtgactagtggattcgtcgatggtatcaaggacggtcttcgcactttcaagttccttgaccgtttcaagctggaccattaa

SEQ ID NO: 42988 - protein, 725 aa, Aspergillus oryzae
MRALSLASLIGIASAACPYMTGELERRDTGTDDATAATEEFLSQYYMADNDTFLTSDVGGPIEDQNSLQVGDRGPTLLEDFIFRQKIQRFDHERVPERAVHARGVGAHGVFTSYGDYSNITAASFLGAEGKETPVFVRFSTVAGSRGSSDLARDVHGFATRFYTDEGNFDIVGNNIPVFFIQDAILFPDLIHAVKPRGDNEIPQAATAHDSAWDFFSQQPSSLHTLLWAMSGHGIPRSLRHVDGFGIHTFRFVTDNGDSKLVKFHWKSLQGKASMVWEEAQQVSGKNPDFMRQDLFEAIEAGRYPEWELGVQIMDEEDQLKFGFDLFDPTKIVPEEYVPITKLGKMTLNRNPRNYFAETEQVMFQPGHIVRGVDFTEDPLLQGRLFSYLDTQLNRHGGPNFEQLPINQPRVPVHNNNRDGAGQMFIPLNPNAYSPNTLNKGSPKQANQTVGKGFFTAPGRESTGRFTRAVSPSFEDVWSQPRLFYNSLTPAEQQFVVDAIRFENSNVKSSVVRNNVIIQLNRVSNDLARRVARAIGVEEPEADPTYYHNNKTTDVGTFGQKLKKLDGLKVGFLASVETPASIEAASELSKQLSEDGVDVVVVAERLSDGVDQTYSGSDAIQFDAVIVAPGAEGLFSTFSFTAPSNATSSSTLFPAGRPLQIVIDGFRFGKPVGAVGSAATALKNAGIQTSRDGVYVDKSVTSGFVDGIKDGLRTFKFLDRFKLDH

SEQ ID NO: 42989 - DNA, 1458 bp, Porphyromonas gulae
  CDS (1)..(1458): transl_table=11
atggaaaagaacaaacttactacagctgcgggtgcccccgtagcagacaatcagaatgtggccactgcaggcaagcgtggtcctatgcttctgcaggatgtctggtttttggaaaagctggctcacttcgatcgtgaagtgatccccgaacgtcgtatgcatgccaaaggttcgggagctttcggcacatttactgtcactcatgacatcaccaagtacacgaaggcggctattttctccgaaatcggcaagcagaccgagctgtttgtacgcttctcgactgtggctggagagcgtggtgcggctgatgcggagcgggatatacgtggctttgctatcaagttttatactgaggaaggtaactgggacctcgtaggaaacaatacccccgtatttttcctgagagatcctctcaaattccccgacctgaaccacgtagtaaagcgtgacccacgcaccaatatgaggagtcctcaaaacaactgggacttttggacgcttttgcccgaagctctccaccaggtgactatcacgatgagcgaccgaggtatacctgccagctatcgtcacatgcacggctacggaagccatgcattctcgtttatcaacgccgaaggagtaagacattgggtgaaatttcatctccacactcaacaggggataaagaatctgacagatgcagaggcggaagcattgatcgggaaagatcgtgaaagtcatcagagagacttatttgaaagcattgagcgtggcgactatcctcgttggacgctcaaggtgcagatcatgacggaggaagaagccaaagctttgccgtataatcctttcgacttgacaaaggtgtggtcgcagaaagattttccccttatcgaagttggcgtaatggagctgaaccgcaatccggaaaactacttcgccgatgtggagcagtcggcattcaaccctgccaatgtggtgcccggcattagtttctcacctgacaggatgttgcaggggcgtctgttttcctatggcgatacgcaacgctatcgcctcggcgtgaatcatcaccaaatacctgtgaacaggagtcgttgtcctttcctgaatatgtatcacagggatggagccatgagggtagatggcaacttcggttcgcgtcttggctatgagcctaacagctatgggcactggcaagatcagaatgagtacaaagagccacccctcgaacttgatggtgctgcctatcaatgggatttcagggaagatgacagtgactattattctcagcctcgcaagctcttccatatcatgtcgccggatcagcagcaggtactattcgacaatacggctcgtgccatgggtgatatccccaaagagatcaagctgcgccatatagcgaattgctacaaggccgatccggactatggcaagggagtagcaaaggctttggggcttgacgtaaacgaagcactgtaa

SEQ ID NO: 42990 - protein, 485 aa, Porphyromonas gulae
MEKNKLTTAAGAPVADNQNVATAGKRGPMLLQDVWFLEKLAHFDREVIPERRMHAKGSGAFGTFTVTHDITKYTKAAIFSEIGKQTELFVRFSTVAGERGAADAERDIRGFAIKFYTEEGNWDLVGNNTPVFFLRDPLKFPDLNHVVKRDPRTNMRSPQNNWDFWTLLPEALHQVTITMSDRGIPASYRHMHGYGSHAFSFINAEGVRHWVKFHLHTQQGIKNLTDAEAEALIGKDRESHQRDLFESIERGDYPRWTLKVQIMTEEEAKALPYNPFDLTKVWSQKDFPLIEVGVMELNRNPENYFADVEQSAFNPANVVPGISFSPDRMLQGRLFSYGDTQRYRLGVNHHQIPVNRSRCPFLNMYHRDGAMRVDGNFGSRLGYEPNSYGHWQDQNEYKEPPLELDGAAYQWDFREDDSDYYSQPRKLFHIMSPDQQQVLFDNTARAMGDIPKEIKLRHIANCYKADPDYGKGVAKALGLDVNEAL

SEQ ID NO: 42991 - DNA, 1479 bp, Capsicum annuum
  CDS (1)..(1479)
atggatccctacaagcaccgtccttcaagcgctgccaattcgccctattggacaactaattcaggtgctccggtgtataacaacaattcttccctgaccgtgggagctagagggccaattcttctcgaggattatcatttgcttgagaagcttgccaattttgatcgtgagagaatcccagagcgtgttgttcatgccagaggtgccagtgccaagggtttctttgaggtcactcatgatataacccgtcttacatgtgctgattttcttcgagctcctggtgtccagacacctgttattgtgaggttctctactgttattcacgagcgtggaagccccgaaaccctcagggatcccagaggattcgctgtaaagttttacaccagagagggtaacttcgatctggttggaaacaacttccctgtcttctttgtccgtgatggaatgaagttccctgacatggttcatgctctaaaaccaaatccaaagtcccacattcaggagaactggaggatccttgatttcttctctcaccatccagaaagtcttcatatgttcagtttcctgtttgatgatctgggtatcccacaagattacaggcacatggaaggttccggtgttaatacctacacgctgatcaacaaagctgggaaagcacattatgtgaaattccattggaaaccaacttgtggagtcaaatgcttgttggatgacgaagctgttaaggttggtggaacaaatcatagtcacgccacccaggatctctatgattcaattgctgctgggaactatccaaagtggaaactgttcatccaaactatcgatcctgatcatgaagacaaatttgactttgaccccttagatgtaaccaagatctggcctgaggacattttgccattacaaccagttggtcgcttggtattgaacaagaatatcgacaacttctttgtagagaacgagcagcttgctttttgccctgccattattgtccctggtatccattactcggatgataagcttctccagactagggtattctcatatgctgatacccagagacaccgtcttgggccaaactatctgcagcttccacctaacgctcccaagtgtgctcatcacaataatcaccatgaaggtttcatgaatttcatgcaccgtgatgaagaggtcaactattttccctcaaggtttgatccttgtcgccatgcagagcagtacccaattcctcctcgtgtcttgaatggaaaacgtgataggtgcatcattcagaaagagaacaacttcaagcagccaggggagagataccgatcttgggcccctgacaggcaagaaagatttatctgcagatgggttgatgctctatctgaacctcgagtcactcatgaaatacgcactatttggctctcatactggtcacaggctgacaagtctcttggtcagaagctcgcctctcgtctcaatgtaaagcctacaatgtga

SEQ ID NO: 42992 - protein, 492 aa, Capsicum annuum
MDPYKHRPSSAANSPYWTTNSGAPVYNNNSSLTVGARGPILLEDYHLLEKLANFDRERIPERVVHARGASAKGFFEVTHDITRLTCADFLRAPGVQTPVIVRFSTVIHERGSPETLRDPRGFAVKFYTREGNFDLVGNNFPVFFVRDGMKFPDMVHALKPNPKSHIQENWRILDFFSHHPESLHMFSFLFDDLGIPQDYRHMEGSGVNTYTLINKAGKAHYVKFHWKPTCGVKCLLDDEAVKVGGTNHSHATQDLYDSIAAGNYPKWKLFIQTIDPDHEDKFDFDPLDVTKIWPEDILPLQPVGRLVLNKNIDNFFVENEQLAFCPAIIVPGIHYSDDKLLQTRVFSYADTQRHRLGPNYLQLPPNAPKCAHHNNHHEGFMNFMHRDEEVNYFPSRFDPCRHAEQYPIPPRVLNGKRDRCIIQKENNFKQPGERYRSWAPDRQERFICRWVDALSEPRVTHEIRTIWLSYWSQADKSLGQKLASRLNVKPTM

SEQ ID NO: 42993 - DNA, 1479 bp, Vitis vinifera
  CDS (1)..(1479)
atggatccttacaagtatcgtccttcaagcgcctataattctccttacttcaccacaaatgctggtgcgcctgtttataacaatgactcgtcgctcaccgttggatcaagaggcccagttcttcttgaggattatcatttggtggagaagcttgcaaattttcaaagagaacgcattccagaacgtgtggtccatgctagaggagctagtgctaaagggttttttgaggtcactcacgatgtctctgacctcacatgtgctgatttccttcgtgccccgggagtgcagactccagttattgttaggttttccactgttatccacgagcgtggcagccctgagaccataagggaccctcgaggttttgctgtgaagttctatactagagagggcaattttgatatggtgggaaacaatttcccagtcttctttattcgtgatgcaatgaagttccctgatgtgatccatgctttcaaacccaatccgaagtcccatatccaggagtattggagagttgttgacttcttgtcctaccatccagaaagcttgagcacatttgccttcctcttcgatgatgtgggtatcccacaggactataggcacatggaaggctttggtgttcacaccttcactctactcaacaaggctgggaaggcaaattatgtgaagttccactggaaacccacgtgtggagtcaagtgtttgttggaggatgaagccataagagttggaggaactaaccacagtcatgctactcaggatctctatgactcgatcaaggctggaaactatcctgagtggaagcttttcatccagacgatggatcctgaacatgaagacaagtttgactttgatccacttgatgttaccaagacttggcctgaggatatcttgcccttgcagccagtgggccggttggtattaaacaagaacatagataatttctttgctgagaatgagatgcttgccttcaacccagctcttgttgtacctggtatatattacacaaatgataaaatgctccaaggtagaatctttgcctattctgatactcagaggcaccgccttggaccgaactatctgcagcttccagtaaatgcacccaagtgtgcttttcacaacaatcaccatgacggttccatgaatttcatgcacagggatgaggaggtcgactacttcccttcaaggtttgatcctgttcgtcatgcggagacattccctattccttctactatttgccatggcaagcgtgagaaggtcgtcattgagaaggagaacaatttcaagcagcctggtgagagataccgttcatttgcaccggacaggcaagagcgtttcatcaacagatgggttgagaccttgtctgatccaagggtcacctatgagatccgcagtatctggatttcatattggtctcaggctgacaggtctctgggtcagaagcttgcttctcgtcttaatgtcaagcctaagtattga

SEQ ID NO: 42994 - protein, 492 aa, Vitis vinifera
MDPYKYRPSSAYNSPYFTTNAGAPVYNNDSSLTVGSRGPVLLEDYHLVEKLANFQRERIPERVVHARGASAKGFFEVTHDVSDLTCADFLRAPGVQTPVIVRFSTVIHERGSPETIRDPRGFAVKFYTREGNFDMVGNNFPVFFIRDAMKFPDVIHAFKPNPKSHIQEYWRVVDFLSYHPESLSTFAFLFDDVGIPQDYRHMEGFGVHTFTLLNKAGKANYVKFHWKPTCGVKCLLEDEAIRVGGTNHSHATQDLYDSIKAGNYPEWKLFIQTMDPEHEDKFDFDPLDVTKTWPEDILPLQPVGRLVLNKNIDNFFAENEMLAFNPALVVPGIYYTNDKMLQGRIFAYSDTQRHRLGPNYLQLPVNAPKCAFHNNHHDGSMNFMHRDEEVDYFPSRFDPVRHAETFPIPSTICHGKREKVVIEKENNFKQPGERYRSFAPDRQERFINRWVETLSDPRVTYEIRSIWISYWSQADRSLGQKLASRLNVKPKY

SEQ ID NO: 42995 - DNA, 1509 bp, Paracoccidioides brasiliensis
  CDS (1)..(1509)
atgggtgccgacgttgcgtccagtacttaccgttatactgaaactcccacctacaccacgtccaatggctgcccggtcatggaccctgagtcttcccagcgggtgggaatgaaaggccccctgctcctccaggatttccacctgattgaccttgcccatttcgatcgcgagcgaattcccgaacgagtggtccatgctaaaggtgcaggagcttacggtgaattcgaagtcttggatgatatcagcgacattacggtcattgatatgcttttgggtgtgggaaagaagacaaagtgtattacccgcttctccactgtgggtggagagaaggggtccgccgatagtgctcgcgatcctagagggttctccaccaaattttacaccgagcaaggaaattgggactgggtcttcaacaacaccccagtcttcttcttgcgtgatccatcaaagtttcctatcttcattcatacccagaagagaaacccacagaacaacctgaaggatgctactatgttctgggactacctctccacccatcaggagtccgccaacaggtcatgcatgcatctcttcagtgaccgtggcaccccgatactccctaccggcacatgtaacggtattctaggacaccacattacacagtggaccaagcctgacggaaccttcaactacgtccaaatccactgcaagaccgatcagggcaacaagacctttaacaacgaagaagccaccaagatggccgccgataatccagattggcataccgaagatctattcaaagccatcgagcgcggcgaatacccatcctggacgtgtacgttcaggtcctcagccccgagcaggctagaaatccgctggaatgtcttcgacctgaccaaagtctggcctcaggcggaggtgcccctccgccgcttcggccgcttcaccctctgcgagaacccgcagaactacttcgcggaaatcgaacaggccgccttctcaccctcccacatggtcccgggtgtcgaaccatccgccgaccctgtcctgcaatcccgcctcttctcctatccagacacccaccgccaccgcctgggcgtcaactaccagcagatccctgtcaactgtcctctgcgcgccttcaacccgtaccagcgtgacggtgccatggctatcaatggcaactacggcgccaaccccaactacccatccaccttccgcccgatggagttcaagcccgtcaaggcctgccaggagcacgagcagtgggctggcgccgccttgtcgaagcaaattcccgtcacggatgaggatttcgtccagcccaatggcctctggcaggttcttggacgccagccgggacaacaggagaatttcgttcacaatgtgtccgtccacctctgtggggcacaggagaaagtgcgcaaggccacctactgcatgttttcgcgcattaacgcggaccttggagcgcggattgagaaagccacggagaggttggttgcttctcagccacagtcgcatctgtga

SEQ ID NO: 42996 - protein, 502 aa, Paracoccidioides brasiliensis
MGADVASSTYRYTETPTYTTSNGCPVMDPESSQRVGMKGPLLLQDFHLIDLAHFDRERIPERVVHAKGAGAYGEFEVLDDISDITVIDMLLGVGKKTKCITRFSTVGGEKGSADSARDPRGFSTKFYTEQGNWDWVFNNTPVFFLRDPSKFPIFIHTQKRNPQNNLKDATMFWDYLSTHQESANRSCMHLFSDRGTPILPTGTCNGILGHHITQWTKPDGTFNYVQIHCKTDQGNKTFNNEEATKMAADNPDWHTEDLFKAIERGEYPSWTCTFRSSAPSRLEIRWNVFDLTKVWPQAEVPLRRFGRFTLCENPQNYFAEIEQAAFSPSHMVPGVEPSADPVLQSRLFSYPDTHRHRLGVNYQQIPVNCPLRAFNPYQRDGAMAINGNYGANPNYPSTFRPMEFKPVKACQEHEQWAGAALSKQIPVTDEDFVQPNGLWQVLGRQPGQQENFVHNVSVHLCGAQEKVRKATYCMFSRINADLGARIEKATERLVASQPQSHL

SEQ ID NO: 42997 - DNA, 1479 bp, Arabidopsis thaliana
  CDS (1)..(1479)
atggatccttacaagtatcgtccagctagttcttacaactctcccttcttcaccaccaactctggtgctcctgtatggaacaacaactcctccatgaccgttggacccagaggtcctatccttcttgaggattaccatctcgttgagaagcttgccaatttcgacagggaacggattccagagcgtgtggttcatgccagaggagccagtgctaaaggtttctttgaggtcactcatgatatctctaacctcacttgtgctgactttctccgagctcccggtgttcagactcctgtcattgtccggttctccaccgttatccatgagcgtggaagtcccgagaccttgagagaccctcgtggttttgcagtcaagttctacaccagagaggggaactttgatcttgttggaaacaactttcctgttttcttcatccgcgatgggatgaagttccctgacatggtccacgctcttaagccgaacccaaaatctcacatccaagagaactggagaatccttgacttcttctcccaccaccctgaaagtttgaacatgttcactttcctcttcgatgatatcggtatcccacaagattacaggcacatggatggttcaggtgtcaatacatacatgttgatcaacaaagctggcaaagctcactacgtgaagttccattggaaaccaacttgtggagtcaagtctcttttggaagaagatgcaattcttgttggaggaaccaaccacagtcatgcgactcaagacttgtatgactctatagctgctggaaactaccctgaatggaagctctttatccaaatcattgatcctgctgatgaagacaagttcgactttgacccgctcgatgtgaccaagacctggcctgaggatatcttgcctcttcaacctgttggacgtatggtgttgaacaagaacattgacaacttctttgcagagaatgagcaacttgctttctgtcctgcaattattgtcccagggatacattactcagatgataagctgcttcaaacccgtgtcttctcctatgccgatactcagagacaccgtcttggaccaaactaccttcagctgccagtcaatgctccaaaatgtgctcaccacaacaaccaccatgagggattcatgaatttcatgcacagggacgaggaggttaactacttcccgtcgaggtatgaccaggttcgtcatgctgagaagtatccaactccgcctgctgtctgttctggaaaacgtgagaggtgcattattgagaaagagaacaacttcaaggagcctggagagagataccgtacctttacaccagagaggcaagaacgattcatccagagatggattgatgccctatccgacccacgcatcacgcatgaaatccgcagtatctggatctcttactggtctcaggctgataagtctttgggacagaagctggcaagccgtctgaacgtgagaccaagcatctaa

SEQ ID NO: 42998 - protein, 492 aa, Arabidopsis thaliana
MDPYKYRPASSYNSPFFTTNSGAPVWNNNSSMTVGPRGPILLEDYHLVEKLANFDRERIPERVVHARGASAKGFFEVTHDISNLTCADFLRAPGVQTPVIVRFSTVIHERGSPETLRDPRGFAVKFYTREGNFDLVGNNFPVFFIRDGMKFPDMVHALKPNPKSHIQENWRILDFFSHHPESLNMFTFLFDDIGIPQDYRHMDGSGVNTYMLINKAGKAHYVKFHWKPTCGVKSLLEEDAILVGGTNHSHATQDLYDSIAAGNYPEWKLFIQIIDPADEDKFDFDPLDVTKTWPEDILPLQPVGRMVLNKNIDNFFAENEQLAFCPAIIVPGIHYSDDKLLQTRVFSYADTQRHRLGPNYLQLPVNAPKCAHHNNHHEGFMNFMHRDEEVNYFPSRYDQVRHAEKYPTPPAVCSGKRERCIIEKENNFKEPGERYRTFTPERQERFIQRWIDALSDPRITHEIRSIWISYWSQADKSLGQKLASRLNVRPSI

SEQ ID NO: 42999 - DNA, 1479 bp, Suaeda salsa
  CDS (1)..(1479)
atggatccatacaagtttcgaccttcaagtgctaacaattctccatacttcaccgccaattctggtgcacctgtttggaacaataacaattcgttaactgttggtcacagaggtcccattcttttggaggactatcatttggtggagaagcttgccaatttcgacagagagcgtataccagagcgtgttgtgcatgccaggggagcgagtgcaaaggggttttttgaagttactcatgatgtttcacaccttacatgtgctgattttctgcgcagccctggtgttcagacacctgtaattgttcgtttctccactgttattcatgaacgtggaagtccagaaaccatcagggatcctcgtggttttgctgtgaagttctacaccagagagggtaactttgatctggtggggaacaatttccctgtcttttttatccgtgatggtatgaaattccctgatatggtgcactccctcaagcccaaccccaaatctcacatccaagagaactggaggatcatggatttcttctcccaccatcctgagagtttgcacatgttcacttttctctttgatgatatcggaattcctgcaaactacaggcacatggaaggttctggtgttaacacatacactttaattaacaaggctggaaaaacatactacgtgaagttccactggaaaccaacatgtggggtgaagagcctgttggaggatgaggccattaaagttggaggagctaaccacagccatgctacgcaggacctctatgactcaattgcaagtgggaactatcctgagtggaagcttttcatccagacaatagacccagctgatgaagataaatttgactttgaccccctagatgttacaaaaacatggcctgaggatattttgcccctacagccagtgggtcgtttagtgttgaacaagaacattgacaacttctttgcagaaaacgagcaactggcattttgcccttctattgttgttcctggggtccactactcagatgacaagctgcttcaaactcgaattttctcgtactctgatactcaaagacaccgtcttggccccaactacctgcaacttcctgtgaatgcccccaagtgttctcatcacaacaatcactatgatggttttatgaacttcatgcacagagatgaagaggttgactacttcccatcaagatacgaccctgttcgtcatgctgagaggtatccaattccttcaaacgtcttgaatggatgccgtgaaaagcaatgcatcccaaaggaaaacaacttcaagcagcctggagagagatacagatcaatggacccagctaggcaagagagatttatttgccgagtggttgatgccctgtctgatcctcgtgtcactcatgagatccgtagcatttggatttcatactggtctcaggctgacaaatctctgggaatgaaagtagcaagtagactaaacgtgaggccaaccatgtga

SEQ ID NO: 43000 - protein, 492 aa, Suaeda salsa
MDPYKFRPSSANNSPYFTANSGAPVWNNNNSLTVGHRGPILLEDYHLVEKLANFDRERIPERVVHARGASAKGFFEVTHDVSHLTCADFLRSPGVQTPVIVRFSTVIHERGSPETIRDPRGFAVKFYTREGNFDLVGNNFPVFFIRDGMKFPDMVHSLKPNPKSHIQENWRIMDFFSHHPESLHMFTFLFDDIGIPANYRHMEGSGVNTYTLINKAGKTYYVKFHWKPTCGVKSLLEDEAIKVGGANHSHATQDLYDSIASGNYPEWKLFIQTIDPADEDKFDFDPLDVTKTWPEDILPLQPVGRLVLNKNIDNFFAENEQLAFCPSIVVPGVHYSDDKLLQTRIFSYSDTQRHRLGPNYLQLPVNAPKCSHHNNHYDGFMNFMHRDEEVDYFPSRYDPVRHAERYPIPSNVLNGCREKQCIPKENNFKQPGERYRSMDPARQERFICRVVDALSDPRVTHEIRSIWISYWSQADKSLGMKVASRLNVRPTM

SEQ ID NO: 43001 - DNA, 2145 bp, Botrytis cinerea
  CDS (1)..(2145)
atgtacttggcaacagtcctaagcctcgtaggcttagtcaccgctcaatgtccatacggaatggacaagcaaccccaaaagcgcgaacctaaagattctcaaaccagtagttctaattttctagaccagttcacattaaatgacaccaatacatacttcactaccgatgcaggcgggcctatacaagaggacaccagtttaaaagctggtgcaagaggcccgacactacttgaagattttatttttcgtcaaaagatacaacatttcgatcatgaacgggtaccagaacgtgccgtacacgccagaggtgccggtgcacatggtattttcacaagttatggaaattatagcaacataacggcagctagctttctgaatcaagaaggtaaagagacacccgtctttgtacgattttctactgttgccgaaagtcgaggtagcgctgatactgcacgcgacgtccatggttttgctactaggttctataccgatgaagggaattttgatattgttgggaataatattcctgttttcttcattcaggatgcaatccttttccccgacttgattcacgctgtcaaaccatctccagacaacgaaatacctcaagcagcaacagcacacgattctgcttgggacttttttagtcagcaaccaagttcactgcacacactcttttgggccatggccggaaacggaattccaagatcattccgccacatggatggatttggtatccacacatttcgcttggttacagattctggtacttccaaactggtcaagtggcattggaagagtaaacaaggaaaggcaagcttggtctgggaggaagctcaggtactcgcgggaaaaaatgcagatttccacagaaaagatttgtgggatgctattgagagcggcaatggccctgaatgggaactcgggattcagatcgtggaggaagaagatgtgttgaagtttggatttgatcttttggaccccaccaagatccttcctgaagagcttgttccagtccaaaagattggagtcatgagattaaatgccaatcctcgaaattacttcgcggaaacagagcaagttatgttccaaccagggcacatagtgcgtggtattgattttacggatgatccacttcttcaaggacgcatcttttcatacttggatacacaactaaatcgtcatggtggaccaaatttcgagcaattacctatcaatcgcccaattgttcctgttcacaacaacaatcgcgatggtgcagcgcacaattatatccctcttaacacagctgcttattcccctaacactctcaatgatgcggctccaaagcaagcaaatcaaacagtgggtagaggattcttcacagctcctggaagaacggtctcaggtcatctagtaagagaggtgtcgtcaaccttctcagacgtttggtctcaacccaggctattctacaattctctcatcccagtagaacaacaattcctcattaacgcgatccgattcgaaacgtcccaacttacatccagcgttgtgaaatcaaatgttctcattcagttgaatcgcgtttcacacgatcttgctgcacgcgtcgcttcagttttgaatctaccagttccagaagcagataacacttactataatgataacaaaacttcctccatcacaatatttggcaatgaactcccaacgatagcaacactaaatgtcggagtgttggtgagtgttaagaacaatgcgactttaacacaagcagccaatcttgcaacatcgttttcgacatccggggtaaacgtcaaagtcataggagaaatcttgacaaacggagtagatgccacttatagcgcatcggatgcgacactgtttgatggtattattgtaactgatggtgccgagaatttgttcacaaacggttcaaaatcaacgtacttcccggctgaccgacctcgtcagatcttgttggatgcgtacaattggggaaagcctgtgggaactttgggaaatgcgagaacgtcattaaatgttgcgtcaatctccactacaccaggcgtgtacagtaattcaacgagtgtgagtggccttgttaaggagtttgaagccggattgaagactttcaggttcgtcgatagatttgccttggatgattga

SEQ ID NO: 43002 - protein, 714 aa, Botrytis cinerea
MYLATVLSLVGLVTAQCPYGMDKQPQKREPKDSQTSSSNFLDQFTLNDTNTYFTTDAGGPIQEDTSLKAGARGPTLLEDFIFRQKIQHFDHERVPERAVHARGAGAHGIFTSYGNYSNITAASFLNQEGKETPVFVRFSTVAESRGSADTARDVHGFATRFYTDEGNFDIVGNNIPVFFIQDAILFPDLIHAVKPSPDNEIPQAATAHDSAWDFFSQQPSSLHTLFWAMAGNGIPRSFRHMDGFGIHTFRLVTDSGTSKLVKWHWKSKQGKASLVWEEAQVLAGKNADFHRKDLWDAIESGNGPEWELGIQIVEEEDVLKFGFDLLDPTKILPEELVPVQKIGVMRLNANPRNYFAETEQVMFQPGHIVRGIDFTDDPLLQGRIFSYLDTQLNRHGGPNFEQLPINRPIVPVHNNNRDGAAHNYIPLNTAAYSPNTLNDAAPKQANQTVGRGFFTAPGRTVSGHLVREVSSTFSDVWSQPRLFYNSLIPVEQQFLINAIRFETSQLTSSVVKSNVLIQLNRVSHDLAARVASVLNLPVPEADNTYYNDNKTSSITIFGNELPTIATLNVGVLVSVKNNATLTQAANLATSFSTSGVNVKVIGEILTNGVDATYSASDATLFDGIIVTDGAENLFTNGSKSTYFPADRPRQILLDAYNWGKPVGTLGNARTSLNVASISTTPGVYSNSTSVSGLVKEFEAGLKTFRFVDRFALDD

SEQ ID NO: 43003 - DNA, 1479 bp, Zantedeschia aethiopica
  CDS (1)..(1479)
atggatccctgcaagtaccgcccgtccagctcgtatgacgcgtccttcaccaccacaaatgctggcggacccgtgtggaatgatgacgttgccctgaccgtcggatctcgggggcccattcttctggaggattaccatttgatcgagaaggttgctcacttcgctcgggagcgcatcccagaacgagttgttcatgccaggggagccagcgccaagggcttcttcgagtgcactcatgatgtcactcacctcacttttgccgatttcttgagggcacctggcgtccagacccctgttatagtccggttctccactgtgatccatgagaggggaagccctgaaaccatcagggacccaagaggctttgctgtgaaattttacaccagagagggtaactgggatctgctggggaacaacttcccggtcttcttcatccgcgatggaataaaattcccagacgtgatccatgccttcaaacccaaccccaagtctaatgtccaagagtactggagggtcctggacttcctctcgcacctcccggagagcttgcacaccttctgcttcctgtacgacgatgtgggcgtccccttgaactacaggcacatggaaggcttcggcgtcaacacctacaccttcatcaacaaggcgggcaagaccaactacgtgaagttccactggaagcccacatgcggggtgaagtgcatgctggaggacgaggccgtggtggtgggagggaagaaccacagccacgccacccaggacctctacgattccatcgccgccgggaactaccccgagtggaagctcttcgtccaggtcatggacccggacgaggaggacaagtatgacttcgacccactggacgacaccaagacctggccggaggacctgctccccctgcagccagtgggccgcctggttctcaacaggaacatcgacaacttcttcaacgagaacgagcagcttgccttctcccctggcattattgtgcccggcatctactactcggacgacaagatgctgcaatgcagaactttcgcctacggggacacccagaggtaccgtctcgggccaaactacctgatgctcccggtgaacgcacccaagtgcgcgcacaagaacagccactacgatggcctcatgaactttatgcacagagatgaagaggtgaattattacccttcaaggcatgaccgtcttagaaatgcggagagattcccgattaacaaccgtcctattattgggaagcgtgagaagtgcacaattgagaaacagaatgatttcaagcagcccggagagagataccgctcttgggcacctgataggcaagagcggtttgttcgccgctgggttgaggcattggcccaccccaaagttacctttgaaatccgcaccatctgggtatcctatctctccaagtgcgatgcttctctggggcagaaggttgccaatcgtctgaacatgaaaccaagcatgtaa

SEQ ID NO: 43004 - protein, 492 aa, Zantedeschia aethiopica
MDPCKYRPSSSYDASFTTTNAGGPVWNDDVALTVGSRGPILLEDYHLIEKVAHFARERIPERVVHARGASAKGFFECTHDVTHLTFADFLRAPGVQTPVIVRFSTVIHERGSPETIRDPRGFAVKFYTREGNWDLLGNNFPVFFIRDGIKFPDVIHAFKPNPKSNVQEYWRVLDFLSHLPESLHTFCFLYDDVGVPLNYRHMEGFGVNTYTFINKAGKTNYVKFHWKPTCGVKCMLEDEAVVVGGKNHSHATQDLYDSIAAGNYPEWKLFVQVMDPDEEDKYDFDPLDDTKTWPEDLLPLQPVGRLVLNRNIDNFFNENEQLAFSPGIIVPGIYYSDDKMLQCRTFAYGDTQRYRLGPNYLMLPVNAPKCAHKNSHYDGLMNFMHRDEEVNYYPSRHDRLRNAERFPINNRPIIGKREKCTIEKQNDFKQPGERYRSWAPDRQERFVRRWVEALAHPKVTFEIRTIWVSYLSKCDASLGQKVANRLNMKPSM

SEQ ID NO: 43005 - DNA, 2238 bp, Cladosporium fulvum
  CDS (1)..(2238)
atggccaccgagaagatctcctccgggcttggaaagctccaagaccagctcaatggcgccgcagaaggccagaaggtggcgcatgtgaagaacgacccgctctacaaggactaccacgaaccgagcaacagaatcaccaccgactatggcgtcaagcagcacaacacagacgactggctcaagattgcctccgaggacaagacaggtccaatgctgcttgaagaccatgcagcacgagagaagatcaaccgtttcgaccacgagcgaatcccagaacgtgttgtccacgcccgtggctcagcggctttcggtactttcaagctgcacaagagcttggagcaatacaccaccgccggcgtcctgaccgatacatcccgcaccacacctaccttccttcgattctccaccgtgttgggaagccgcggcagtgctgacactgtccgcgatgtaagaggattcgccatcaaacactacaccccagagggcaactgggatgtcgttggtaacaatataccggtcttcttcatccaggatgccatcaagttccctgatgtcatccatgctggcaagccagagccagacaacgaagttccgcaagcgcagactgcgcacaacaacttctgggacttccaattcatgcacactgaggcgacacatatgttcatgtggactcaatccgaccgagcaattccaagatcataccgtatgatgcaaggatttggtgtcaacaccttcaccttgaccaacgcaaagggcgagcgattcttcgtcaagttccactggactccacaccttggtgtacacagctttgtctgggacgaggcattgaagctcgctggccaggatccggactttcaccgcaaggacctttgggaagcgatcgaggccaaagcctaccccaagtgggactttggagttcaagtcatttcagagggtgaagaggacaactttgagttcgacattctcgacgccaccaaggtttggcccgaggaacttgtgccaatccagtatgtcggcgagcttgaactcaaccgcaatcccgatgagttcttcccacagaccgagcaggtggctttctgcacgggccacgttgtaccaggcataggtttctctgacgaccctctgctccagggacgaaactttagctaccaggacacccagatctccagacttggtgtcaacttccaggagctgcccatcaaccgacctgtctgccccgtgatgaacaacaaccgagacggcgcgctccgacacaccgttactaagggcaaggtaaattactggcccaaccgtttcgaagctacacctccagccgcagcagaagagaagccatacctcgactacccacagaaggtggctggcatgaagacccgtctgcgctcgaagaagttcagcgagcacttcaaccaggcccagctcttctacaactcaatgtcggaacccgagaaggagcacatcaagttcgcgcttgccttcgagctcgatcactgtgaggatcccgtcgtctacgaccgcgtgtcgcagcgtcttgcagacatcgacctcagcctcgcacaaagcgtagccgacctcgtcggtggccagatcccacagcagcaaggtcgtcccaaccacggcaagaagtccaagggtctatctcagaccgagttccccggcaagaccccaaccatcgaaacccgccgcattgccatcatcatcgccgacggctacgatttagtggcatacaacggcatcgtcgctgcagcaaaggcatgccaagctctgccattcaccattgctcccagaagatccccaatctacgctgcgggcgaaagcaaggagaacagcaagggcgtcaagccagaccatcacctcgaaggcatgcgcagcaccatgttcgactccgtcttcgtcccaggtggtgcagactcggtcgctacgctccgcaagaatggccgcgcactgcactgggtccgcgaagcgttcgctcacctcaaggccattggtgccgttggtgaggccgtcgacttcgtccgcaatgcctgtcaattacctggcatgacattctccgccagtgaggaggtcaccgactcgtacggtgttgtgaccgccgcgaaagtcaagccggagagcctgagtgaggctgtgaagatcggaaaggatgcagcggactttgtctcgaagtacttctacgagatttcccagcataagaactttgagagggagctgaagggattcccgctgatggttgcgtattag

SEQ ID NO: 43006 - protein, 745 aa, Cladosporium fulvum
MATEKISSGLGKLQDQLNGAAEGQKVAHVKNDPLYKDYHEPSNRITTDYGVKQHNTDDWLKIASEDKTGPMLLEDHAAREKINRFDHERIPERVVHARGSAAFGTFKLHKSLEQYTTAGVLTDTSRTTPTFLRFSTVLGSRGSADTVRDVRGFAIKHYTPEGNWDVVGNNIPVFFIQDAIKFPDVIHAGKPEPDNEVPQAQTAHNNFWDFQFMHTEATHMFMWTQSDRAIPRSYRMMQGFGVNTFTLTNAKGERFFVKFHWTPHLGVHSFVWDEALKLAGQDPDFHRKDLWEAIEAKAYPKWDFGVQVISEGEEDNFEFDILDATKVWPEELVPIQYVGELELNRNPDEFFPQTEQVAFCTGHVVPGIGFSDDPLLQGRNFSYQDTQISRLGVNFQELPINRPVCPVMNNNRDGALRHTVTKGKVNYWPNRFEATPPAAAEEKPYLDYPQKVAGMKTRLRSKKFSEHFNQAQLFYNSMSEPEKEHIKFALAFELDHCEDPVVYDRVSQRLADIDLSLAQSVADLVGGQIPQQQGRPNHGKKSKGLSQTEFPGKTPTIETRRIAIIIADGYDLVAYNGIVAAAKACQALPFTIAPRRSPIYAAGESKENSKGVKPDHHLEGMRSTMFDSVFVPGGADSVATLRKNGRALHWVREAFAHLKAIGAVGEAVDFVRNACQLPGMTFSASEEVTDSYGVVTAAKVKPESLSEAVKIGKDAADFVSKYFYEISQHKNFERELKGFPLMVAY

SEQ ID NO: 43007 - DNA, 1512 bp, Methanobrevibacter arboriphilus
  CDS (1)..(1512)
atgtcaaataaaaaaaaattcacaacaaataaaggaattcctgtacctaatgatcaggcatccattaccacaggtaaaggatcaaattatacaatgttaggagattctcatttaactgagaaacttgcgcatttcggtagagaaagaataccggaaagagtcgttcatgcgaaaggaactggggcttatggatattttgaagttacaaatgacctttcaaaatatactagagctaaatttctttcagaagttggtaaaaaaactgaggtttttataagattctctaccgttgggggagaaagaggttctgctgatgcaaaaagagatcctcgtggaactgctatgaaatattatactgaagaaggaaattatgatcttgttggaaataatactcctattttctttattagagatgcaataaagttcccagattttatccacactcaaaagagaaaccctaaaaataatctatctgatgctgatatgttttgggattttatgtccttaacacctgaatcaatacatcaagcaacatttttatttactgatagaggaactccacaaaattaccgacatatggatttatttggaagtcattcttttatgtggtataatgaaaaaaatgaatatgtatgggtaaaatatcattttaaaacagctcagggaatacaaaacttaacaaatgatgaagcaattaaaatgtgtggtgaaaatccagaccatgccacagaagatctatttaatgctattgaagaaggaaattatccagaatggaatgtctatgttcaaataatgactcccgaagaagcagaaaaatatgaatttgatccatttgatgtaacaaaagtttggttccatggagattatccattaatccctctaggaaaattagttttaaataaaaatccagaaaatttctttgctgaagttgaacaggttgcattcgcaccttcaaattttgttccaggaattggaccttcaccagacaggcttttgcaaggaaggttattttcttatgaagacactcaaagacatagactaggtccaaatcatcaccaaattccaataaatagggcaaaaaatgctgaagtaaacacctatcaaagagacggaccgatgacagtcacagataatggaggaagtgggcctaattactatccaaattcatttgatgggccagaagtagatgaaacagttactccaccaactatagaattgaaagcggaaattaatagacacccaaggccagttgaagatgttgactttttccaaacaggcgaactttggagaagagttttaagtgatgaggataaggatcatctagtatataatatagttgcacacttaggaaatgcccaagaaagaattcaatatagacaatgtgctcttttctacaaagcagaaccagaatatggaacacgtgtagctgagggaattggacttgatatatccaaagttaaaaatctttctgaaatgactcaagaagaaagagttgaagccacaaaaaaatga

SEQ ID NO: 43008 - protein, 503 aa, Methanobrevibacter arboriphilus
MSNKKKFTTNKGIPVPNDQASITTGKGSNYTMLGDSHLTEKLAHFGRERIPERVVHAKGTGAYGYFEVTNDLSKYTRAKFLSEVGKKTEVFIRFSTVGGERGSADAKRDPRGTAMKYYTEEGNYDLVGNNTPIFFIRDAIKFPDFIHTQKRNPKNNLSDADMFWDFMSLTPESIHQATFLFTDRGTPQNYRHMDLFGSHSFMWYNEKNEYVWVKYHFKTAQGIQNLTNDEAIKMCGENPDHATEDLFNAIEEGNYPEWNVYVQIMTPEEAEKYEFDPFDVTKVWFHGDYPLIPLGKLVLNKNPENFFAEVEQVAFAPSNFVPGIGPSPDRLLQGRLFSYEDTQRHRLGPNHHQIPINRAKNAEVNTYQRDGPMTVTDNGGSGPNYYPNSFDGPEVDETVTPPTIELKAEINRHPRPVEDVDFFQTGELWRRVLSDEDKDHLVYNIVAHLGNAQERIQYRQCALFYKAEPEYGTRVAEGIGLDISKVKNLSEMTQEERVEATKK

SEQ ID NO: 43009 - DNA, 1479 bp, Hevea brasiliensis
  CDS (1)..(1479)
atggatccgtacaagaaccttccatcaaacgcttataattgctccttctggactacgaattctggtgctccagtatggaacaacaattcgtccttgactgttggagccagaggtccaatccttcttgaggactatcatctgttggagaaacttgcaaactttgatagggagcggattccagagcgtgttgtgcatgctaggggagcaagtgcaaagggtttctttgaggtcacccataatgtctctcaactcacatgtgctgatttccttcgagctccgggggttcagactcctgtcattgtccgtttctccactgttattcatgagcggggcagcccagaaaccataagggatcctcgaggttttgctgtgaagttttacaccagagagggtaactttgatctggtgggaaacaatttccctgtttttttcatccgcgatggaatgaagttcccagatgtggtgcatgcttttaagcccaaccctaagtctcacatccaggagagctggaggatctttgacttcctatcccatgttcctgaaagcttgcacatgctcaccttcctttttgatgacctgggtattcctcaagattacaggcacatggaaggctctggcgttaacacatatactttaataaacaatgctggaaaagtacactgtgttaaatttcactggaaacctacttgtggtgtgaagtgtttgctagaggaagaggcaatcaaggttggaggatctaatcatagccatgccactcaggatctatatgactcgattgcagctggcaactatccagaatggaaactttacatccagacaatggatcctgatcatgaagacaaatttgattttgatccacttgatgtgactaagacctggcccgaggatatcctgcctcttcaaccggttggccgcttggtcttgaataagaacattgacaatttctttgctgagaatgagcaacttgcgttctgccctggtattgtggttcctggtatttcatattcggaggacaaattactccaaactaggatcttttcctattctgatacccagaggcatcgtcttggatcgaactatctacagctacctgttaacgctccaaagtgtgctcatcacaacaatcaccatgacggtttcatgaatttcatgcacagagatgaggaggtcaattacttcccatccaggtgtgatccagttcgccattctgagagatttcccattccttccactatctgcagtggaaggcgcgataagtgtgtcattgagaaggaaaacaatttcgagcaacctggagagagatatagatcctgggcacctgacaggcaagagcgattcctaaaccggatggttggttgcctatctgatccccgtatcactcatgagcttcgtagtatctggatctcctactggactcagtgtgacagatccctgggtcaaaagctagcattccggctcaacgtgaggccaagcatttga

SEQ ID NO: 43010 - protein, 492 aa, Hevea brasiliensis
MDPYKNLPSNAYNCSFWTTNSGAPVWNNNSSLTVGARGPILLEDYHLLEKLANFDRERIPERVVHARGASAKGFFEVTHNVSQLTCADFLRAPGVQTPVIVRFSTVIHERGSPETIRDPRGFAVKFYTREGNFDLVGNNFPVFFIRDGMKFPDVVHAFKPNPKSHIQESWRIFDFLSHVPESLHMLTFLFDDLGIPQDYRHMEGSGVNTYTLINNAGKVHCVKFHWKPTCGVKCLLEEEAIKVGGSNHSHATQDLYDSIAAGNYPEWKLYIQTMDPDHEDKFDFDPLDVTKTWPEDILPLQPVGRLVLNKNIDNFFAENEQLAFCPGIVVPGISYSEDKLLQTRIFSYSDTQRHRLGSNYLQLPVNAPKCAHHNNHHDGFMNFMHRDEEVNYFPSRCDPVRHSERFPIPSTICSGRRDKCVIEKENNFEQPGERYRSWAPDRQERFLNRMVGCLSDPRITHELRSIWISYWTQCDRSLGQKLAFRLNVRPSI

SEQ ID NO: 43011 - DNA, 2181 bp, Podospora anserina
  CDS (1)..(2181)
atgaaaaggctgctaacgtgggccaccctcgtggggtccatgtcggcggtgacaaaagcggcatgcccttttgctgatcccaactaccacctcgccaagagggacgagggcgcgagccagcagacggagaatatcctcgaggagtacgaggttgacgacagcaatgcttacatgtcgtccgacgttggtgggccgatggaggaccagaacagcctcaaggctgggtacagggggtctaccttgatggaggactggatctttaggcaaaagattcagcattttgatcatgaacggattcccgaaagggctgttcacgctcgtggtgccggtgctcacggtaccttcaccagctatgccgactggagcaacatcacggctgcttccttcctcggtggagctggaaagaagactcccgtcttcgtccggttctcgaccgttgctggttcccgcggcagtgctgataccgctcgcgatgtccacgggttcgctacccgcttctacactgacgaaggaaactttgacattgtcggcaacaacatccccgtcttttttatccaagacgccatccgcttccccgacttgatccactctgtcaagcccagcccggacaatgaggtcccccaggcggccaccgctcacgattcggcgtgggacttcttcagccagcagcccagcactatgcacactctcttctgggccatgtccggcaacggcatccctcgcagttatcgtcacatggacggcttcggcgtgcacaccttccgcttcgtcacggacgacggcaactccaagctcatcaagtggcacttcaagaccaagcaaggcaaggcttctctggtctgggaagaggcccaggttctcgctggcaagaacgccgacttccaccgtcaggatctctgggacgcgatcgagtcaggcaacggtccagagtgggagctgtccgtccagatcgtcgacgaagaaaaggccctcgcctttgggtttgacctcctcgaccccaccaagatcatccccgaggagctcgccccgttggttcccctcggtatcatgaagctggaccggaacccgaccaattactttgccgagacggagcaggtcatgtaccagcctggtcacattgtccgtggtgtcgactttaccgaggacccgcttctccaaggccgtttgttttcgtaccttgacacgcagctcaaccggaaccagggcgggcccaactttgagcagatccccatcaacagacccgtctcgcctgttcacaacaacaaccgggacggggcgggacagatgcttattcataaaaatgtttacccttatacccctaacactctcaacggggggtaccccctccaagccaaccagacgcacgggaaagggttctttacggcgccgaacaggatcgtggatgggaagctggtcagggcgctgtcgccgacgtttgatgatcattggtcgcagccgaggttgttttacaactcgttgacgagggttgagcagcagtttttgatcaacgctatccggtttgaggcatctcatctcaagaacgagcaggtgaagaagaacgtgttggagcagatcaaccgtgtgtcaaacgatgtggcgaagcgggttgcggtggctcttggacttgaggcgccggctccggacccggcattctaccataacaatgtcacggctgggctttccatctttaacggaaccctccccacgattgcgactttgagggttggcgtccttgcctcgtctttcaatgatggatcgcttgctcaggcgcgggagttgaaggagcagctcagcaaggagggggttgtggtcactgttgttggcgaggttctcaaggagggggtggatcagacttactctgctgctgatgccactgggtacgacgcggtggttgtgacggatggggcggaggggttgttgactggaggaaagaactctccgttgttccctgccggacggccggggcagatcttggtggatagttatcgttgggggaagccggtcgctgctgtgggggagaattcgggacaggcgttggagcagacggttggggtgagtagggggcaggatgagggtgttgttgttggggagggggttgagcaggttgtgaagggggtcgaggaggggttgagggtgtttagatacttggggaggttccctgttgatgagggggcagagtag

SEQ ID NO: 43012 - protein, 726 aa, Podospora anserina
MKRLLTWATLVGSMSAVTKAACPFADPNYHLAKRDEGASQQTENILEEYEVDDSNAYMSSDVGGPMEDQNSLKAGYRGSTLMEDWIFRQKIQHFDHERIPERAVHARGAGAHGTFTSYADWSNITAASFLGGAGKKTPVFVRFSTVAGSRGSADTARDVHGFATRFYTDEGNFDIVGNNIPVFFIQDAIRFPDLIHSVKPSPDNEVPQAATAHDSAWDFFSQQPSTMHTLFWAMSGNGIPRSYRHMDGFGVHTFRFVTDDGNSKLIKWHFKTKQGKASLVWEEAQVLAGKNADFHRQDLWDAIESGNGPEWELSVQIVDEEKALAFGFDLLDPTKIIPEELAPLVPLGIMKLDRNPTNYFAETEQVMYQPGHIVRGVDFTEDPLLQGRLFSYLDTQLNRNQGGPNFEQIPINRPVSPVHNNNRDGAGQMLIHKNVYPYTPNTLNGGYPLQANQTHGKGFFTAPNRIVDGKLVRALSPTFDDHWSQPRLFYNSLTRVEQQFLINAIRFEASHLKNEQVKKNVLEQINRVSNDVAKRVAVALGLEAPAPDPAFYHNNVTAGLSIFNGTLPTIATLRVGVLASSFNDGSLAQARELKEQLSKEGVVVTVVGEVLKEGVDQTYSAADATGYDAVVVTDGAEGLLTGGKNSPLFPAGRPGQILVDSYRWGKPVAAVGENSGQALEQTVGVSRGQDEGVVVGEGVEQVVKGVEEGLRVFRYLGRFPVDEGAE

SEQ ID NO: 43013 - DNA, 2211 bp, Podospora anserina
  CDS (1)..(2211)
atggccagttatttgccctccatggagaaagtacagcacgccgttcttgggccccgagggggtgacaaggtcgccgaccttcagaaggagaccaaggagatgtcagacaaggcccgcctcacaacagactatggtgtcaagcagacctctgccgatgactggctcaagatcgtcaacaacgacaagactggtcccatgctgttggaagacccctttgctcgcgagagaatccacaggttcgaccacgaaagaatcccagagcgcgtcgtccatgcccgtggcagcggtgccttcggcaagttcaagctcttcgagagtgccgaggatgtcacttttgctccaatccttaccgacacatcgcgcgagacgcccatttttatccggttttcgacagtgctcggtagccgtggcagcgctgataccgttcgcgatgtgcgaggttttgcgatcaagttctacacacaggaaggaaactgggatattgtcgccaacaatattcccgtgttcttcattcaggacgccatcaagtttcccgatgtcatccatgctggcaaacccgagccacacaacgaggttccccaagcccagacagcccataacaacttctgggatttccagtacaaccacaccgaggcgacgcacatgttcatgtgggcgatgagcgacagaggtattcctcgttcgtaccgcatgatgcaaggatttggcgtcaacaccttcacgctcatcaacgccaagggagagcgtcactttgtcaagttcatcttcaccccggaactcggcgtgcactctcttatttgggacgaggccctcaagcttgccggccaggatccagacttccaccgcaaggacctgtgggaggccatcgagaacggtgtcttccccaagtggaagttcggtattcaggtgatccctgaagctgatgagcacaagttcgacttcgacattttggatgctaccaagatctggcccgaggatctggtacctgtgcgttacattggcgagttcgagctcaaccgcaacccagacgagttcttcccacagactgagcaggttgcattctgcacaagccacatcgtccccggtattggcttctccgatgaccctcttctccaaggccgcaacttcagctatttcgatacacaattgagccgtctgggtatcaactggcaggagcttcccatcaaccgcccagtatgccccgtcatgaacttcaaccgcgatggtgctatgcgccacaccatcaccaaaggcaccgtcaactactggcccaaccggtttgagaaggtcaagcctgctactcacgaggaaggcgggtatgttgaatacgctgagaaggttgccggcatcaaggcccgcgcccgcagtgccaagttcaaggagcattttgctcaggcgcaactgttctggaacagtatgtcggcggttgagaagaaccacatcatcaacgccctcggattcgagcttgaccactgtgaggatcctgtcgtgtacgagcgcatggtgacgcgattggccgatatcgacttgggtctcgcccagacagtcgccgagatggttggtggtgagccccccaaggaggccagccgtcccaaccacggccgcaaggcaccaggcttgagccaaacagagttccccggatcaaagcctaccattgcgtcccggagaatcgccatcttggttgccgatgggtacgatcaggtcgcctactcagctgcgtacgctgctatctcggctggcttggccatcccattggttatcggaaccaagagaagcaagattgttgccgccggtggagctggtagcaccacacctcatcatcacttggaaggcttccgctccaccatggtggacgccatcttcattcccggcggtgttgattccattcgcgctctgtccaagaacggcagagctctgcattggatcagggaggcctttggtcatctcaaggctattggagccacaggcgaagctgtcgacttggtcaacaaggccatcggcctgccagctgttagtgtctcggagagtgccgaggtccaggacagctatggtgtcgtgactatgcgtgagaccaagccaggaagcttgagtgaggcggtggacatcgtcaaggccggtgctggttttatggagaagttcttccacaacattgcccagcacaggtgctgggccagagagctggatggcctccacagccaggtggcctactag

SEQ ID NO: 43014 - protein, 736 aa, Podospora anserina
MASYLPSMEKVQHAVLGPRGGDKVADLQKETKEMSDKARLTTDYGVKQTSADDWLKIVNNDKTGPMLLEDPFARERIHRFDHERIPERVVHARGSGAFGKFKLFESAEDVTFAPILTDTSRETPIFIRFSTVLGSRGSADTVRDVRGFAIKFYTQEGNWDIVANNIPVFFIQDAIKFPDVIHAGKPEPHNEVPQAQTAHNNFWDFQYNHTEATHMFMWAMSDRGIPRSYRMMQGFGVNTFTLINAKGERHFVKFIFTPELGVHSLIWDEALKLAGQDPDFHRKDLWEAIENGVFPKWKFGIQVIPEADEHKFDFDILDATKIWPEDLVPVRYIGEFELNRNPDEFFPQTEQVAFCTSHIVPGIGFSDDPLLQGRNFSYFDTQLSRLGINWQELPINRPVCPVMNFNRDGAMRHTITKGTVNYWPNRFEKVKPATHEEGGYVEYAEKVAGIKARARSAKFKEHFAQAQLFWNSMSAVEKNHIINALGFELDHCEDPVVYERMVTRLADIDLGLAQTVAEMVGGEPPKEASRPNHGRKAPGLSQTEFPGSKPTIASRRIAILVADGYDQVAYSAAYAAISAGLAIPLVIGTKRSKIVAAGGAGSTTPHHHLEGFRSTMVDAIFIPGGVDSIRALSKNGRALHWIREAFGHLKAIGATGEAVDLVNKAIGLPAVSVSESAEVQDSYGVVTMRETKPGSLSEAVDIVKAGAGFMEKFFHNIAQHRCWARELDGLHSQVAY

SEQ ID NO: 43015 - DNA, 1368 bp, Staphylococcus aureus
  CDS (1)..(1368): transl_table=11
atgtcacaacaagacaaaaagttaactggtgtttttgggcatccagtatcagatcgagaaaatagtatgacagcagggcctaggggacctcttttaatgcaagatatttactttttagagcaaatgtctcaatttgatagagaagtaataccagaacgtcgaatgcatgccaaaggttctggtgcatttgggacatttactgtaactaaagatataacaaaatatacgaatgctaaaatattctctgaaataggtaagcaaaccgaaatgtttgcccgtttctctactgtagcaggagaacgtggtgctgctgatgcggagagtgacattcgaggatttgcgttaaagttctacactgaagaaggaaactgggatttagtagggaataacacaccagtattcttctttagagatccaaagctatttgttagtttaaatcgcgcggtgaaacgagatcctagaacaaatatgagagatgcacaaaataactgggatttctggacggggcttccagaagcattgcaccaagtaacgatcttaatgtcagatagagggattcctaaagatttacgtcacatgcatgggttcggttcacacacatactctatgtataatgattctggtgaacgtgtttgggttaaactccattttagaacgcaacaaggtattgaaaacttaactgatgaagaagctgctgaaattatagcaacaggtcgtgattcatctcaacgcgatttattcgaagccattgaaaaaggtgattatccaaaatggacaatgtatattcaagtaatgactgaggaacaagctaaaaaccataaagataatccatttgatttaacaaaagtatggtatcacgatgagtatcctctaattgaagttggagagtttgaattaaatagaaatccagataattactttatggatgttgaacaagttgcgtttgcatcaactaatattattccaggattagatttttctccagacaaaatgctgcaagggcgtttattctcatatggcgatgcgcaaagatatcgattaggagttaatcattggcagattcctgtaaaccaacctaaaggtgtgggtattgaaaatatttgtccttttagtagagatggtcaaatgcgcgtagttgacaataaccaaggtggaggaacacattattatccaaataaccatggtaaatttgattctcaacctgaatataaaaagccaccattcccaactgatggatacggctatgaatataatcaacgtcaagatgatgataattattttgaacaaccaggtaaattgtttagattacaatcagagggcgctaaagaaagaattttacaaatacagcaaatgcaatggaaggcgtaa

SEQ ID NO: 43016 - protein, 455 aa, Staphylococcus aureus
MSQQDKKLTGVFGHPVSDRENSMTAGPRGPLLMQDIYFLEQMSQFDREVIPERRMHAKGSGAFGTFTVTKDITKYTNAKIFSEIGKQTEMFARFSTVAGERGAADAESDIRGFALKFYTEEGNWDLVGNNTPVFFFRDPKLFVSLNRAVKRDPRTNMRDAQNNWDFWTGLPEALHQVTILMSDRGIPKDLRHMHGFGSHTYSMYNDSGERVWVKLHFRTQQGIENLTDEEAAEIIATGRDSSQRDLFEAIEKGDYPKWTMYIQVMTEEQAKNHKDNPFDLTKVWYHDEYPLIEVGEFELNRNPDNYFMDVEQVAFASTNIIPGLDFSPDKMLQGRLFSYGDAQRYRLGVNHWQIPVNQPKGVGIENICPFSRDGQMRVVDNNQGGGTHYYPNNHGKFDSQPEYKKPPFPTDGYGYEYNQRQDDDNYFEQPGKLFRLQSEGAKERILQIQQMQWKA

SEQ ID NO: 43017 - DNA, 1479 bp, Raphanus sativus
  CDS (1)..(1479)
atggatccttacaagtatcgtccagcgagttcatacaactctccattcttcaccaccaactccggtgctcctgtatggaacaacaactcctccatgaccgttggacccagaggtcctatccttcttgaggattaccatctcgttgagaagcttgccaacttcgacagggagcgtattccagagcgtgtggttcatgctagaggagcaagtgcaaagggtttcttcgaggtcactcatgatatatctaacctcacgtgtgccgacttcctcagagctccaggtgttcagaccccagtcattgttcgtttctccactgtcatccatgagcgtggaagtcccgagaccttgagagaccctcgtggctttgccgtcaagttctacaccagagagggaaactttgatcttgtcggaaacaacttccctgtcttcttcatccgcgacggtatgaagttccctgacatggtccacgctcttaagccaaacccaaaatctcacatccaagagaactggagagtccttgacttcttctcccaccaccctgagagcttaaacatgttcactttccttttcgatgacatcggtatcccacaagactaccgccacatggaaggttcaggtgtcaacacatacatgctgatcaacaaatccggcaaagctcactacgtgaagttccactggaaaccaacatgtggagtcaagtctctgttagaagaagatgcaatccgcgttggtggaaccaaccacagccacgcgactcaggacttgtacgactccatcgctgctggtaactaccctgagtggaagctctttgttcagataatcgatccggcggatgaagacaagttcgactttgaccctctcgatgtgaccaagacctggcctgaggatctcttgcctctccagcccgttggtcgtatggtgttgaacaagaacattgataacttctttgcggagaatgagcagcttgccttctgccctgcgatcattgttccggggatacactactctgatgacaagctgcttcaaacacgtgtcttctcctatgcggatactcagagacaccgtcttggacctaactaccttcagctaccagtgaatgctccaaaatgtgctcaccacaacaaccaccatgagggcttcatgaatttcatgcacagggacgaggaggttaactacttcccttcgaggtatgacccggttcgccatgctgagaagtatccaactccaccagcagtctgctctgggaagcgtgagaggtgcattattgagaaagagaacaacttcaaggagcctggagagagataccgttcctttacaccagagaggcaagaacgtttcatcggtagatggattgatgctctatcagaccctcgcatcacacatgaaatccgcagtatctggatctcttactggtctcaggctgataagtcactgggacagaagctggcaagccgtctgaacgtgagaccaagcatctaa

SEQ ID NO: 43018 - protein, 492 aa, Raphanus sativus
MDPYKYRPASSYNSPFFTTNSGAPVWNNNSSMTVGPRGPILLEDYHLVEKLANFDRERIPERVVHARGASAKGFFEVTHDISNLTCADFLRAPGVQTPVIVRFSTVIHERGSPETLRDPRGFAVKFYTREGNFDLVGNNFPVFFIRDGMKFPDMVHALKPNPKSHIQENWRVLDFFSHHPESLNMFTFLFDDIGIPQDYRHMEGSGVNTYMLINKSGKAHYVKFHWKPTCGVKSLLEEDAIRVGGTNHSHATQDLYDSIAAGNYPEWKLFVQIIDPADEDKFDFDPLDVTKTWPEDLLPLQPVGRMVLNKNIDNFFAENEQLAFCPAIIVPGIHYSDDKLLQTRVFSYADTQRHRLGPNYLQLPVNAPKCAHHNNHHEGFMNFMHRDEEVNYFPSRYDPVRHAEKYPTPPAVCSGKRERCIIEKENNFKEPGERYRSFTPERQERFIGRWIDALSDPRITHEIRSIWISYWSQADKSLGQKLASRLNVRPSI

SEQ ID NO: 43019 - DNA, 1479 bp, Helianthus annuus
  CDS (1)..(1479)
atggatccctacaagcaacgcccttcgagtgcttacgatacccctttctggactacaaatgccggtgcacccgtttacaacaatactgcatcattgactgtgggcaatagaggtccaattctcctggaggactatcatttgatcgagaaactagccaacttcactcgtgaaaggatcccagaacgtattgtgcatgcaagaggtgcgagtgcaaaggggttcttcgaggtcactcatgacatcacccatctcacctgtgcagatttccttcgtgctcctggagtccagactccggttatcgttcgattctcaaccgttatccatgaacgaggaagccctgaaaccatcagagaccccagaggttttgcaacaaagttttataccagagagggtaactttgatattgtggggaacaacttccccgtgttctttactcgcgacgcaatggcattcccggatgtgattcatgctttcaaaccaaaccccaagtcacacatccaagaagactggaggatcctcgacttcttgtcacaccatcctgagagcttgaacactatgacattctggctcgatgacgtcggtatcccaaccgattacaggcacatggaagggtcaagtgtcaacaccctcactttagttaacaaagaaggtaaaatacactatgtgaagttcacatggaagcccacatgtggagtcaagtgtttgatggatgatgaagctatcaaaatcggaggagctaatcacagtcacgccactcaagatctttacgattcgattcaagccggtaacttccctgaatggaagctgtttcttcaagttattgacccggatcatgaagacaggcttgactttgacccgctcgatggcaccatgacctggcctgaggatgtgataccgctgcagcctgtcgggcgtatggtgttgaataagaatattgataacttctttgctgagaatgaacagctggcgttcaacccgggtcttgttgtcccgggaatttattattctgatgataagatgcttcaaggtcggatcttcgcgtattctgatacgcagaggcaccgtcttggaccgaactatttgcagcttccggttaatgcgcctaaatgcgctcatcataataatcactatgatggacatatgaattttatgcacagagatgaggaggttgattacttcccttcgaggtatgatcgtgttcaacatgctcagaaatacccgatcaatccggctagggttactggaacccgtgacaggactgtgatcccaaaatataacgatttcaagcagccaggggagagatacagatcatgggatccagccaggcaagaaagattcattgtccgaatgtgtaagatgttgtccgacccacgggttacccacgaacttcgcagtatttggatctcatattggacccaagctgacaagtctctggggcagaagatagcatcacgtctcaatgtgcgccccaactactga

SEQ ID NO: 43020 - protein, 492 aa, Helianthus annuus
MDPYKQRPSSAYDTPFWTTNAGAPVYNNTASLTVGNRGPILLEDYHLIEKLANFTRERIPERIVHARGASAKGFFEVTHDITHLTCADFLRAPGVQTPVIVRFSTVIHERGSPETIRDPRGFATKFYTREGNFDIVGNNFPVFFTRDAMAFPDVIHAFKPNPKSHIQEDWRILDFLSHHPESLNTMTFWLDDVGIPTDYRHMEGSSVNTLTLVNKEGKIHYVKFTWKPTCGVKCLMDDEAIKIGGANHSHATQDLYDSIQAGNFPEWKLFLQVIDPDHEDRLDFDPLDGTMTWPEDVIPLQPVGRMVLNKNIDNFFAENEQLAFNPGLVVPGIYYSDDKMLQGRIFAYSDTQRHRLGPNYLQLPVNAPKCAHHNNHYDGHMNFMHRDEEVDYFPSRYDRVQHAQKYPINPARVTGTRDRTVIPKYNDFKQPGERYRSWDPARQERFIVRMCKMLSDPRVTHELRSIWISYWTQADKSLGQKIASRLNVRPNY

SEQ ID NO: 43021 - DNA, 1479 bp, Helianthus annuus
  CDS (1)..(1479)
atggatccctacaagcaacgcccttcaagtgcttacaacgcccctttctggactacaaatgcgggtttaccggtttacaacaacactgcatcattgactgttggaaatcgaggtccaattctccttgaggactatcatttgattgagaaacttgccaacttcactcgcgagcggatccccgaacgtatcgttcatgcgaggggtgcgagcgcaaaggggttcttcgaggtcacacacgacatcactcatctcacctgcgctgacttcctccgcgcccctggagttcaaactcctaccattgttcgtttctcgactgttatccatgaacgtggaagccccgaaaccatccgagatccccgaggatttgcaacaaagttctacaccagagagggtaactttgacatcgtgggaaacaatttccccgtgttctttacgcgcgacgcaatggcgttcccagacgtgatccacgcgtttaaaccaaacccgaagtcacacatccaagaagactggaggattcttgacttcttgtcacaccatccagagagcttgaacaccatgacattctggctcgatgatgtcggtatcccaaccgattaccgacacatggaaggctcgagtgtcaacactctcactttagttaacaaagaaggaaaaattcactatgtgaagttcacatggaagcccacatgtggagtcaaatgtttgatggacgacgaagcgatcaaaatcggaggcgcgaatcacagtcacgccactcaagatctttacgattcgatccaagctggtaacttccctgaatggaagctgtatctccaagtgattgaccctgatcatgaagataggcttgactttgacccgctcgatggcaccatgacctggcccgaggacatcatacctttgcagcccgttgggcgtatggtgttgaacaagaacattgacaacttctttgctgaaaatgaacagctagcgttcaacccgggtcttgttgttcctgggatttattactctgatgataagatgcttcaagggcgtattttcgcgtactctgatacccaaaggcaccgtctcggaccgaattacttgcagctccctgtcaatgcacctaagtgtgctcatcataataatcattatgatggaaacatgaacttcatgcacagagatgaggaggttgattacttcccttcgaggtatgatcgtgttcaacatgctaagcagtacccgatcaattcccgtcaagttactggaacccgtgacaggactgtgatcccaaaatacaacgatttcaagcagcccggagacagataccgatcatgggatccagccaggcaagaaagattcattgtccgaatgtgtaagatgttgtctgacccacgggtaacccacgaactccgcagtatttggatctcctactggacccaggccgaccagtctctggggcagaagatagcatcacgcctcaatgtgcgccccaattattga

SEQ ID NO: 43022 - protein, 492 aa, Helianthus annuus
MDPYKQRPSSAYNAPFWTTNAGLPVYNNTASLTVGNRGPILLEDYHLIEKLANFTRERIPERIVHARGASAKGFFEVTHDITHLTCADFLRAPGVQTPTIVRFSTVIHERGSPETIRDPRGFATKFYTREGNFDIVGNNFPVFFTRDAMAFPDVIHAFKPNPKSHIQEDWRILDFLSHHPESLNTMTFWLDDVGIPTDYRHMEGSSVNTLTLVNKEGKIHYVKFTWKPTCGVKCLMDDEAIKIGGANHSHATQDLYDSIQAGNFPEWKLYLQVIDPDHEDRLDFDPLDGTMTWPEDIIPLQPVGRMVLNKNIDNFFAENEQLAFNPGLVVPGIYYSDDKMLQGRIFAYSDTQRHRLGPNYLQLPVNAPKCAHHNNHYDGNMNFMHRDEEVDYFPSRYDRVQHAKQYPINSRQVTGTRDRTVIPKYNDFKQPGDRYRSWDPARQERFIVRMCKMLSDPRVTHELRSIWISYWTQADQSLGQKIASRLNVRPNY

SEQ ID NO: 43023 - DNA, 1479 bp, Helianthus annuus
  CDS (1)..(1479)
atggatccttacaagtaccgtccgtcaagcgcttacaatgccccgttttggaccactaattatggtgctccggtttacaacaacgactcctcattgacagttggcaccagaggcccaatccttctagaagattaccactttgtggagaaactagctaacttcgaccgtgaacgtatacccgaacgcgtggttcatgccagaggtgctagcgcaaagggctttttcgaagtcacacacgacatttctgccctcacatgtgccgattttcttcgcgcccctggtgtccaaacacctgttatcgtccgtttctctactgttattcacgagcgtggaagtcccgaaaccctcagagaccctagaggtttcgcagtcaaattctatacccgagagggaaacttcgatttggtgggaaacaacttccccgtgttctttgttcgcgacgggatgaagtttccggacatggttcattcactaaaaccgaatcctaagtcacacattcaagaagactggagaattctcgactttttctcgcaccatcccgagagtctacacatgttcacatttcttcaagacgacgttggcgtgccgcaagattaccgacacatggacggttctggtgtcaacacctacactctgattaacaaaaccgggaaaacacattacgtgaagtttcactggagaccgacatgcggagtaaaatgcttgttggaggacgaagccatcaaggttggtggaatgaatcacagccacgcaacaaaagatctttacgattctattgcggatgggaattatccggaatggaagcttttcattcagactatggatccggatcatgaggataggtttgactttgacccgcttgatgtgaccaagacctggcccgaggatatcttgcctttgcagcctgtgggtcgtatggttttgaacaagaacattgataacttctttgcggagaatgaacaactggcgttttgccctgcgatcattgtgcctgggatttattattcggatgataagctgcttcaaacgcgtatcttctcgtatgctgacacgcagaggcatcgtcttggaccgaactatttgcagcttcctgctaacgctcctaagtgtgctcatcataataatcatcatgatggattcatgaatttcatgcacagggatgaggaggtgatttacttcccttcaagatacgatcccgttcgtcatgctgagcagtcccctattcctcctgtaatgctgtcaggaaagcgcaataagtgtgtgatcgagaaagagaacaacttcaagcagccaggagagagatttagatcctgggatccagataggcaagaacgatttatccgcagaattgtcggtgctctgtctgatccgcgtgttacccacgaggtctgcacaatttgggtttcatactggtctcaggctgacaagtctcttgggcagaagatagcttcccgcttgaatgtgaagccaagttactaa

SEQ ID NO: 43024 - protein, 492 aa, Helianthus annuus
MDPYKYRPSSAYNAPFWTTNYGAPVYNNDSSLTVGTRGPILLEDYHFVEKLANFDRERIPERVVHARGASAKGFFEVTHDISALTCADFLRAPGVQTPVIVRFSTVIHERGSPETLRDPRGFAVKFYTREGNFDLVGNNFPVFFVRDGMKFPDMVHSLKPNPKSHIQEDWRILDFFSHHPESLHMFTFLQDDVGVPQDYRHMDGSGVNTYTLINKTGKTHYVKFHWRPTCGVKCLLEDEAIKVGGMNHSHATKDLYDSIADGNYPEWKLFIQTMDPDHEDRFDFDPLDVTKTWPEDILPLQPVGRMVLNKNIDNFFAENEQLAFCPAIIVPGIYYSDDKLLQTRIFSYADTQRHRLGPNYLQLPANAPKCAHHNNHHDGFMNFMHRDEEVIYFPSRYDPVRHAEQSPIPPVMLSGKRNKCVIEKENNFKQPGERFRSWDPDRQERFIRRIVGALSDPRVTHEVCTIWVSYWSQADKSLGQKIASRLNVKPSY

SEQ ID NO: 43025 - DNA, 2109 bp, Xanthomonas campestris
  CDS (1)..(2109): transl_table=11
atggccaagtcccccagcaaatccgcgcaggtccctgcccttgcacctgtcagcgccaccgtcgatggggcgcgcggtactggcgatgagttgcaccagaaggcaggcggcacgcacccgcaactgaccaccaaccagggcattccggtcggtgacaaccagaactcgctccgcgccacgccgcgcggcccgacgttgctggaagatttcatcctgcgcgaaaagatcacccacttcgatcacgaacgcattcccgaacgcatcgtgcatgcgcgcggcagtgccgcgcacggctacttcgaactcaccaagtcgttgagccagtacaccaccgccaagatctttaccgaggttggcgaaaaaactccgttgtttacgcgtttttccactgtcgcaggtggcgccggctcggtggatacgccgcgcgatgtgcgcggcttcgcggtgaagttctacaccaaggaaggcaattgggatctggtcggcaacaacatcccggtgttcttcatccaggatgcgatgaaattcccggacctgattcatgcggtgaagatggagccggaccgtggtttcccccaggctgccagcgcgcacgacacgttctgggatttcatttcgctgacacccgaatcgatgcacatggtgatgtgggcgatgagcgaccgcaccatcccgcgctcgctacgcatgatcgaagggttcggcatccacagcttccggttcctcaatgacaagggcgaaagcaccttcgtcaagttccattggcgccccaagctgggcctgcaatcgaccatctgggacgaggcggtcaagatcgccggcgccgatcaggatttccaccgccgcgacctgttcgaagcgatccagaacggcgatttccccgaatgggaactcggcgtgcaattgttcaccgaagcgcaggcagcaacgttcccgttcgatcatctggattcgaccaaggtcattcccgaggagctggtgccgttgcagatcgtcggccgcatggtgctcgaccgctggccggacaacttctttgccgaaaccgagcaggttgcctactgcccggccaacatcgtgcccggcatcgacttcagcaacgacccgctgctgcaaggccgcctgttctcctatctggatacgcagctgagccgtctgggcgggccgaatttccatcagattccggtcaacgcgccaaagtgcccgttcgccaacaaccagcgcgatggtcacatgcagatgggcgtgcccaagggccgcgttgcctatgagcccagctcgctgcaggccgatgcgccgcgtgaagcgctgcgtggtttccccagccacgcaactcctgccgaagaaggtgccaagggccgcgtgcgcgcagaaagcttcgccgatcactacagccaggcgcgcctgttcttccgcagccagaccgcaccggaacaggcgcatatcgcctcggcattggtgttcgaactgtcgaaggtggagaccgctcacgtgcgcgaggccatcgtgggtcatctgcgccacatcgaccaggaactggcgcagcgtgtggccgatggcatgggcatgacggccctgccgccagcccccccggcggcagtggcgccgatcgacatgccgctctcgcctgccttgcaggtcatcggcaagatgaaggacaccttgaaagggcgcacggtgggcatcctgatccacgacggctcggacgcagcagcgatcaaggcagtccgcaaggcggccgaagctgcaggcgcgacggtcaagatcgttgcgcccaaactcggcggcgccaagcttagcgacggcaagcagcttgccgccgatgggcaactggcgggcacgccctcggtggtcttcgatgcggtggcggtgctgctgtcctcggaagcggccaagctgctgacacgcgaatcggcggcactgaattttgtgagctttgcctgggcgcatctgaaggccatcgcattcgacgaaggcgcgcaggtgttgttgaaggccggcaacgtgggcaaggatgcgggcgtcgttcccgctgccgataccaaggcattcatcaccgcagcaaaaacccgccaatgggcacgcgagccgaaggtgcgcatgctggcgtaa

SEQ ID NO: 43026 - protein, 702 aa, Xanthomonas campestris
MAKSPSKSAQVPALAPVSATVDGARGTGDELHQKAGGTHPQLTTNQGIPVGDNQNSLRATPRGPTLLEDFILREKITHFDHERIPERIVHARGSAAHGYFELTKSLSQYTTAKIFTEVGEKTPLFTRFSTVAGGAGSVDTPRDVRGFAVKFYTKEGNWDLVGNNIPVFFIQDAMKFPDLIHAVKMEPDRGFPQAASAHDTFWDFISLTPESMHMVMWAMSDRTIPRSLRMIEGFGIHSFRFLNDKGESTFVKFHWRPKLGLQSTIWDEAVKIAGADQDFHRRDLFEAIQNGDFPEWELGVQLFTEAQAATFPFDHLDSTKVIPEELVPLQIVGRMVLDRWPDNFFAETEQVAYCPANIVPGIDFSNDPLLQGRLFSYLDTQLSRLGGPNFHQIPVNAPKCPFANNQRDGHMQMGVPKGRVAYEPSSLQADAPREALRGFPSHATPAEEGAKGRVRAESFADHYSQARLFFRSQTAPEQAHIASALVFELSKVETAHVREAIVGHLRHIDQELAQRVADGMGMTALPPAPPAAVAPIDMPLSPALQVIGKMKDTLKGRTVGILIHDGSDAAAIKAVRKAAEAAGATVKIVAPKLGGAKLSDGKQLAADGQLAGTPSVVFDAVAVLLSSEAAKLLTRESAALNFVSFAWAHLKAIAFDEGAQVLLKAGNVGKDAGVVPAADTKAFITAAKTRQWAREPKVRMLA

SEQ ID NO: 43027 - DNA, 1455 bp, Actinobacillus actinomycetemcomitans
  CDS (1)..(1455): transl_table=11
atgtcagcaaaatgccctttcgatcataactctgccacattgactaccgctgccggcgcgccggtggtggataatgacaacaccatgagtgccggcccccgcggcccgttactgttacaagatgtttggtatcaagaaaaactagcccactttgcccgcgagcgcattcctgagcgtgtggtgcacgccaagggttccgccgcattcggtacattcaccgtcactcacgacatcacccaatacaccaaagctgcgctgttcagcgaagtgggcaaacaaacggaagtgctgttgcgcttttccaccgttgccggcgaacgcggtgctgccgacgcggaacgtgatgtacgcggtttttcgttgaaattctacaccgaacaaggcaactgggacttagtgggcaataacacgccggtgttcttcatccgtgacccgctcaaattcccggatttcattcacactcaaaaacgcaacccgcaaaccaacttacgcgacgctaccgccgcatgggatttctggtcgcgtcatcctgaatccatgcaccaaattatgattctgttcagcgatcgtggtattccggcaagcctgcgcaatatgaacggttacggcagccacacttacagctttatcaatgcggacaacgaacgcttttgggtgaaatttcacttcaaaacccaacaaggtcataaatttttaaccaacgcagaagcggcgaaggtggtgggtgaagatcgtgaatccagccaacgtgatttatatgatgccattgccaacggcaatttcccccgttggaacgtgcgaattcaaatcatgccggaagccgatgcagaaaaacacaattacagttttgacttaaccaaagtatggccgcacaaagattatccgttgattgatgtaggcgtattggaactgaatcgcaatccgcaaaactattttgctgaagtggaacaagccgccttcgcgccgaacaacaacgtgcccggcatcggcttctcgcccgatcgtatgttgcagggtcgtttattctcttatcaagatgcacaacgctaccgcttgggcgtaaaccaccaccaaattccggtgaatgcaccaaaatgcccgtatcacaccacccaccgtgacggtgcaatgcgcgtagatcacaacggcggcacacacccgaactatgctccaaaccgctttgacacctatgtgccaacccacgatcaaggtccgtcattgcaactggaacgtgaaggcgcgcactttaatttccgtgattacgacgaagattactactcacaacctgccgcgctttacgccattatggacgccgcccaacgcgaccgcctcgccggcaacttcgccgccagcctggcagaagtcaccgacgatgccatcgtggaacaccagttggtacactttgaacgcgttaatacggaattggcaaacgccattcgcacaaaacttgcttga

SEQ ID NO: 43028 - protein, 484 aa, Actinobacillus actinomycetemcomitans
MSAKCPFDHNSATLTTAAGAPVVDNDNTMSAGPRGPLLLQDVWYQEKLAHFARERIPERVVHAKGSAAFGTFTVTHDITQYTKAALFSEVGKQTEVLLRFSTVAGERGAADAERDVRGFSLKFYTEQGNWDLVGNNTPVFFIRDPLKFPDFIHTQKRNPQTNLRDATAAWDFWSRHPESMHQIMILFSDRGIPASLRNMNGYGSHTYSFINADNERFWVKFHFKTQQGHKFLTNAEAAKVVGEDRESSQRDLYDAIANGNFPRWNVRIQIMPEADAEKHNYSFDLTKVWPHKDYPLIDVGVLELNRNPQNYFAEVEQAAFAPNNNVPGIGFSPDRMLQGRLFSYQDAQRYRLGVNHHQIPVNAPKCPYHTTHRDGAMRVDHNGGTHPNYAPNRFDTYVPTHDQGPSLQLEREGAHFNFRDYDEDYYSQPAALYAIMDAAQRDRLAGNFAASLAEVTDDAIVEHQLVHFERVNTELANAIRTKLA

SEQ ID NO: 43029 - DNA, 1479 bp, Oryza sativa
  CDS (1)..(1479)
atggatccctacaagcatcggccgtccagcgggagcaattccaccttctggaccaccaactccggcgcccccgtctggaacaacaactccgccctcaccgtcggagagcgaggccctatcctccttgaggactatcatctgattgaaaagcttgcacagtttgacagggagcgtatccctgaacgtgtcgttcatgcaaggggagccagtgccaagggattttttgaggttactcatgatatttctcacctcacatgtgctgattttctccgtgctcctggtgttcagaccccagttattgttcggttctccacagtcgtgcatgagcgtggaagccctgagacattgagggaaccacgtggttttgctgtcaagttttacactagagagggtaattttgatcttgttgggaacaatatgcctgtcttttttatccgagatgggatgaaattccctgacatggtccatgctttcaagccaagtccaaagaccaatatgcaggagaactggagaatagttgatttcttttcacaccacccagagagcctgcacatgttctccttcctctttgacgatgtaggcatcccactcaaccacaggcacatggagggttttggtgtcaacacctacaccctaatcaataaggatggaaagcctcaccttgtcaaattccactggaagcctacctgtggtgtcaaatgcctgttggatgatgaagctgtgactgttggcggcacctgccacagccatgccacgaaggacttgactgattctattgcagcagggaattacccagagtggaagctttacatccagactattgatcctgatcatgaggacagatttgacttcgatcctcttgatgtcaccaagacatggccagaggatatcatccccctgcagccagttggacggatggtcctgaacaaaaacattgataacttctttgcagaaaatgaacagcttgctttctgcccagcgataattgtccctggaatccattactctgatgataagctgctccagacaagaattttctcctatgctgatacccaaaggcaccgtcttggcccaaactatttgatgcttcctgtgaatgcaccaaaatgtgcataccacaacaaccaccacgatggctccatgaatttcatgcacagggatgaagaggttaactacttcccttcaaggtttgatgctgcacgtcatgctgagaaggtccctattcctcctcgtgttctaacaggctgtcgggaaaagtgtgtcattgacaaggagaacaatttccaacaggctggtgagagataccggtcatttgaccctgccaggcaagatcgttttctccagcggtgggttgatgctctctcagatcctcgtattacacatgaactccgtggcatctggatctcctactggtcgcagtgtgatgcgtcccttgggcagaagctggcttcacgtctcaacctgaaaccaaacatgtag

SEQ ID NO: 43030 - protein, 492 aa, Oryza sativa
MDPYKHRPSSGSNSTFWTTNSGAPVWNNNSALTVGERGPILLEDYHLIEKLAQFDRERIPERVVHARGASAKGFFEVTHDISHLTCADFLRAPGVQTPVIVRFSTVVHERGSPETLREPRGFAVKFYTREGNFDLVGNNMPVFFIRDGMKFPDMVHAFKPSPKTNMQENWRIVDFFSHHPESLHMFSFLFDDVGIPLNHRHMEGFGVNTYTLINKDGKPHLVKFHWKPTCGVKCLLDDEAVTVGGTCHSHATKDLTDSIAAGNYPEWKLYIQTIDPDHEDRFDFDPLDVTKTWPEDIIPLQPVGRMVLNKNIDNFFAENEQLAFCPAIIVPGIHYSDDKLLQTRIFSYADTQRHRLGPNYLMLPVNAPKCAYHNNHHDGSMNFMHRDEEVNYFPSRFDAARHAEKVPIPPRVLTGCREKCVIDKENNFQQAGERYRSFDPARQDRFLQRWVDALSDPRITHELRGIWISYWSQCDASLGQKLASRLNLKPNM

SEQ ID NO: 43031 - DNA, 1479 bp, Zantedeschia aethiopica
  CDS (1)..(1479)
atggatccctataggcaacgcccctcgagcgcgttcaactcgcccttctggaccaccaactccggggcgcccgtctggaacaacaacaattcgctcactgttggagccaggggacctatactccttgaggattaccatttgcttgaaaagcttgcacagtttgatagggagcgaattcctgaacgtgttgttcatgccaggggtgctagtgccaagggcttctttgaggttacccatgatgtttctcatcttacttgtgctgattttctgcgggcaccaggtgtccagacgcctgtgattgttcgtttttcgactgttattcacgagagggggagccctgagactttgagagacccaagaggttttgctgtgaagttctacactagagagggtaactttgatcttgtggggaataatttcccagtgttttttatccgtgatggcattaaattccctgacatggtccacgcattgaagccaaacccgaaaacacacatccaagagaactggaggatccttgactttttctctcaccacccagagagtctgcatatgtttacatttctctttgatgacattggtattcctacagactataggcatatggatggttcaggtgtgcacacctacacacttgtcagcaaggaagggaaagcccattatgttaagttccactggaaacccacatgtggagtgaaatctctgttggatgatgaggctgttgtggttggaggtgccaatcatagtcatgccaccaaggatcttactgatgccattgctgctggtaactaccctgagtggaagctctatattcagataatggatccggatcatgaggacaggttcgattttgacccacttgatgtcaccaagacatggcctgaagatatcttgcctctccagccagttggacgcatggtcttgaacaagaatatcgataacttctttgcagagaatgaacagctagctttttgcccagcaatcattgtgcctggaatctattattcagacgataagttgctacagactaggatcttctcctatgctgatactcagagacaccgcctggggccaaactacttgatgctcccagcaaatgcaccaaaatgtgctcaccacaacaaccaccatgagggttttatgaatttcatgcacagggatgaggaggtaaattacttcccttcaagatatgatcctgtccgacatgctgaacagttccccattcctccccgtattcttaatggaggacgtgagaagtgttgcattcaaaaggaaaacaacttcaaacagcctggagagaagtaccggtcctgggcccctgacaggcaagagcgtttcattaagcgctggatcgatgcactctctgatcccagggtcacccatgaaatccgcaccatttggattacatactggtcacagtgcgacaagtttcttggccagaagctggccagtcgccttaacatcaagcccactttgtga

SEQ ID NO: 43032 - protein, 492 aa, Zantedeschia aethiopica
MDPYRQRPSSAFNSPFWTTNSGAPVWNNNNSLTVGARGPILLEDYHLLEKLAQFDRERIPERVVHARGASAKGFFEVTHDVSHLTCADFLRAPGVQTPVIVRFSTVIHERGSPETLRDPRGFAVKFYTREGNFDLVGNNFPVFFIRDGIKFPDMVHALKPNPKTHIQENWRILDFFSHHPESLHMFTFLFDDIGIPTDYRHMDGSGVHTYTLVSKEGKAHYVKFHWKPTCGVKSLLDDEAVVVGGANHSHATKDLTDAIAAGNYPEWKLYIQIMDPDHEDRFDFDPLDVTKTWPEDILPLQPVGRMVLNKNIDNFFAENEQLAFCPAIIVPGIYYSDDKLLQTRIFSYADTQRHRLGPNYLMLPANAPKCAHHNNHHEGFMNFMHRDEEVNYFPSRYDPVRHAEQFPIPPRILNGGREKCCIQKENNFKQPGEKYRSWAPDRQERFIKRWIDALSDPRVTHEIRTIWITYWSQCDKFLGQKLASRLNIKPTL

SEQ ID NO: 43033 - DNA, 1479 bp, Manihot esculenta
  CDS (1)..(1479)
atggatccttgcaagttccgtccatcaagctcaaacaatacccccttctggaccaccgatgctggtgctccagtatggaacaacaattcctccatgactgttggaaccagaggtccaatccttttggaggactatcatatgatagagaaacttgccaactttaccagagagaggattccagagcgtgtcgtccatgctaggggaatgagtgcaaagggcttctttgaagtcacccacgatgtctctcaccttacttgtgctgatttccttcgagcccctggagttcaaacccctgtcatcgtccgtttctccactgttatccacgagcgtggcagccctgaaacactcagggatcctcgaggttttgcgactaagttctacaccagagagggcaactttgatattgtgggaaacaacttccctgtcttcttcatccgtgatggaataaaattcccagatgtgatacacgcttttaagcccaatcccaagtctcacatccaagaatactggaggatctttgacttcttatcacaccatcctgagagcttgagcaccttcgcctggttcttcgatgatgttggaattccccaagattacagacacatggaaggtttcggtgttcacacctttactttcatcaacaaggctggaaaagtaacctacgtgaaatttcactggaaacccacttgcggggtcaagtgtttgatggatgatgaggcacttaagatcggaggtgccaaccacagccatgctacgcaggatttatacgactccattgccgctggcaactatcctgagtggagactcttcatccagacaatggatccagctgatgaagacaaattcgactttgatccacttgatatgaccaagatctggcctgaggatatttttcctctacagcaaattggccgtttggtcttgaacaggaacatcgataactggtttgctgagaatgaaatgctcgcattcgaccctggtcatattgttcctggcattcactattcaaacgacaagttgtttcagctcagaacctttgcatatgctgacactcagaggcaccgtctcggacccaactataagatgctccctgttaatgctcccaagtgtgcttatcacaacaatcattacgatggtttcatgaatttcatgcacagggatgaggaggtggattacttcccatccaggtatgatccagttcgccatgctgagagaagccccattcctaacgctatctgtagtggaaggcgtgaaaagtgcgtcattgaaaaggagaacaatttcaagcaacctggagagagatatcgatcctgggcacctgatagacaagaaagattcctgtgcagattggttaacgccttatcagagccacgtatcacctttgagattcgcagtatctgggtctcttactggtctaagtgcgacgcgtctctgggtcaaaagctggcttctcgtctcaacgtgaggccaaatatatga

SEQ ID NO: 43034 - protein, 492 aa, Manihot esculenta
MDPCKFRPSSSNNTPFWTTDAGAPVWNNNSSMTVGTRGPILLEDYHMIEKLANFTRERIPERVVHARGMSAKGFFEVTHDVSHLTCADFLRAPGVQTPVIVRFSTVIHERGSPETLRDPRGFATKFYTREGNFDIVGNNFPVFFIRDGIKFPDVIHAFKPNPKSHIQEYWRIFDFLSHHPESLSTFAWFFDDVGIPQDYRHMEGFGVHTFTFINKAGKVTYVKFHWKPTCGVKCLMDDEALKIGGANHSHATQDLYDSIAAGNYPEWRLFIQTMDPADEDKFDFDPLDMTKIWPEDIFPLQQIGRLVLNRNIDNWFAENEMLAFDPGHIVPGIHYSNDKLFQLRTFAYADTQRHRLGPNYKMLPVNAPKCAYHNNHYDGFMNFMHRDEEVDYFPSRYDPVRHAERSPIPNAICSGRREKCVIEKENNFKQPGERYRSWAPDRQERFLCRLVNALSEPRITFEIRSIWVSYWSKCDASLGQKLASRLNVRPNI

SEQ ID NO: 43035 - DNA, 1479 bp, Brassica juncea
  CDS (1)..(1479)
atggatccttacaagtatcggccggcgagttcttacaactctccattcttcaccaccaactctggtgctcctgtatggaacaacaactcctccatgaccgttggacccagaggtcctatccttcttgaggattaccatctcgtcgagaagcttgccaacttcgacagggagcgtattccagaacgtgtggttcacgcaagaggagccagtgcaaagggtttcttcgaggtcacgcatgatatatccaacctaacgtgtgcagacttccttagagctccaggtgtacagacaccggtcattgtccgtttctccaccgttatccatgaacgtggaagtcccgagaccttgagagaccctcgtggcttcgcagtcaagttctacaccagagaagggaactttgatcttgtcggaaacaacttccctgtcttcttcataagggacgggatgaagttccctgacatggtccacgctcttaaaccaaaccctaaatctcacatccaagaaaactggagagtccttgacttcttctcacaccaccctgagagcttgaacatgttcactttcctctttgacgacatcggtatcccgcaagattacagacacatggaaggctcaggtgtgaacacctacatgctcatcaacaaatccggcaaagctcactacgtgaagttccactggaaaccaacatgtggagtaaagtctcttttagaagaagatgcagtccgtgtaggaggaaccaaccacagtcacgccacacaggacttgtatgactccattgctgctggaaactaccctgagtggaagctctttatccaggtcattgatccagctgacgaagacaagttcgactttgacccactcgatgtcaccaagacctggcctgagaatcttttgcctctccaacccgttggtcgtatggtgttgaacaagaacattgacaacttctttgcggagaatgagcagcttgccttttgccctgctatcattgttcctgggatacattactcggacgacaagctgcttcagacgcgtgtcttctcttatgctgacactcagagacaccgccttggaccgaactaccttcagctgccagttaatgcacccaaatgtgctcatcacaacaatcaccatgaggggttcatgaacttcatgcacagggacgaggaggtcaactacttcccatcgaggtatgatcctgttcgtcatgctgagaagtatccaactccacctgctgtctgctctgggaaacgtgagagatgtgttattgagaaagagaacaacttcaaggagcctggagagagataccgttcctttacaccagagaggcaagaacgtttcatccgtagatggattgaagccttatctgacccccgcatcacacatgaaatccgcagcatctggatctcttactggtctcaggctgacaaaactctgggacagaagcttgcaagccgtctgaacgtgagaccaagcatctaa

SEQ ID NO: 43036 - protein, 492 aa, Brassica juncea
MDPYKYRPASSYNSPFFTTNSGAPVWNNNSSMTVGPRGPILLEDYHLVEKLANFDRERIPERVVHARGASAKGFFEVTHDISNLTCADFLRAPGVQTPVIVRFSTVIHERGSPETLRDPRGFAVKFYTREGNFDLVGNNFPVFFIRDGMKFPDMVHALKPNPKSHIQENWRVLDFFSHHPESLNMFTFLFDDIGIPQDYRHMEGSGVNTYMLINKSGKAHYVKFHWKPTCGVKSLLEEDAVRVGGTNHSHATQDLYDSIAAGNYPEWKLFIQVIDPADEDKFDFDPLDVTKTWPENLLPLQPVGRMVLNKNIDNFFAENEQLAFCPAIIVPGIHYSDDKLLQTRVFSYADTQRHRLGPNYLQLPVNAPKCAHHNNHHEGFMNFMHRDEEVNYFPSRYDPVRHAEKYPTPPAVCSGKRERCVIEKENNFKEPGERYRSFTPERQERFIRRWIEALSDPRITHEIRSIWISYWSQADKTLGQKLASRLNVRPSI

SEQ ID NO: 43037 - DNA, 2250 bp, Ajellomyces capsulata
  CDS (1)..(2250)
atgactagcaaggttgaagaagggctccagagggtcaaggagctggtggaaaatatgcagccaggagagcaaaaggtcgcagacctcgcccgcgatactacagacgtcaacggatgcctccccttcaccactgaccatggagtcaaagttagcaatacggacttttggcttcgacttgcatccgaaaatcaaaccggcccattgcttttggaggatcagattgctcgtgaaaagatccatcgatttgaccatgaaagaatcccagaacgtgttgtccatgcacgaggaacaggtgcttttgggcacttcaagctcttcgagagcgcggcagacgtgacgtccgctggtgttctaactgacacgtcccgaactactccggtgttcgttcggttttccaccgtccagggcagcaaaggcagtttcgatacagtccgtgatgtcagaggtttcgctaccaaattctatacggaagaaggcaactgggatcttgttggcaataacattcctgtattcttcattcaagatgctgtgaaattcccagattttgttcatgctgtgaagccggaacctcataacgaagttccccagggacaaacagcacataacaacttctgggactttgtatatatgcatcctgaggcgacgcatatgttcatgtgggctatgtcggacagggctattccgcgatcatatcggatgatgcaaggatttggtgttaatacttttgttttggtgaataaacaagggaaaagacatttcgttaagtttcactggatgccggaacttggggttcattcgctggtccccgatgaatcattcaaacttggtggccaggacccagacttccaccgtaaagatctaatggaggcaatcgacaataaggtgtacccgaaatggaagtttggaattcaggttcttcctgaagaaaaagagcacgattttgattttgatatacttgatccaactaagatatggccagagagcctaatacctgttcggtatattggagagatggagctcaaccgcaacgtcgatgagtttttcccacagacagaacaggttgccttctgtaccgcccacattgttcctggaattgaattctccggcgatcctctgctccagggacgcaatttctcctattttgacactcaaattacccgccttggcgtcaactgggaggagctcccgatcaatcgtcctgtgtgccctgttatgaatcacaacagggatggtgcaatgcgccataagataacccaaggaaccgtaaactattggccgaaccgtttcgaggcttgcccacccacgaagcccgaggatgggggttttgtcacttaccctcaaaaggtagagcagagtatcaaagcgaggatgcttagtagcaagttccgcgagcatatcaaccaagcgcaattattctataactctctctccgaatacgaaaagctccatgtcaataatgctttttgctttgagttggatcactgcgatgaccccattgtctacaatagacttgtgtctcggatttctgaaatcgaccatgccctcgcccaagccgttgcagtgaaagtcggcgcaccgaccccaccaaggcctgggagagacaacccaggtcaaacaaccattaacctaagccaaaaatacatcaacgaccgtcagctgtcctctcccacaattaaaggtcggaggatcgccatattgattggggatggttacgattccgtcgcctttggcacggtcatagccgcggtgagcgccatgggcgcgctacccttcataatcggcacgaagcggcaacccatctttgccgacgacgaagacaggaatcactccaagggtgtgactccaaaccacaactataccagccaacgctccacttgtttcgacgctactttcatccctggtggctcacatatcaaggaattgagccagctgggccttatccagcactgggttgccgagcagttcggacactgcaaggcaattggcgctacaggagaggccatcaatctaatcgtgcaggctctgagcaacctgcctgatttggaggtcgcatccgcctcgtcagggcatccagtcgattggtacggcgttgtcacgtcgagtaagctgcatgagccccatagtttgaccgaagggatcaagctgtttcccgaggcgagtgacttcttgggcaagctcttttatcagatctcccagcatcggaattatgagcgggagatggctgggttgacggacaaggttccattttaa

SEQ ID NO: 43038 - protein, 749 aa, Ajellomyces capsulata
MTSKVEEGLQRVKELVENMQPGEQKVADLARDTTDVNGCLPFTTDHGVKVSNTDFWLRLASENQTGPLLLEDQIAREKIHRFDHERIPERVVHARGTGAFGHFKLFESAADVTSAGVLTDTSRTTPVFVRFSTVQGSKGSFDTVRDVRGFATKFYTEEGNWDLVGNNIPVFFIQDAVKFPDFVHAVKPEPHNEVPQGQTAHNNFWDFVYMHPEATHMFMWAMSDRAIPRSYRMMQGFGVNTFVLVNKQGKRHFVKFHWMPELGVHSLVPDESFKLGGQDPDFHRKDLMEAIDNKVYPKWKFGIQVLPEEKEHDFDFDILDPTKIWPESLIPVRYIGEMELNRNVDEFFPQTEQVAFCTAHIVPGIEFSGDPLLQGRNFSYFDTQITRLGVNWEELPINRPVCPVMNHNRDGAMRHKITQGTVNYWPNRFEACPPTKPEDGGFVTYPQKVEQSIKARMLSSKFREHINQAQLFYNSLSEYEKLHVNNAFCFELDHCDDPIVYNRLVSRISEIDHALAQAVAVKVGAPTPPRPGRDNPGQTTINLSQKYINDRQLSSPTIKGRRIAILIGDGYDSVAFGTVIAAVSAMGALPFIIGTKRQPIFADDEDRNHSKGVTPNHNYTSQRSTCFDATFIPGGSHIKELSQLGLIQHWVAEQFGHCKAIGATGEAINLIVQALSNLPDLEVASASSGHPVDWYGVVTSSKLHEPHSLTEGIKLFPEASDFLGKLFYQISQHRNYEREMAGLTDKVPF

SEQ ID NO: 43039 - DNA, 1479 bp, Raphanus sativus
  CDS (1)..(1479)
atggatccttacaagtatcgtccatcgagcgcgtacaacgctccgttctacacgacaaacggtggtgctccagtctccaacaacatctcctccctcaccatcggagaaagaggtccggttcttcttgaggactaccatttgatcgagaaggttgctaacttcacgagggagaggattcctgagagagtggttcacgccagaggaatcagtgctaagggtttctttgaggtcacccatgacatctccaacctcacctgtgctgatttcctcagagcccctggtgttcaaactcccgtcatcgtccgtttctccaccgtcgttcacgagcgtgccagccctgaaaccatgagagacattcgtggcttcgccgttaagttctacaccagagaggggaactttgatcttgttggtaacaacactcctgtcttcttcatccgtgacgggattcagttccctgatgttgtccacgccctgaagccgaacccgaaaacaaacatccaggagtactggaggatactggactacatgtcccacttaccagagagtttgctcacatggtgctggatgtttgatgacgttggtatcccacaagactataggcacatggaaggtttcggtgtccacacctacactctcgtttccaaatccggaaaagttctcttcgtcaagttccactggaaacctacttgcgggatcaagaatctcactgatgaagaggctaaggtggttggaggagccaatcacagccacgcgactaaggatctccatgatgctatttcgtctggtaactaccctgagtggaagcttttcatccagacaatggatcctgcggatgaggataagttcgatttcgacccgcttgatgtgaccaagatctggcctgaggatatcttgcctttgcagccggttggtcgcttggttctcaacaggaccattgacaacttctttaatgagactgagcagctcgcttttaaccctggtcttgtggttcctgggatctactactcagatgataagctgctccagtgtaggatctttgcgtatggtgacactcagagacatcgtcttggaccaaactacttgcagctgccggttaatgctccaaaatgtgctcaccacaacaatcaccatgaaggtttcatgaacttcatgcacagagatgaggagatcaattactacccatcaaagtttgaccccgtccgttgcgcagagaaggttcctatccctaacaaatcctacactggaatcagaacaaagtgtatcatcaagaaggagaacaacttcaaacaggctggagacagatacagatcctgggcaccagacaggcaagacaggtttgtgaagagatgggttgagatcctgtcagagcctcggctgactcatgagattcgcagcatctggatatcttactggtctcaggctgatgcgtcactgggacagaaacttgcaagccgtctgaacgtgaggccaagcatctag

SEQ ID NO: 43040 - protein, 492 aa, Raphanus sativus
MDPYKYRPSSAYNAPFYTTNGGAPVSNNISSLTIGERGPVLLEDYHLIEKVANFTRERIPERVVHARGISAKGFFEVTHDISNLTCADFLRAPGVQTPVIVRFSTVVHERASPETMRDIRGFAVKFYTREGNFDLVGNNTPVFFIRDGIQFPDVVHALKPNPKTNIQEYWRILDYMSHLPESLLTWCWMFDDVGIPQDYRHMEGFGVHTYTLVSKSGKVLFVKFHWKPTCGIKNLTDEEAKVVGGANHSHATKDLHDAISSGNYPEWKLFIQTMDPADEDKFDFDPLDVTKIWPEDILPLQPVGRLVLNRTIDNFFNETEQLAFNPGLVVPGIYYSDDKLLQCRIFAYGDTQRHRLGPNYLQLPVNAPKCAHHNNHHEGFMNFMHRDEEINYYPSKFDPVRCAEKVPIPNKSYTGIRTKCIIKKENNFKQAGDRYRSWAPDRQDRFVKRWVEILSEPRLTHEIRSIWISYWSQADASLGQKLASRLNVRPSI

SEQ ID NO: 43041 - DNA, 1479 bp, Brassica juncea
  CDS (1)..(1479)
atggacccttacaagtatcgtccagcgagttcttacaactctcctttcttcaccaccaactttggtgctcctgtatggaacaacaactcctccatgaccgttggacccagaggtcccatccttcttgaggactaccatctcgttgagaagcttgctaactttgacagggagcgtattccagagcgtgtggttcacgctagaggagccagtgcaaagggtttctttgaggtcactcatgatatatctaacctcacttgtgctgacttcctcagagctccaggtgttcagactccagtcattgttcgtttctccactgtcatccatgagcgtggaagccccgaaaccttgagagaccctcgtggctttgcagtcaagttctacaccagagaggggaactttgatcttgtcggaaacaacttccctgtcttcttcatccgcgacggtatgaagttccctgacatggtccacgctctcaaaccaaacccaaaatcacacatccaagagaactggagagtccttgacttcttctcccaccaccctgagagcttaaacatgttcactttcctcttcgatgacatcggtatcccacaagactacagacacatggaaggctcaggtgtcaacacatacatgttgatcaacaaatccggcaaagctcactacgtcaagttccactggaaaccaacttgtggagtcaagtctttactagaagaagatgcaatccgcgttggtggaaccaaccacagtcacgccactcaggacttgtacgactccatcgctgctggtaactaccctgagtggaagctctttgttcagataatcgatccggcggatgaggacaggttcgactttgaccctctcgatgtcaccaagacctggcctgaggatatcttgcctctccagcccgttgggcgtatggtgttgaacaagaacattgataacttctttgcggagaacgagcagcttgctttctgccctgcgatcattgttccggggatacactactctgacgataagctgcttcaaacacgtgtcttctcctatgctgatactcagagacaccgtcttggacctaactatctgcagctaccggttaatgctccaaaatgtgctcaccacaacaaccaccatgaaggattcatgaatttcatgcacagggacgaggaggttaactacttcccttcgaggtatgacccggttcgccatgctgagaagtatccaactccaccagcaatctgctctggaaaacgtgagaggtgtattattgagaaggagaacaacttcaaggagcctggagagagataccgttcattcacaccagagaggcaagaacgtttcatcggtcgatggattgatgctctatcagaccctcgcatcacacatgaaatccgcagcatctggatatcttactggtctcaggctgataagtcactgggacagaagctggcaaaccgtctgaacgtgagaccaagcatctaa

SEQ ID NO: 43042 - protein, 492 aa, Brassica juncea
MDPYKYRPASSYNSPFFTTNFGAPVWNNNSSMTVGPRGPILLEDYHLVEKLANFDRERIPERVVHARGASAKGFFEVTHDISNLTCADFLRAPGVQTPVIVRFSTVIHERGSPETLRDPRGFAVKFYTREGNFDLVGNNFPVFFIRDGMKFPDMVHALKPNPKSHIQENWRVLDFFSHHPESLNMFTFLFDDIGIPQDYRHMEGSGVNTYMLINKSGKAHYVKFHWKPTCGVKSLLEEDAIRVGGTNHSHATQDLYDSIAAGNYPEWKLFVQIIDPADEDRFDFDPLDVTKTWPEDILPLQPVGRMVLNKNIDNFFAENEQLAFCPAIIVPGIHYSDDKLLQTRVFSYADTQRHRLGPNYLQLPVNAPKCAHHNNHHEGFMNFMHRDEEVNYFPSRYDPVRHAEKYPTPPAICSGKRERCIIEKENNFKEPGERYRSFTPERQERFIGRWIDALSDPRITHEIRSIWISYWSQADKSLGQKLANRLNVRPSI

SEQ ID NO: 43043 - DNA, 1479 bp, Brassica juncea
  CDS (1)..(1479)
atggatccctacaagtatcgtccagcgagttcttacaactctccgttcttcaccaccaactctggtgctcctgtatggaacaacaactcctccatgaccgttggacccagaggtcctatccttcttgaggactaccatctcgttgagaagcttgctaacttcgacagggagcgtattccagagcgcgtggttcacgcaagaggagccagtgcaaagggtttcttcgaggtcactcatgatatatctaacctcacttgtgctgacttcctcagagctccaggtgttcagactccggtcattgtgcgtttctccactgtcatccatgagcgtggaagtcccgagaccttgagagaccctcgtggcttcgcagtcaagttctacaccagagagggaaactttgatcttgtcggaaacaacttccctgtcttcttcatccgcgacgggatgaagttccctgacatggtccacgctctcaaaccaaaccccaaatctcacatccaagagaactggagagtccttgacttcttctcccaccaccctgaaagcctcaacatgttcactttcctcttcgacgacatcggtatcccacaagactacagacacatggaaggctcaggtgtcaacacatacatgttgatcaacaaagccggcaaagctcactacgtgaagttccactggaaaccaacttgtggagtgaagtctctactagaagaagatgcaatccgcgttggaggaaccaaccacagccacgcgactcaggacttatacgactccatcgccgctggtaactaccctgagtggaagctctttgttcagataatcgacccagctgatgaagacaagttcgactttgaccctctcgatgtcaccaagacttggcctgaagatatcttgcctctccagcccgttgggcgtatggtgttgaacaagaacattgataacttctttgcggagaatgagcagcttgccttctgtcctgctatcattgttccggggatacactactctgacgataagctgcttcagacacgtgtcttctcttatgctgacactcagagacaccgtcttggacctaactacctccagctaccagttaatgctccaaagtgtgctcaccacaacaaccaccatgaaggcttcatgaatttcatgcacagggacgaggaggttaactacttcccttcgaggtatgacccggttcgccatgcagagaagtatccaactccacctgctgtctgctctggaaagcgtgagaggtgtattattgagaaagagaacaacttcaaggagcctggagagagataccgttcctttacaccagagaggcaagaacgtttcatcggtcgatggattgatgctctatcagaccctcgcatcacacatgagatccgcagcatctggatctcttactggtctcaggctgataagtcactgggacagaagctggcgagccgtctgaacgtgagaccaaacatctaa

SEQ ID NO: 43044 - protein, 492 aa, Brassica juncea
MDPYKYRPASSYNSPFFTTNSGAPVWNNNSSMTVGPRGPILLEDYHLVEKLANFDRERIPERVVHARGASAKGFFEVTHDISNLTCADFLRAPGVQTPVIVRFSTVIHERGSPETLRDPRGFAVKFYTREGNFDLVGNNFPVFFIRDGMKFPDMVHALKPNPKSHIQENWRVLDFFSHHPESLNMFTFLFDDIGIPQDYRHMEGSGVNTYMLINKAGKAHYVKFHWKPTCGVKSLLEEDAIRVGGTNHSHATQDLYDSIAAGNYPEWKLFVQIIDPADEDKFDFDPLDVTKTWPEDILPLQPVGRMVLNKNIDNFFAENEQLAFCPAIIVPGIHYSDDKLLQTRVFSYADTQRHRLGPNYLQLPVNAPKCAHHNNHHEGFMNFMHRDEEVNYFPSRYDPVRHAEKYPTPPAVCSGKRERCIIEKENNFKEPGERYRSFTPERQERFIGRWIDALSDPRITHEIRSIWISYWSQADKSLGQKLASRLNVRPNI

SEQ ID NO: 43045 - DNA, 1491 bp, Brassica juncea
  CDS (1)..(1491)
atggatccttacaagtatcggccggcgagttcttacaactctccattcttcaccaccaactctggtgctcctgtatggaacaacaactcctccatgaccgttggacccagaggtcctatccttcttgaggattaccatctcgtcgagaagcttgccaacttcgacagggagcgtattccagaacgtgtggttcacgcaagaggagccagtgcaaagggtttcttcgaggtcacgcatgatatatccaacctaacgtgtgcagacttccttagagctccaggtgtacagacaccggtcattgtccgtttctccaccgttatccatgaacgtggaagtcccgagaccttgagagaccctcgtggcttcgcagtcaagttctacaccagagaagggaactttgatcttgtcggaaacaacttccctgtcttcttcataagggacgggatgaagttccctgacatggtccacgctcttaaaccaaaccctaaatctcacatccaagaaaactggagagtccttgacttcttctcacaccaccctgagagcttgaacatgttcactttcctctttgacgacatcggtatcccgcaagattacagacacatggaaggctcaggtgtgaacacctacatgctcatcaacaaatccggcaaagctcactacgtgaagttccactggaaaccaacatgtggagtaaagtctcttttagaagaagatgcagtccgtgtaggaggaaccaaccacagtcacgccacacaggacttgtatgactccattgctgctggaaactaccctgagtggaagctctttatccaggtcattgatccagctgacgaagacaagttcgactttgacccactcgatgtcaccaagacctggcctgagaatcttttgcctctccaacccgttggtcgtatggtgttgaacaagaacattgacaacttctttgcggagaatgagcagcttgccttttgccctgctatcattgttcctgggatacattactcggacgacaagctgcttcagacgcgtgtcttctcttatgctgacactcagagacaccgccttggaccgaactaccttcagctgccagttaatgcacccaaatgtgctcatcacaacaatcaccatgaggggttcatgaacttcatgcacagggacgaggaggtcaactacttcccatcgaggtatgatcctgttcgtcatgctgagaagtatccaactccacctgctgtctgctctgggaaacgtgagagatgtgttattgagaaagagaacaacttcaaggagcctggagagagataccgttcctttacaccagagagttttgacttcaggcaagaacgtttcatccgtagatggattgaagccttatctgacccccgcatcacacatgaaatccgcagcatctggatctcttactggtctcaggctgacaaaactctgggacagaagcttgcaagccgtctgaacgtgagaccaagcatctaa

SEQ ID NO: 43046 - protein, 496 aa, Brassica juncea
MDPYKYRPASSYNSPFFTTNSGAPVWNNNSSMTVGPRGPILLEDYHLVEKLANFDRERIPERVVHARGASAKGFFEVTHDISNLTCADFLRAPGVQTPVIVRFSTVIHERGSPETLRDPRGFAVKFYTREGNFDLVGNNFPVFFIRDGMKFPDMVHALKPNPKSHIQENWRVLDFFSHHPESLNMFTFLFDDIGIPQDYRHMEGSGVNTYMLINKSGKAHYVKFHWKPTCGVKSLLEEDAVRVGGTNHSHATQDLYDSIAAGNYPEWKLFIQVIDPADEDKFDFDPLDVTKTWPENLLPLQPVGRMVLNKNIDNFFAENEQLAFCPAIIVPGIHYSDDKLLQTRVFSYADTQRHRLGPNYLQLPVNAPKCAHHNNHHEGFMNFMHRDEEVNYFPSRYDPVRHAEKYPTPPAVCSGKRERCVIEKENNFKEPGERYRSFTPESFDFRQERFIRRWIEALSDPRITHEIRSIWISYWSQADKTLGQKLASRLNVRPSI

SEQ ID NO: 43047 - DNA, 1479 bp, Oryza sativa
  CDS (1)..(1479)
atggatccctacaagcaccgcccgtcgagctcgttcaacggcccgctgtggagcaccaactccggcgcccccgtatggaacaacaacaactcgctcaccgtcggctcccgaggcccgatccttctggaggactaccacctggttgagaagctggccaacttcgacagggagcgtatcccggagcgcgtggtgcacgcccgcggggccagcgccaagggcttcttcgaggtcacccacgacatcacccacctcacctgcgccgacttcctccgcgccccgggcgtccagaccccggtcatcgtccgcttctccaccgtcatccacgagcgcggcagcccggagaccctccgcgacccgcgtgtgttcgccatcaagttctacacccgggagggcaactgggacctcgtcggcaacaacttccccgtcttcttcatccgcgacggcatgaagttcccggacatggtgcactcgctcaagcccaaccccaagtcgcacgtccaggagaactggcgcatcctcgacttcttctcccaccacccggagagcctccacatgttcaccttcctcttcgatgacatcggcatccccgccgactaccgccacatggacggctccggcgtcaacacctacacgctcgtcaaccgcgccggcaagtcgcactacgtcaagttccactggaagcccacctgcggcgtcaagtcgctgctcgacgacgaggccgtcaccgtcggcgggaccaaccacagccacgccacgcaggacctctacgactccatcgccgccggcaacttcccggagtggaagctgttcatccagaccatcgaccccgaccacgaggaccgcttcgacttcgacccgctcgacgtcaccaagacgtggcccgaggacatcgtcccgctgcagcccgtggggaggatggtgctcaaccgcaacatcgacaacttcttctcggagaacgagcagctggcgttctgccccgggatcatcgtgccggggatctactactccgacgacaagctgctgcagacgaggatcttctcctactccgacacgcagcgccaccgcctcggaccaaactacctgctgcttccgcccaacgcgcccaagtgcgcccaccacaacaaccactacgacggcttcatgaacttcatgcaccgcgacgaggaggtcgactacttcccatcccgctacgatcctgccaagcacgccccccgctaccccatcccctccgccaccctcaccggccgccgcgagaaggtggtgattgccaaggagaacaacttcaagcagccaggggagaggtaccgttcatgggatccggcaaggcaagaccggttcatcaagagatggatcgacgcactctctgaccctcgcctcacccacgagatcaggagcatctggctctcctactggtctcaggctgacaggtctctgggtcagaaactggcgagccgtctcagcgcgaagccgagcatgtaa

SEQ ID NO: 43048 - protein, 492 aa, Oryza sativa
MDPYKHRPSSSFNGPLWSTNSGAPVWNNNNSLTVGSRGPILLEDYHLVEKLANFDRERIPERVVHARGASAKGFFEVTHDITHLTCADFLRAPGVQTPVIVRFSTVIHERGSPETLRDPRVFAIKFYTREGNWDLVGNNFPVFFIRDGMKFPDMVHSLKPNPKSHVQENWRILDFFSHHPESLHMFTFLFDDIGIPADYRHMDGSGVNTYTLVNRAGKSHYVKFHWKPTCGVKSLLDDEAVTVGGTNHSHATQDLYDSIAAGNFPEWKLFIQTIDPDHEDRFDFDPLDVTKTWPEDIVPLQPVGRMVLNRNIDNFFSENEQLAFCPGIIVPGIYYSDDKLLQTRIFSYSDTQRHRLGPNYLLLPPNAPKCAHHNNHYDGFMNFMHRDEEVDYFPSRYDPAKHAPRYPIPSATLTGRREKVVIAKENNFKQPGERYRSWDPARQDRFIKRWIDALSDPRLTHEIRSIWLSYWSQADRSLGQKLASRLSAKPSM

SEQ ID NO: 43049 - DNA, 1479 bp, Oryza sativa
  CDS (1)..(1479)
atggatccctacaagggccgcccgtcgagctcgttcaacggcccgctgtggagcaccaactccggcgcccccgtatggaacaacaacaactcgctcaccgtcggctcccgaggcccgatccttctggaggactaccacctggttgagaagctggccaacttcgacagggagcgtatcccggagcgcgtggtgcacgcccgcggcgccagcgccaagggcttcttcgaggtcacccacgacatcacccacctcacctgcgccgacttcctccgcgccccgggcgtccagaccccggtcatcgtccgcttctccaccgtcatccacgagcgcggcagcccggagaccctccgcgacccgcgtggcttcgccatcaagttctacacccgggagggcaactgggacctcgtcggcaacaacttccccgtcttcttcatccgcgacggcatgaagttcccggacatggtgcactcgctcaagcccaaccccaagtcgcacgtccaggagaactggcgcatcctcgacttcttgtcccaccacccggagagcctccacatgttcaccttcctcttcgatgacatcggcatccccgccgactaccgccacatggacggctccggcgtcaacacctacacgctcgtcaaccgcgccggcaagtcgcactacgtcaagttccactggaagcccacctgcggcgtcaagtcgctgctcgacgacgaggccgtcaccgtcggcgggaccaaccacagccacgccacgcaggacctctacgactccatcgccgccggcaacttcccggagtggaagctgttcatccagaccatcgaccccgaccacgaggaccgcttcgacttcgacccgctcgacgtcaccaagacgtggcccgaggacatcgtcccgctgcagcccgtggggaggatggtgctcaaccgcaacatcgacaacttcttctcggagaacgagcagctggcgttctgcccgggatcatcgtgccggggatctactactccgacgacaagctgctgcagacgaggatcttctcctactccgacacgcagcgccaccggctgggaccaaaactacctggttgttccggccaacgcgcccaagtgcgcccaccacaacaaccactacgacggcttcatgaacttcatgcaccgcgacgaggaggtcgactacttcccatcccgctacgatcctgccaagcacgccccccgctaccccatcccctccgccaccctcaccggccgccgcgagaaggtggtgattgccaaggagaacaacttcaagcagccaggggagaggtaccgttcatgggatccggcaaggcaagaccggttcatcaagagatggatcgacgcactctctgaccctcgcctcacccacgagatcaggagcatctggctctcctactggtctcaggctgacaggtctctgggtcagaaactggcgagccgtctcagcgcgaagccgagcatgtaa

SEQ ID NO: 43050 - protein, 492 aa, Oryza sativa
MDPYKGRPSSSFNGPLWSTNSGAPVWNNNNSLTVGSRGPILLEDYHLVEKLANFDRERIPERVVHARGASAKGFFEVTHDITHLTCADFLRAPGVQTPVIVRFSTVIHERGSPETLRDPRGFAIKFYTREGNWDLVGNNFPVFFIRDGMKFPDMVHSLKPNPKSHVQENWRILDFLSHHPESLHMFTFLFDDIGIPADYRHMDGSGVNTYTLVNRAGKSHYVKFHWKPTCGVKSLLDDEAVTVGGTNHSHATQDLYDSIAAGNFPEWKLFIQTIDPDHEDRFDFDPLDVTKTWPEDIVPLQPVGRMVLNRNIDNFFSENEQLAFCPGSSCRGSTTPTTSCCRRGSSPTPTRSATGWDQNYLVVPANAPKCAHHNNHYDGFMNFMHRDEEVDYFPSRYDPAKHAPRYPIPSATLTGRREKVVIAKENNFKQPGERYRSWDPARQDRFIKRWIDALSDPRLTHEIRSIWLSYWSQADRSLGQKLASRLSAKPSM

SEQ ID NO: 43051 - DNA, 1452 bp, Streptomyces violaceus
  CDS (1)..(1452): transl_table=11
gtgacgcagggaccgctcaccacggaggccggcgcgccggtcgccgacaaccagaacagcgagacggcgggcgtaggcggtccggtcctcgtccaggaccagctgctgctcgagaagctcgcccacttcaaccgtgagcgcatcccggagcgcgtggtccacgcgcgcggtgcgggcgcctacggcaccttcacgctcacccgtgacgtctcgcggtggacgcgggccgccttcctctccgaggtcggcaagcggaccgagaccttcctgcgcttctccaccgtcgcgggcagcctcggcgcggccgacgcggtgcgcgatccgcgcggctgggcgctgaagttctacaccgaggagggcaactacgacctcgtcggcaacaacaccccggtgttcttcatcaaggacgccatcaagttccccgacttcatccacacccagaagcgcgacccgtacacgggctcgcaggaggcggacaacgtctgggacttctggggcctgtcgccggagtcgacccaccaggtgacctggctgttcggcgaccgcggcatcccggcctcgtaccgccacatgaacggctacggctcgcacacgtaccagtggaacaacgaggccggcgaggtcttctgggtcaagtaccacttcaagaccgaccaggggatcaagaacctcacgcaggacgaggccaaccggctggccggcgaggacccggactcgcaccagcgcgacctgcgcgaggccatcgagcgcggcgacttcccgacctggaccgtgcaggtccagatcatgcccgcggccgacgcggcgggctaccgcttcaaccccttcgacctcaccaaggtctggccgcacgaggactacccgccggtcgagatcggcaccctggagctcaaccgcaacccggagaacatcttcgccgaggtcgagcagagcatcttctccccggcgcacttcgtgcccggcatcgggccgtccccggacaagatgctccagggccgtctcttcgcgtacggcgacgcgcaccgctaccgcgtcggcatcaacgccgaccacctgccggtgaaccgcccgcacgccaccgaggcgcggacgcactcccgtgacggcttcctctacgacggccgccacaagggcgcgaagaactacgagcccaactccttcggcggaccggtccagacggaccgcccgctgtggcagcccaccccggtcaccggcgtcaccggcgaccacgcggccccgtcgcacgccgaggacgacgacttcacgcaggcgggcgacctctaccggctgatgtcggaggacgagaagggccgcctgatcgacaatctgtccggcttcatcgccaaggtctcgcgcgacgacatcgccgagcgcgcgatcggcaacttccgccgggcggacgaggacttcggcaagcggctggaggccgcggtccaggccctgcgcggctga

SEQ ID NO: 43052 - protein, 483 aa, Streptomyces violaceus
MTQGPLTTEAGAPVADNQNSETAGVGGPVLVQDQLLLEKLAHFNRERIPERVVHARGAGAYGTFTLTRDVSRWTRAAFLSEVGKRTETFLRFSTVAGSLGAADAVRDPRGWALKFYTEEGNYDLVGNNTPVFFIKDAIKFPDFIHTQKRDPYTGSQEADNVWDFWGLSPESTHQVTWLFGDRGIPASYRHMNGYGSHTYQWNNEAGEVFWVKYHFKTDQGIKNLTQDEANRLAGEDPDSHQRDLREAIERGDFPTWTVQVQIMPAADAAGYRFNPFDLTKVWPHEDYPPVEIGTLELNRNPENIFAEVEQSIFSPAHFVPGIGPSPDKMLQGRLFAYGDAHRYRVGINADHLPVNRPHATEARTHSRDGFLYDGRHKGAKNYEPNSFGGPVQTDRPLWQPTPVTGVTGDHAAPSHAEDDDFTQAGDLYRLMSEDEKGRLIDNLSGFIAKVSRDDIAERAIGNFRRADEDFGKRLEAAVQALRG

SEQ ID NO: 43053 - DNA, 1479 bp, Arabidopsis thaliana
  CDS (1)..(1479)
atggatccatacagggttcgtccttcaagcgctcatgattcccctttcttcactacaaactcgggtgctcctgtctggaacaacaactcttctttgactgtcggaactcgaggtccaatccttctggaggactatcatctgcttgagaaactcgctaactttgacagggagcggattcctgagagggttgttcatgccaggggagccagtgctaagggtttctttgaagtcactcatgacattacccaacttacttctgctgattttcttcgaggacctggtgttcagactcctgttatcgttcgtttctcaactgtcatccatgagcgtggcagtcccgagactctcagagatccccgtggttttgctgttaagttttacaccagagaggggaactttgatcttgttgggaacaacttccctgtattcttcgtccgtgatggaatgaaattccctgacatggtccatgcattgaaaccgaatcccaagtctcacattcaggagaactggaggatactggacttcttctcccaccacccagagagtttgcacatgttttcatttctctttgatgatctcggtatcccacaggactacaggcacatggaaggcgctggggtcaacacttacatgctaatcaacaaagctggaaaagctcactatgtgaaattccactggaagccgacttgtgggatcaaatgcctgtcggatgaggaagctatcagagttggaggagccaatcacagccatgccaccaaagatctctatgactcgatcgcagccgggaactatccgcagtggaatctcttcgttcaggtgatggatcctgcccatgaagacaaatttgacttcgatccgcttgatgtcacaaagatctggcctgaagatatcttgcctttacaacctgttggtcgcttggtcttgaacaaaaacatcgacaacttctttaatgagaacgaacagattgcattctgtcctgctcttgtggttccaggcatccactattcagatgataagctactccagacccggatcttctcctacgctgatagtcagagacaccgtcttggaccaaactatctgcaactacctgttaatgcccctaaatgtgctcaccacaacaatcaccatgatggttttatgaacttcatgcacagggatgaggaggtcaattacttcccttcaaggttggatccggttcgccatgccgaaaaataccctacaactcctattgtctgctctggaaatcgtgagaagtgcttcatcgggaaggagaacaacttcaagcaaccaggggagagataccggtcctgggattcagacaggcaagaacgattcgtgaagcgttttgttgaagcgctttcggagcctcgtgtcacgcacgaaatccgcagcatttggatctcttactggtctcaggcagacaaatctctgggacagaaactagcaactcgtcttaacgtgaggccaaacttctga

SEQ ID NO: 43054 - protein, 492 aa, Arabidopsis thaliana
MDPYRVRPSSAHDSPFFTTNSGAPVWNNNSSLTVGTRGPILLEDYHLLEKLANFDRERIPERVVHARGASAKGFFEVTHDITQLTSADFLRGPGVQTPVIVRFSTVIHERGSPETLRDPRGFAVKFYTREGNFDLVGNNFPVFFVRDGMKFPDMVHALKPNPKSHIQENWRILDFFSHHPESLHMFSFLFDDLGIPQDYRHMEGAGVNTYMLINKAGKAHYVKFHWKPTCGIKCLSDEEAIRVGGANHSHATKDLYDSIAAGNYPQWNLFVQVMDPAHEDKFDFDPLDVTKIWPEDILPLQPVGRLVLNKNIDNFFNENEQIAFCPALVVPGIHYSDDKLLQTRIFSYADSQRHRLGPNYLQLPVNAPKCAHHNNHHDGFMNFMHRDEEVNYFPSRLDPVRHAEKYPTTPIVCSGNREKCFIGKENNFKQPGERYRSWDSDRQERFVKRFVEALSEPRVTHEIRSIWISYWSQADKSLGQKLATRLNVRPNF

SEQ ID NO: 43055 - DNA, 1479 bp, Cucurbita pepo
  CDS (1)..(1479)
atggatccttacaggcaccgcccttcaagtgctttcaacgcccccttctggactaccaattctggtgctccagtatggaacaacaactcgtcgatgaccgttgggcccagaggtcccattctcctagaggattatcatctagtggagaaacttgctaactttgatagggagcggatcccagagcgggttgtccatgctagaggagctagtgcaaaagggttttttgaggtgactcatgatattaccaacctttcatgtgctgatttccttcgggcccctggagttcagacaccagttattgtacgtttttccactgttatccatgagcgtggcagccctgaaacactgagagatccccgaggttttgctgtgaagttctacaccagggagggtaattttgatctcgtgggcaacaacttccctgtatttttcatccgtgatggtatgaaatttaccagacatgtacatcctctcaaaccgaatcccaagtcccatatccaggagaattggaggatccttgacttcttttctcaccatccagaaagcttgaacatgttctcatttctatttgatgatattggcatcccacaagattacagacacatggacggttcaggtgttaacacttatactctgattaacaaggcagggaaggcacactatgtgaaatttcactggaggcctacctgtggagtcaagtctttgctggaggaagatgctatccgtgttggaggaagcaatcatagccacgctactcaggacctctatgattcaattgcagcaggcaactaccccgagtggaagcttttcattcagactattgaccctgatcatgaagacaaatatgactttgaccctctagatgtaaccaagacatggcctgaggatatcttgcccctgcagccagttggccgcatggttttgaataagaacatcgataacttctttgcagagaatgaacaactggctttttgtcctgccattatagttcctggagtctactattcagatgacaaattgcttcagaccaggatcttctcctatgctgatactcagaggcaccgtcttggaccaaactatcttcaactccctgctaatgcacccaagtgtgctcaccacaacaatcaccacgagggtttcatgaactttatgcaccgagatgaggaggtcaattacttcccttccagatttgatccttctcgtcacgccgagaggtaccctcacccacctgctgtctgctctggaaagcgtgagaggtgcataattgaaaaggagaacaacttcaaggagcctggagagagatacagatcttggacaccagacaggcaagaacgattcgtccgcagatgggttgatgctttgtccgacacccgagtcacccatgagatccgcagcatatggatttcatactggtctcaggcggataggtctcttggtcagaagcttgcatcccatctcaacgtgaggccaagcatttga

SEQ ID NO: 43056 - protein, 492 aa, Cucurbita pepo
MDPYRHRPSSAFNAPFWTTNSGAPVWNNNSSMTVGPRGPILLEDYHLVEKLANFDRERIPERVVHARGASAKGFFEVTHDITNLSCADFLRAPGVQTPVIVRFSTVIHERGSPETLRDPRGFAVKFYTREGNFDLVGNNFPVFFIRDGMKFTRHVHPLKPNPKSHIQENWRILDFFSHHPESLNMFSFLFDDIGIPQDYRHMDGSGVNTYTLINKAGKAHYVKFHWRPTCGVKSLLEEDAIRVGGSNHSHATQDLYDSIAAGNYPEWKLFIQTIDPDHEDKYDFDPLDVTKTWPEDILPLQPVGRMVLNKNIDNFFAENEQLAFCPAIIVPGVYYSDDKLLQTRIFSYADTQRHRLGPNYLQLPANAPKCAHHNNHHEGFMNFMHRDEEVNYFPSRFDPSRHAERYPHPPAVCSGKRERCIIEKENNFKEPGERYRSWTPDRQERFVRRWVDALSDTRVTHEIRSIWISYWSQADRSLGQKLASHLNVRPSI

SEQ ID NO: 43057 - DNA, 1479 bp, Gossypium hirsutum
  CDS (1)..(1479)
atggatccctacaagcaccgtccatcaagtgctttcaattcaccattctggactaccaattctggcgctccagtttggaataacaattcatctctcactgttggacccagaggtcaatatctccttgaggactatcatctggtggaaaagcttgccaactttgacagggagcggattccagaacgtgttgtccatgctaggggagcaagcgcaaagggtttcttcgaggttacccatgacatttctcaccttacatgtgctgattttctgcgagcacctggagttcaaacccctgttatcgtgcgattttcaaccgtcatccatgagcgtggaagccctgaaaccctcagggatcctcgtggttttgcagtgaagttctacacccgagagggtaattttgatcttgtgggaaacaatttcccagtcttctttattcgtgatggaatgaaattccctgatatggtccatgctcttaagcccaaccctaagtcccatattcaggagaattggaggatccttgatttcttctcacaccatcctgagagcttgcatatgtttactttcctctttgatgatttgggtgttccacaagattacagacacatggaaggttctggtgtaaacacatacactctgattaacaaggctggcaaagcacactatgtgaaattccactggaagcccacttgtggggtcaaatgcttgctggaagatgaggcaatcaaggttggaggagctaatcacagccatgccactcaggatctctatgactcaattgctgctggcaactatcctgagtggaagctcttcatccagacaattgatcctgaccatgaagataaatttgactttgaccctcttgatgtgactaagacctggcctgaggacatcttgcccctgcagcctgttggccgcttggttttgaataagaacattgacaacttcttcgccgaaaatgaacagcttgcattttgccctgccattgtggttcctggaatctactactcagatgataagttgctccagactcgtatattctcctactctgatacccagaggcacagacttgggccaaactatctgcaactcccagccaatgctcccaagtgtgctcatcacaacaatcaccacgaaggttttatgaatttcatgcacagggatgaggagataaattacttcccttcaaggtacgatcctgttcgtcatgcagagatgttccctatcccacctgctgtttgcactggaaggcgagagaagtgcatcattgagaaggagaacaacttcaaacagcccggagagagataccggtcctgggcagcagacaggcaagaacgattcatctgccgctgggttgatgccttgtctgatccacgtgtgactcatgaaattcgcagcatatggatctcatactggtctcaggctgataaatcagtgggtcagaagttagcatctctcctcaatgtgagacccagcatttag

SEQ ID NO: 43058 - protein, 492 aa, Gossypium hirsutum
MDPYKHRPSSAFNSPFWTTNSGAPVWNNNSSLTVGPRGQYLLEDYHLVEKLANFDRERIPERVVHARGASAKGFFEVTHDISHLTCADFLRAPGVQTPVIVRFSTVIHERGSPETLRDPRGFAVKFYTREGNFDLVGNNFPVFFIRDGMKFPDMVHALKPNPKSHIQENWRILDFFSHHPESLHMFTFLFDDLGVPQDYRHMEGSGVNTYTLINKAGKAHYVKFHWKPTCGVKCLLEDEAIKVGGANHSHATQDLYDSIAAGNYPEWKLFIQTIDPDHEDKFDFDPLDVTKTWPEDILPLQPVGRLVLNKNIDNFFAENEQLAFCPAIVVPGIYYSDDKLLQTRIFSYSDTQRHRLGPNYLQLPANAPKCAHHNNHHEGFMNFMHRDEEINYFPSRYDPVRHAEMFPIPPAVCTGRREKCIIEKENNFKQPGERYRSWAADRQERFICRWVDALSDPRVTHEIRSIWISYWSQADKSVGQKLASLLNVRPSI

SEQ ID NO: 43059 - DNA, 1479 bp, Hordeum vulgare
  CDS (1)..(1479)
atggatccctacaagcaccggcccacgagcggggccaactccgcctactggaccaccaactccggcgcccccgtctggaacaacaacaacgccctcaccgtcggacaccgaggacctatcctccttgaggattaccatctgattgaaaagcttgcacaatttgaccgggaacgcatacctgaacgtgttgttcatgcacggggagccagtgcaaaggggttctttgaggtgactcatgatgtttctcagctcacatgtgctgactttctccgggctcctggggttcagaccccggttattgtccggttctctaccgttgtgcatgagcgtggaagccctgagaccctcagggatccacgtggttttgcagtgaagttctacaccagagagggtaactttgaccttgttgggaacaatatgcctgtgttttttatccgagatgggatgaagttccctgacatggtccatgctttcaagccaagtccgaagaccaacatgcaggagaactggagagtagttgacttcttttcgcaccacccggagagtctgcacatgttcaccttcctatttgacgatgttggcattccactcaactacaggcacatggacggttttggtgtcaacacctacaccttaatcagcagggatggaaaggctcacctggttaagttccattggaaacctacatgtggtgtgaagtgcctcttggatgatgaagctgttactgttggaggcacctgccacacccatgccacaaaggacttgactgattctattgcagctgggaattacccagaatggaagcttttcatccagaccattgatgctgatcacgaggatagatttgactttgaccctcttgatgtcaccaagacctggccagaggacatcatcccactgcaaccagttggacggatggtactgaacaagaacattgacaatttcttcgcggaaaatgaacagcttgctttctgcccagcagtcactgtccctggaatccactactctgatgataagctgctccagacaaggatcttctcatatgctgatacccaaaggcaccgtcttggtccaaactacttgatgctccccgtgaatgccccgaaatgtgctcaccacaacaaccatcatgatggcttaatgaatttcattcacagggatgaggaggtgaactacttcccttcaaggtttgatcctactcgtcatgctgaaaagtaccctatgcctccgcgtgttctatctggctgccgggagaagtgcattatcgacaaggagaacaatttcaagcaggctggtgagagatatcggtccttcgaccctgccaggcaagaccgtttcctccagcggtgggttgatgcgctcacggatgctcgtgtcacccatgaaatccagagcatctgggtctcatactggtcacagtgcgatgcgtccctcgggcagaagctggcgtcgcggctcaagattaagccgaacatgtaa

SEQ ID NO: 43060 - protein, 492 aa, Hordeum vulgare
MDPYKHRPTSGANSAYWTTNSGAPVWNNNNALTVGHRGPILLEDYHLIEKLAQFDRERIPERVVHARGASAKGFFEVTHDVSQLTCADFLRAPGVQTPVIVRFSTVVHERGSPETLRDPRGFAVKFYTREGNFDLVGNNMPVFFIRDGMKFPDMVHAFKPSPKTNMQENWRVVDFFSHHPESLHMFTFLFDDVGIPLNYRHMDGFGVNTYTLISRDGKAHLVKFHWKPTCGVKCLLDDEAVTVGGTCHTHATKDLTDSIAAGNYPEWKLFIQTIDADHEDRFDFDPLDVTKTWPEDIIPLQPVGRMVLNKNIDNFFAENEQLAFCPAVTVPGIHYSDDKLLQTRIFSYADTQRHRLGPNYLMLPVNAPKCAHHNNHHDGLMNFIHRDEEVNYFPSRFDPTRHAEKYPMPPRVLSGCREKCIIDKENNFKQAGERYRSFDPARQDRFLQRWVDALTDARVTHEIQSIWVSYWSQCDASLGQKLASRLKIKPNM

SEQ ID NO: 43061 - DNA, 1479 bp, Lycopersicon esculentum
  CDS (1)..(1479)
atggatccctctaagtatcgcccatcaagcgcatacgacacccctttcttgacaacaaatgctggtggtcctgtgtacaacaatgtttcttccttgactgttggacctagagggcctgttctgcttgaggattactatctaattgagaagctcgcgacatttgatcgcgagaagatacctgaacgtgttgttcatgctagaggtgctagtgctaagggattctttgaagttactcatgacatttctcatcttacttgtgctgattttctccgagctcctggcgctcaaacgcctgttatttgtcgattctctactgttgtccatgaacgtggaagccccgagtctatcagggacattcgtggttttgctgtcaagttctacaccagagagggtaactttgatcttgttggaaacaatgtccccgtgttctttaatcgtgatgctaagtcgttccctgacacgattcgtgcattgaaaccaaatccaaagtcacacattcaggagaactggaggatacttgatttcttctcgttccttcctgagagtttgcatacattcgccttcttctacgatgatgtttgtctcccaacggattacagacacatggaaggttttggcgttcacgcgtatcaattgattaacaaagaggggaaagcacattatgtgaagttccactggaagccaacttgtggtgtgaaatgtatgtctgaggaagaagctattagagtcggtggtactaatcatagccacgcgaccaaggatctttacgattcaattgctgctggaaactatcctgagtggaagctttttatccaaacaatggaccccgaggatgtagacaagttcgattttgatcctctggatgtaaccaagacatggcctgaggatctcttgccgttgatcccagttggtcgattggtgttgaacaggaacattgataacttcttcgcagagaatgaacaactcgcgtttaaccctggacatattgtccctggtatttactattccgaggataagcttctccagactaggatattcgcgtatgctgatactcagagacaccgtattggaccaaactatatgcagctcccagttaatgctcccaagtgtggtcatcacaacaatcatcgcgatggtgctatgaacatgacacatcgcgatgaagaggtggattatttgccctcgaggtttgatccttgtcgtcctgctgagcagtacccgattccttcttgtgtcttgaatggaaggcgtacaaattgtgtcattccgaaagaaaacaacttcaaacaggcaggggagaggtacagatcatgggaacctgacaggcaagacagatacatcaacaaatgggttgagtctttatccgatccacgagtcactcatgagattcgcagcatatggatatcatacttgtctcaggctgacaagtcctgtggtcagaaggtcgcttctcgtctcactgtgaagcctacaatgtga

SEQ ID NO: 43062 - protein, 492 aa, Lycopersicon esculentum
MDPSKYRPSSAYDTPFLTTNAGGPVYNNVSSLTVGPRGPVLLEDYYLIEKLATFDREKIPERVVHARGASAKGFFEVTHDISHLTCADFLRAPGAQTPVICRFSTVVHERGSPESIRDIRGFAVKFYTREGNFDLVGNNVPVFFNRDAKSFPDTIRALKPNPKSHIQENWRILDFFSFLPESLHTFAFFYDDVCLPTDYRHMEGFGVHAYQLINKEGKAHYVKFHWKPTCGVKCMSEEEAIRVGGTNHSHATKDLYDSIAAGNYPEWKLFIQTMDPEDVDKFDFDPLDVTKTWPEDLLPLIPVGRLVLNRNIDNFFAENEQLAFNPGHIVPGIYYSEDKLLQTRIFAYADTQRHRIGPNYMQLPVNAPKCGHHNNHRDGAMNMTHRDEEVDYLPSRFDPCRPAEQYPIPSCVLNGRRTNCVIPKENNFKQAGERYRSWEPDRQDRYINKWVESLSDPRVTHEIRSIWISYLSQADKSCGQKVASRLTVKPTM

SEQ ID NO: 43063 - DNA, 1479 bp, Ricinus communis
  CDS (1)..(1479)
atggatccctacaggaaccgtccatcaagtggttttaatacccctttctggactacaaattcgggtgctcctgtatggaataacaattcatccttgaccgttggatccagaggtccaatcctgcttgaagactatcatttgatagaaaaactagctaattttgatagagaacggatcccagagcgtgttgtgcatgctagaggagctagtgcaaagggtttctttgaggtcacccatgatgtctcacatctcacatgtgctgattttcttcgagctcctggagttcagacgcctgtcattgtgcgtttctctactgttattcatgaacgtggcagccctgaaaccctcagggatcctcgaggtttcgcagtgaagttttacaccagagagggtaattttgatcttgtgggaaacaatttccctgtctttttcatccgtgatggaatgaaattcccagatgtggtacatgcttttaagcccaaccccaagtctcaccttcaggagaattggaggatctttgacttcttatcccatgttcctgaaagcttgcacatgcttaccttcctcttggatgatttgggtattccacaagactacaggcacatggaaggctctggtgttaacacctatactctgatcaacaaggctggaaaagtacactatgtgaaatttcactggaagcctacttgtggtgtaaagtgtttgttggaaaatgaggccattaaggttggaggatccaatcatagtcatgccacccaggatctatatgattcaatttcggctggaaactatccagagtggaaactttacatccagataatggatcctgctcatgaagacaaatttgactttgatccacttgacgtgaccaaaacctggcccgaggatatcctacccctgcagccagttggccgcctggtcttgaataagaacattgataacttctttgctgagaatgagcagcttgcattttgccctggtattgtggttcctggtgtttcatattcagaggacaagttactccagactaggatcttttcatattctgatactcagaggcaccgtcttggaccaaactatttacagctccctgttaatgctccaaagtgtgctcatcacaataatcatcatgaaggtttcatgaatttcatgcatagggatgaggaggtcaattatttcccatccagatgcgatccagctcgcaatgctgagagtttccccgttccttctgctatctgcagtggaaagcgggagaagtgtgttattgagaaggagaacaatttcaagcagcctggtgagagatatcgatcttgggctcctgacaggcaagagcggttcctcaaccggttggttggaggcttatctgatcctcggatcacccatgagctgcgcactatctggatctcttactggattcagtgcgacaaatccctgggtcagaagctagcaactcgcctcaacgtgaagccaagcatttga

SEQ ID NO: 43064 - protein, 492 aa, Ricinus communis
MDPYRNRPSSGFNTPFWTTNSGAPVWNNNSSLTVGSRGPILLEDYHLIEKLANFDRERIPERVVHARGASAKGFFEVTHDVSHLTCADFLRAPGVQTPVIVRFSTVIHERGSPETLRDPRGFAVKFYTREGNFDLVGNNFPVFFIRDGMKFPDVVHAFKPNPKSHLQENWRIFDFLSHVPESLHMLTFLLDDLGIPQDYRHMEGSGVNTYTLINKAGKVHYVKFHWKPTCGVKCLLENEAIKVGGSNHSHATQDLYDSISAGNYPEWKLYIQIMDPAHEDKFDFDPLDVTKTWPEDILPLQPVGRLVLNKNIDNFFAENEQLAFCPGIVVPGVSYSEDKLLQTRIFSYSDTQRHRLGPNYLQLPVNAPKCAHHNNHHEGFMNFMHRDEEVNYFPSRCDPARNAESFPVPSAICSGKREKCVIEKENNFKQPGERYRSWAPDRQERFLNRLVGGLSDPRITHELRTIWISYWIQCDKSLGQKLATRLNVKPSI

SEQ ID NO: 43065 - DNA, 1479 bp, Solanum tuberosum
  CDS (1)..(1479)
atggatccgtctaagtatcgtccatcaagcgcatacgacacccctttcttgacaacaaatgctggtggtcctgtgtacaacaatgtttcttccttgactgttggacctagagggcctgttctgcttgaggattattatctaattgagaaacttgcgacttttgatcgcgaaaagatacctgagcgtgttgttcatgctagaggtgctagtgctaagggattctttgaagttactcatgacatttctcatcttacttgtgctgattttctccgagctcctggtgctcaaacgcctgttatttgtcgattctctactgttgtccatgaacgtggaagccccgagtcaatcagggatattcgcgggtttggtgtcaagttctacaacagagggggtaactttgatcttgttggaaacaatgtccccgtgttctttaatcgggatgctaagtcgttccctgacacgattcgtgcattgaaaccaaatccaaagtcacacattcaggaggactggaggacccttgatttcttctcgttccttcctgagagtttgcatacattcgccttcttctacgatgatgtttgtctcccaactgattacagacacatggaaggttttggcgtccacgcgtatcaattgattaacaaagaggggaaagcacattatgtgaagttccactggaagccaacttgtggtgtgaaatgtatgtctgaggaagaagctattagagtcggtggtactaatcatagccacgcgaccaaggatctttacgattcaattgcagctggaaactatcctgagtggaagcttttcatccaaacaatggaccctgaggatgtagacaagttcgattttgatcctctggatgtaaccaagacatggcctgaggatctcttgccgttgatcccagttggtcgattggtattgaacaggaacattgataacttctttgctgagaatgagcagctcgcgtttaaccctggacatatcgtccctggtatttactattccgaggataagcttctccagactaggatattcgcgtatgctgatactcagagacaccgtattggaccaaactatatgcagctcccagttaatgctcccaagtgtggtcatcacaacaatcatcgcgatggtgccatgaacatgacacatcgcgatgaagaggtggattatttcccctcgaggtttgatccatgtcgtcctgctgagcagtacccaatacctgcttgtgtcttgaatggaaggcgtaccaattgtgtcattccgaaagagaacaactccaaacaggcaggggagaggtacagatcctgggaatctgacaggcaagacagatacatcaacaaatgggttgagtctctatccgatccacgagtcactcatgagattcgcagcatatggatatcatacttgtctcaggctgacaagtcctgtggtcagaaggtcgcttctcgtctcactgtgaagcccacaatgtga

SEQ ID NO: 43066 - protein, 492 aa, Solanum tuberosum
MDPSKYRPSSAYDTPFLTTNAGGPVYNNVSSLTVGPRGPVLLEDYYLIEKLATFDREKIPERVVHARGASAKGFFEVTHDISHLTCADFLRAPGAQTPVICRFSTVVHERGSPESIRDIRGFGVKFYNRGGNFDLVGNNVPVFFNRDAKSFPDTIRALKPNPKSHIQEDWRTLDFFSFLPESLHTFAFFYDDVCLPTDYRHMEGFGVHAYQLINKEGKAHYVKFHWKPTCGVKCMSEEEAIRVGGTNHSHATKDLYDSIAAGNYPEWKLFIQTMDPEDVDKFDFDPLDVTKTWPEDLLPLIPVGRLVLNRNIDNFFAENEQLAFNPGHIVPGIYYSEDKLLQTRIFAYADTQRHRIGPNYMQLPVNAPKCGHHNNHRDGAMNMTHRDEEVDYFPSRFDPCRPAEQYPIPACVLNGRRTNCVIPKENNSKQAGERYRSWESDRQDRYINKWVESLSDPRVTHEIRSIWISYLSQADKSCGQKVASRLTVKPTM

SEQ ID NO: 43067 - DNA, 1479 bp, Glycine max
  CDS (1)..(1479)
atggatccctacaagaatcggccatcaagcgccttcaattctcccttctggactacaaattccggtgctcccatctggaacaataactcatcgctgactgttggatctagaggtccaattctgctggaggattaccatctggtggagaagcttgcaaactttgacagggaacggatccccgaacgtgttgtccacgctcgtggagctagcgcaaagggtttctttgaagtcacgcatgacatttctcacctcacatgtgccgatttccttcgagcccctggagttcagacccccctcatcgtccgtttctccactgttatccacgagcgtggcagccccgaaaccctcagggatcccagaggttttgctgtcaaattctacaccagagagggtaacttcgaccttgtgggaaacaacttccctgtcttcttcgtccgcgatggcctcaagtttcctgacatggttcatgccctcaaacccaaccccaagtcccacatccaggagaattggaggatcctcgatttcttctcccaccatcccgaaagccttcacatgttctccttcttattcgacgacgttggtatccctcaagattacaggcatatggatggcttcggtgtcaacacctacacccttatcaacaaggccggcaaagcactctatgtcaaatttcattggaagaccacctctggcgaaaagtctcttttggacgacgaggccatcagggttggaggatccaaccacagtcatgccacccaggacctttacgattcaattgctgctggaaactatcctgagtggaaactctacatccaaacattggatcccgaaaacgaagacaggcttgactttgacccccttgatgttactaagacctggcccgaggacgttttgcccctccagcctgttggccgcatggtcttgaataagaacattgataacttctttgccgagaatgaacaacttgcattttgccctgccattattgtacctggtgtatactactccgatgataaattgcttcaaactcgcgtattctcctatgctgatacccagagacacagacttggaccaaattatctgcagcttcctgctaatgcccctaagtgtgcccatcacaacaatcaccatgatggtttcatgaatttcatgcacagggatgaagaggtcaattacttcccttcaaggtatgatcctgtccgtcatgcggaaaaggtccccgttcctcctcgtatcctaggtgggaagcgtgaaaagtgcatgattgagaaggagaacaacttcaagcaacctggggagagataccgatcctggccctctgacaggcaagaaaggtttgtccgccgatgggttgatgctttgtctgacccacgtgtcacccatgaaatccgtagcatctggatatcatactggtctcaggctgatcgttctcttggacaaaagatagcatctcacctgaacttgaagccaagtatctaa

SEQ ID NO: 43068 - protein, 492 aa, Glycine max
MDPYKNRPSSAFNSPFWTTNSGAPIWNNNSSLTVGSRGPILLEDYHLVEKLANFDRERIPERVVHARGASAKGFFEVTHDISHLTCADFLRAPGVQTPLIVRFSTVIHERGSPETLRDPRGFAVKFYTREGNFDLVGNNFPVFFVRDGLKFPDMVHALKPNPKSHIQENWRILDFFSHHPESLHMFSFLFDDVGIPQDYRHMDGFGVNTYTLINKAGKALYVKFHWKTTSGEKSLLDDEAIRVGGSNHSHATQDLYDSIAAGNYPEWKLYIQTLDPENEDRLDFDPLDVTKTWPEDVLPLQPVGRMVLNKNIDNFFAENEQLAFCPAIIVPGVYYSDDKLLQTRVFSYADTQRHRLGPNYLQLPANAPKCAHHNNHHDGFMNFMHRDEEVNYFPSRYDPVRHAEKVPVPPRILGGKREKCMIEKENNFKQPGERYRSWPSDRQERFVRRWVDALSDPRVTHEIRSIWISYWSQADRSLGQKIASHLNLKPSI

SEQ ID NO: 43069 - DNA, 1479 bp, Nicotiana tabacum
  CDS (1)..(1479)
atggatctctctaagtttcgaccatcaagcgcatatgattcccctttcttgacaacaaatgctggtggtcctgtctacaacaacgtttcttccttgactgttggacctagagggcctgttcttcttgaggattatcacttaatagagaagctcgcgacttttgatcgtgagcggatacctgagcgtgttgttcatgctagaggtgccagtgcaaaaggtttctttgaagtcactcatgatatttctcatcttacctgtgctgattttctccgagcgcctggggttcaaacacctgttatttgccgtttctctactgtcgtccatgagcgtggaagccccgagtcccttagggacattcgtggttttgctgtcaaattttacaccagagagggtaactttgatctggttggaaacaacgtccccgtcttctttaatcgtgatgcaaaatcgttccctgacacgattcgtgcactgaaaccaaatccaaagtcacacattcaggaatactggaagatccttgatttcttctctttccttccggagagtttgcatacttttgcctggtttttcgatgatgtttgtctcccgacagattacagacacatggaaggttatggtgttcacgcctatcaattaatcaacaaggctgggaaagcacattatgtgaagtttcactggaaaccaacttgtggtgtcaagtgcatgtcggaggaagaagctattagggtcggaggtacaaatcatagccacgccaccaaggatctctacgattcgattgctgctggaaactatcccgagtggaaactttttatccaaattatggacactgaggatgtagacaaattcgactttgatcctcttgatgtaaccaagacctggcctgaggatatcttgccattgatgccagttggacgattggtacttaacaggaatatcgataacttctttgctgagaacgagcagctcgcgtttaaccctggccatattgtccctggtctttactattcggaggacaagcttctccagactaggatattcgcgtatgctgatactcagagacaccgtattggaccaaactatatgcagcttcctgttaatgctcccaagtgtgctcatcacaataatcaccgcgatggtgccatgaacttcatgcatcgcgatgaagaggtggattatttgccctcaaggttcgatccttgtcgtcatgctgaacagtacccaattccttctcgtgtcttgacaggaaggcgtgaaatgtgtgtcattgagaaagagaacaacttcaagcaggcaggagaaagatacagatcctgggaacctgacaggcaagacagatatgttagcaaatgggttgagcatttatccgatccacgagtcacttatgagatacgcagtatatggatatcatacctgtctcaggctgacaagtcttgtggtcagaaggtcgcttctcgtctcactttaaagcctacaatgtga

SEQ ID NO: 43070 - protein, 492 aa, Nicotiana tabacum
MDLSKFRPSSAYDSPFLTTNAGGPVYNNVSSLTVGPRGPVLLEDYHLIEKLATFDRERIPERVVHARGASAKGFFEVTHDISHLTCADFLRAPGVQTPVICRFSTVVHERGSPESLRDIRGFAVKFYTREGNFDLVGNNVPVFFNRDAKSFPDTIRALKPNPKSHIQEYWKILDFFSFLPESLHTFAWFFDDVCLPTDYRHMEGYGVHAYQLINKAGKAHYVKFHWKPTCGVKCMSEEEAIRVGGTNHSHATKDLYDSIAAGNYPEWKLFIQIMDTEDVDKFDFDPLDVTKTWPEDILPLMPVGRLVLNRNIDNFFAENEQLAFNPGHIVPGLYYSEDKLLQTRIFAYADTQRHRIGPNYMQLPVNAPKCAHHNNHRDGAMNFMHRDEEVDYLPSRFDPCRHAEQYPIPSRVLTGRREMCVIEKENNFKQAGERYRSWEPDRQDRYVSKWVEHLSDPRVTYEIRSIWISYLSQADKSCGQKVASRLTLKPTM

SEQ ID NO: 43071 - DNA, 1479 bp, Triticum aestivum
  CDS (1)..(1479)
atggacccctacaagtaccggccgtcgagctccttcaacgccccgatgtggagcaccaactccggcgcgcccgtctggaacaacgacaactccctcaccgtcggatcccgaggtccgatcctgctggaggactaccacctggtggagaagatcgccgacttcgaccgtgagcgcatcccggagcgggtggtacacgcccggggcgccacggccaagggcttcttcgaggtcacccacgacgtctcccacctgacctgcgccgacttcctccgcgcgccgggggtgcagacccccgtcatagtgcgcttctccaccgtgatccacgagcgcggctcccccgagacgctccgcgacccgcgcggcttcgccatcaagttctacacccgggagggcaactgggacctggtgggcaacaacttccccgtcttcttcatccgcgacggcatgaagttcccggacatggtgcacgcgctcaagcccaaccccaagacccacatccaggagaactggcggatcctcgacttcttctcccaccacccggagtcgctccacatgttcaccttcctcttcgacgacatcggcgtgcccgccgactaccgccacatggacggctccggcgtcaacacctacacgctggtgaaccgcgccggcaaggcgcactacgtcaagttccactggaagcccacctgcggcgtcaagtcgctgctggaggaggaggcggtcacggtgggcggcaccaaccacagccacgccaccaaggacctcaccgactccatcgccgccggcaactacccggagtggaccttctacatccagaccatcgacccggactatgaggagcggttcgacttcgacccgctggacgtgaccaagacgtggcccgaggacgtggtgccgctgcagcccgtggggcggctggtgctgaaccgcaacatcgacaacttcttctcggagaacgagcagctggccttctgccccgggatcatcgtccccggggtgtactactcggacgacaagctgctgcagacaaggatcttctcctactccgacacgcagcgccaccgtctggggcccaactacctgctgctgccggccaacgcgcccaagtgctcccaccacaacaaccactacgacgggctcatgaacttcatgcaccgcgacgaggaggtcgactacttcccctcaaggttcgaccccgccaagcacgcgccccgctaccccatcccctcccgcaccctcaacggccgccgcgagaagatggtgatcgagaaggagaacaacttcaagcagcccggggagaggtaccgctccatggacccggcaaggcaagagcgattcatcaacagatggatcgacgcgctgtcggacccccgcctcacccatgagatcaaggccatctggctctcctactggtctcaggctgacaagtctctcggccagaagctcgcgagccgtctcagctccaagccgagcatgtaa

SEQ ID NO: 43072 - protein, 492 aa, Triticum aestivum
MDPYKYRPSSSFNAPMWSTNSGAPVWNNDNSLTVGSRGPILLEDYHLVEKIADFDRERIPERVVHARGATAKGFFEVTHDVSHLTCADFLRAPGVQTPVIVRFSTVIHERGSPETLRDPRGFAIKFYTREGNWDLVGNNFPVFFIRDGMKFPDMVHALKPNPKTHIQENWRILDFFSHHPESLHMFTFLFDDIGVPADYRHMDGSGVNTYTLVNRAGKAHYVKFHWKPTCGVKSLLEEEAVTVGGTNHSHATKDLTDSIAAGNYPEWTFYIQTIDPDYEERFDFDPLDVTKTWPEDVVPLQPVGRLVLNRNIDNFFSENEQLAFCPGIIVPGVYYSDDKLLQTRIFSYSDTQRHRLGPNYLLLPANAPKCSHHNNHYDGLMNFMHRDEEVDYFPSRFDPAKHAPRYPIPSRTLNGRREKMVIEKENNFKQPGERYRSMDPARQERFINRWIDALSDPRLTHEIKAIWLSYWSQADKSLGQKLASRLSSKPSM

SEQ ID NO: 43073 - DNA, 1479 bp, Arabidopsis thaliana
  CDS (1)..(1479)
atggatccttacaagtatcgtccagctagttcttacaactctcccttcttcaccaccaactctggtgctcctgtatggaacaacaactcctccatgaccgttggacccagaggtcctatccttcttgaggattaccatctcgttgagaagcttgccaatttcgacagggaacggattccagagcgtgtggttcatgccagaggagccagtgctaaaggtttctttgaggtcactcatgatatctctaacctcacttgtgctgactttctccgagctcccggtgttcagactcctgtcattgtccggttctccaccgttatccatgagcgtggaagtcccgagaccttgagagaccctcgtggttttgcagtcaagttctacaccagagaggggaactttgatcttgttggaaacaactttcctgttttcttcatccgcgatgggatgaagttccctgacatggtccacgctcttaagccgaacccaaaatctcacatccaagagaactggagaatccttgacttcttctcccaccaccctgaaagtttgaacatgttcactttcctcttcgatgatatcggtatcccacaagattacaggcacatggatggttcaggtgtcaatacatacatgttgatcaacaaagctggcaaagctcactacgtgaagttccattggaaaccaacttgtggagtcaagtctcttttggaagaagatgcaattcgtgttggaggaaccaaccacagtcatgcgactcaagacttgtatgactctatagctgctggaaactaccctgaatggaagctctttatccaaatcattgatcctgctgatgaagacaagttcgactttgacccgctcgatgtgaccaagacctggcctgaggatatcttgcctcttcaacctgttggacgtatggtgttgaacaagaacattgacaacttctttgcagagaatgagcaacttgctttctgtcctgcaattattgtcccagggatacattactcagatgataagctgcttcaaacccgtgtcttctcctatgccgatactcagagacaccgtcttggaccaaactaccttcagctgccagtcaatgctccaaaatgtgctcaccacaacaaccaccatgagggattcatgaatttcatgcacagggacgaggaggttaactacttcccgtcgaggtatgaccaggttcgtcatgctgagaagtatccaactccgcctgctgtctgttctggaaaacgtgagaggtgcattattgagaaagagaacaacttcaaggagcctggagagagataccgtacctttacaccagagaggcaagaacgattcatccagagatggattgatgccctatccgacccacgcatcacgcatgaaatccgcagtatctggatctcttactggtctcaggctgataagtctttgggacagaagctggcaagccgtctgaacgtgagaccaagcatctaa

SEQ ID NO: 43074 - protein, 492 aa, Arabidopsis thaliana
MDPYKYRPASSYNSPFFTTNSGAPVWNNNSSMTVGPRGPILLEDYHLVEKLANFDRERIPERVVHARGASAKGFFEVTHDISNLTCADFLRAPGVQTPVIVRFSTVIHERGSPETLRDPRGFAVKFYTREGNFDLVGNNFPVFFIRDGMKFPDMVHALKPNPKSHIQENWRILDFFSHHPESLNMFTFLFDDIGIPQDYRHMDGSGVNTYMLINKAGKAHYVKFHWKPTCGVKSLLEEDAIRVGGTNHSHATQDLYDSIAAGNYPEWKLFIQIIDPADEDKFDFDPLDVTKTWPEDILPLQPVGRMVLNKNIDNFFAENEQLAFCPAIIVPGIHYSDDKLLQTRVFSYADTQRHRLGPNYLQLPVNAPKCAHHNNHHEGFMNFMHRDEEVNYFPSRYDQVRHAEKYPTPPAVCSGKRERCIIEKENNFKEPGERYRTFTPERQERFIQRWIDALSDPRITHEIRSIWISYWSQADKSLGQKLASRLNVRPSI

SEQ ID NO: 43075 - DNA, 1479 bp, Cucurbita pepo
  CDS (1)..(1479)
atggatccctacaagtaccggccatccagcgcgtacaacacaccgttctgcacgacaaactccggtgcaccaatatggaacaacacggccgtgatgtccgtcggcgaaaggggccccatccttctagaagactaccaactcatcgaaaaaatcgccacgttcacacgcgaaagaatcccggagcgtgtagttcacgcgcgaggagccagcgccaaaggcttcttcgaagtaacccacgacgtctccgacctatcctgcgccgacttcctccgtgcaccgggcgtccaaacccccgtcatcgtccgcttctccaccgtcatccacgaacgggtcagccccgaaactgtccgcgacccacgtggcttcgccgtcaaattctacacgcgcgaaggcaacttcgacttagttggcaataacttccccgtctttttcgtacgcgacgccatgcaattccctgacgtcatccgcgcgtttaaaccaaatcccaaatcccatctccaagaatcttggagattcttggatttctgctcttaccaccctgaaagcctgctctccttcgcttggttctatgatgacgtgggcatccccattaactaccgccacatggagggcttcggcgtgcaagcctattccctaatcaacaaagctggtaaagcccggctcgttaaattccattggaaacccacttgtggggttaagagcatgctcgaggaggaagccattagagtcggcggctccaaccatagccacgccactcaagatctctatgagtccattgccgccgggaacttcccggagtggcggctttacattcaaaccattgattatgaagaccaaaacaattatgattttgagccgctcgacacgaccattgcttggccggaggatgtcgtgccgttgcgaccagtggggcggttggttttgaataagaatattgataatttctttgctgagaatgagatgttggcgttctccatgtcgttggtgccggggattcattactcggatgataagatgttgcaagctaggagctttgcttatgctgatactcaaaggcatcggcttggccctaattatcttcagctgccggttaatgctcctaagtgtcctcaccataataatcatcatgaagggtttatgaactttatgcatagagatgaggaggtgaattacttcccttcgagatacgatgcttgtcgccatgctgagaagtacccgatgccgcccaatgtgttgagcggaaaaagagaaaggtgtgtgattccaaaggagaatcataacttcaagcaagctggagacagataccgatcatgggcaccagacaggcaagaacggttcgtgaatcggttcgtagaagcgttatcggactcgaaagtgactcatgaggttcgtaacatatggatctcgtactggactcaggcagacaggtctctgggacaaaagatagcgtctcgtatgaatgcgagaccaaacatgtaa

SEQ ID NO: 43076 - protein, 492 aa, Cucurbita pepo
MDPYKYRPSSAYNTPFCTTNSGAPIWNNTAVMSVGERGPILLEDYQLIEKIATFTRERIPERVVHARGASAKGFFEVTHDVSDLSCADFLRAPGVQTPVIVRFSTVIHERVSPETVRDPRGFAVKFYTREGNFDLVGNNFPVFFVRDAMQFPDVIRAFKPNPKSHLQESWRFLDFCSYHPESLLSFAWFYDDVGIPINYRHMEGFGVQAYSLINKAGKARLVKFHWKPTCGVKSMLEEEAIRVGGSNHSHATQDLYESIAAGNFPEWRLYIQTIDYEDQNNYDFEPLDTTIAWPEDVVPLRPVGRLVLNKNIDNFFAENEMLAFSMSLVPGIHYSDDKMLQARSFAYADTQRHRLGPNYLQLPVNAPKCPHHNNHHEGFMNFMHRDEEVNYFPSRYDACRHAEKYPMPPNVLSGKRERCVIPKENHNFKQAGDRYRSWAPDRQERFVNRFVEALSDSKVTHEVRNIWISYWTQADRSLGQKIASRMNARPNM

SEQ ID NO: 43077 - DNA, 1479 bp, Gossypium hirsutum
  CDS (1)..(1479)
atggatccttacaagtttcgtccttctagttcctttgattccccgttctggactaccaattctggtgctccagtttggaacaataactcatcacttactgtgggagcaagaggtccaattctccttgaagactatcatttggtggagaagctagctaatttcgacagagaacgcatacctgaacgtgttgttcatgctagaggagccagtgcgaaagggttctttgaggtcactcatgatatatctcagctcacatgtgctgatttccttcgtgcccctggagtgcagaccccgctcattgttagattctccacggttattcatgaacgtggtagtcctgaaactttgagagacccccgaggtttcgctgtgaaattttacactcgagagggaaattttgatctcgtggggaacaatttccctgtgtttttcatccgtgacggaatgaagttccctgatatggtccatgctcttaaaccaaacccgaagtcccacattcaggaaaactggaggattctggacttcttttcgcaccatcccgaaagcttgcacatgttcaccttcctgtttgatgacatcggtgttccacaggattataggcacatggatggctctggtgttcatacctacacactaatcaacaaggctgggaagtcacactatgtgaaattccattggaaacccacttgtggtgtaaaatctttgttggaggatgaagccataagagtaggtggtgcgaatcacagtcatgccacacaagatctttatgactcgattgcagccggaaactaccctgaatggaaactgttcattcaaataatggatcctcttcatgaggataggtttgattttgacccacttgatgtaaccaagacatggccagaggacatcttcccattgcagccaatgggtcgaatggtgttaaacaagaacatcgataacttctttgctgagaacgagcaattagccttctgcccttccctcattgtccctggcatctattattcagatgataagttgcttcaaactagaatcttctcctattctgacactcaaaggcaccgtcttggaccaaattatctgcagcttccagctaatgctcccaaatgtgctcatcacaataatcaccatgaaggttttatgaattttatgcatagagatgaggaggtgaactacttcccttcgaggtacgatcctgttcgccatgctgagaagcaccctattcctagcaccgttttgagcggcaaaagagagaagtgcattattgggaaggagaacaactttaagcagcctggggaacgataccggtccttttcagctgacaggcaagaacggtttattaatcgctggattgatgccttgtctgatccaagggtcacacacgagatccgcagcatttggatctcatactggtctcaggctgacaaatctttgggtcaaaagattgcttctcgcctcaatgttagaccaagcatttga

SEQ ID NO: 43078 - protein, 492 aa, Gossypium hirsutum
MDPYKFRPSSSFDSPFWTTNSGAPVWNNNSSLTVGARGPILLEDYHLVEKLANFDRERIPERVVHARGASAKGFFEVTHDISQLTCADFLRAPGVQTPLIVRFSTVIHERGSPETLRDPRGFAVKFYTREGNFDLVGNNFPVFFIRDGMKFPDMVHALKPNPKSHIQENWRILDFFSHHPESLHMFTFLFDDIGVPQDYRHMDGSGVHTYTLINKAGKSHYVKFHWKPTCGVKSLLEDEAIRVGGANHSHATQDLYDSIAAGNYPEWKLFIQIMDPLHEDRFDFDPLDVTKTWPEDIFPLQPMGRMVLNKNIDNFFAENEQLAFCPSLIVPGIYYSDDKLLQTRIFSYSDTQRHRLGPNYLQLPANAPKCAHHNNHHEGFMNFMHRDEEVNYFPSRYDPVRHAEKHPIPSTVLSGKREKCIIGKENNFKQPGERYRSFSADRQERFINRWIDALSDPRVTHEIRSIWISYWSQADKSLGQKIASRLNVRPSI

SEQ ID NO: 43079 - DNA, 1485 bp, Hordeum vulgare
  CDS (1)..(1485)
atggatccctgcaagttccggccgtcgagcagcttcgacaccaagacgacgacgacgaacgccgggcagccggtgtggaacgacaacgaggcgctcacggtggggccgcgcggcccgatcctgctggaggactatcacctgctggagaagatcgcccacttcgcgcgggagcgcatcccggagcgcgtcgtgcacgcgcggggcgcctccgccaagggcttcttcgagtgcacccacgacgtcaccggcctcacctgcgccgacttcctccgcgcgcccggggcgcgcacgccggtcatcgtccgcttctccaccgtgatccacgagcgcggctcgccggagaccatccgtgacccgcgcgggttcgccgtcaagttttacacgcgcgagggcaactgggacctgctcggcaacaacttccccgtcttcttcatccgcgacggcatcaagttccccgacgtcatccacgccttcaagcccaacccaaagtcccacgtgcaggagtactggcgcgtcttcgacttcctctcccaccacccggagagcctccacaccttcttcttcctcttcgacgacgtcggcatccccaccgactaccgccacatggacggcttcggcgtcaacacctacaccttcgtctcccgcgccggcaagtcccactacgtcaagttccactggcgccccacctgcggcgtcagctgcctcatggacgacgaggcaaccctcgttggcggcaagaaccacagccacgccacgcaggacctctacgactccatcgacgccggcaacttccccgagtggaagctcttcgtgcaggtcatcgaccccgacgaagaggaccgcttcgacttcgacccgctcgacgacaccaagacatggccagaggacctcgtccccctccagcccgtgggccgcctcgtgctcgaccgcaacgtcgacaacttcttcaacgagaacgagcagctcgcgttcggccccggcctcgtcgtgcccgggatctactactccgacgacaagatgctgcagtgcagggtgttcgcatacgccgacacgcagcgctaccgcctggggccaaactacctgatgctccccgtcaacgcgcccaagtgcggcttcaagaacaaccactacgacggcgccatgaacttcatgcaccgcgatgaggaggtggactactacccgtctcgccacgcgccgctccggcatgccgagccggccagcttccccgtgccgacgaggcccgtggttggaaagagggagaagacgaggatcaagaaggagaacgacttcgtgcagcccggggagaggtaccgcagctgggcgcccgaccgccaggacaggttcgtgcgccgcttctccgacgcgctcgcgcaccccaaggtcagccacgagctgcgtgtcatctggatcgacttcctctccaagtgtgacaagtcgtgcgggatgaaggtggcgaaccgcctcaacgtgaagccaagcatgtga

SEQ ID NO: 43080 - protein, 494 aa, Hordeum vulgare
MDPCKFRPSSSFDTKTTTTNAGQPVWNDNEALTVGPRGPILLEDYHLLEKIAHFARERIPERVVHARGASAKGFFECTHDVTGLTCADFLRAPGARTPVIVRFSTVIHERGSPETIRDPRGFAVKFYTREGNWDLLGNNFPVFFIRDGIKFPDVIHAFKPNPKSHVQEYWRVFDFLSHHPESLHTFFFLFDDVGIPTDYRHMDGFGVNTYTFVSRAGKSHYVKFHWRPTCGVSCLMDDEATLVGGKNHSHATQDLYDSIDAGNFPEWKLFVQVIDPDEEDRFDFDPLDDTKTWPEDLVPLQPVGRLVLDRNVDNFFNENEQLAFGPGLVVPGIYYSDDKMLQCRVFAYADTQRYRLGPNYLMLPVNAPKCGFKNNHYDGAMNFMHRDEEVDYYPSRHAPLRHAEPASFPVPTRPVVGKREKTRIKKENDFVQPGERYRSWAPDRQDRFVRRFSDALAHPKVSHELRVIWIDFLSKCDKSCGMKVANRLNVKPSM

SEQ ID NO: 43081 - DNA, 1479 bp, Lycopersicon esculentum
  CDS (1)..(1479)
atggatccttacaagtaccgtccgtcaagtgctttcaattcacctttctgtaccactaattctggtgctcctgtttttaataacaattcatctcttacggttggtgcaagaggtcctgtgttgcttgaggattaccatttggtggagaaacttgccaactttgacagggaacgtattgcagaacgtgttgttcatgcccgaggtgctagtgccaaagggttttttgaagttactcatgacattgctcaccttacctgtgctgatttccttcgagctcctggtgtacagactccagtcattgtgagattctctactgttattcatgaaaggggtagtcctgaaactctgagggatcctcgtggttttgctgtcaagttttacaccagagagggaaactttgatctggtagggaacaacttccccgtcttcttcatccgtgatggaatgaagttccctgacatggtccatgctctgaagccaaatcctaagtcccatatccaggagaattggagggtccttgattttttctctcatcatcccgaaagcctgcacatgttcactttcctcttcgacgatattggtattccccaagattacaggcatatggacgggtctggtgtccacacattcacattgatcaacagggctggaaaatcaacttatgtgaagttccactggaagcccacatgtggtgtcaagtctttgttggaagaaaaggcaatccgagtcggaggagcaaatcacagccatgctactcaggacctctatgactctattgcagctggaaattatcctgaatggaaaccctccattcagattatgggtccagaacatgaagacaaatttgactttgatccacttgatgtgacaaaaacttggccagaggacatcttgcctttgcagccggtgggaagattagttctgaacaagaacattgataacttcctttatatgaatgagcagctagctttctgcccttctattgtggttccaggtgtttattactcagatgataagatgcttcaaactcgtattttctcctactctgatacccagaggtatcgacttggaccaaactatttgcaacttcctgctaatgctccaaagtgtgctcatcacaacaatcactatgatggctctatgaattttatgcacagggatgaggagatcgactacttcccttcaaggtatgatcaagttcgccatgctgaggtgtatcctattccttcaacagtttgcagtggcaaacgcgagaagtgtatcattcaaaaagagaacaatttcaagcaaccaggagaaaggtaccgctcattcacacccgacagacaagaacgctttattcgtcggtgggtggaggccttgtctgatcctcgtatcacttatgaaatacgcagcatttggatcacatactggtctcaggctgacaagtctttgggtcaaaagcttgcatctaggcttaatgtgagaccaagcatatga

SEQ ID NO: 43082 - protein, 492 aa, Lycopersicon esculentum
MDPYKYRPSSAFNSPFCTTNSGAPVFNNNSSLTVGARGPVLLEDYHLVEKLANFDRERIAERVVHARGASAKGFFEVTHDIAHLTCADFLRAPGVQTPVIVRFSTVIHERGSPETLRDPRGFAVKFYTREGNFDLVGNNFPVFFIRDGMKFPDMVHALKPNPKSHIQENWRVLDFFSHHPESLHMFTFLFDDIGIPQDYRHMDGSGVHTFTLINRAGKSTYVKFHWKPTCGVKSLLEEKAIRVGGANHSHATQDLYDSIAAGNYPEWKPSIQIMGPEHEDKFDFDPLDVTKTWPEDILPLQPVGRLVLNKNIDNFLYMNEQLAFCPSIVVPGVYYSDDKMLQTRIFSYSDTQRYRLGPNYLQLPANAPKCAHHNNHYDGSMNFMHRDEEIDYFPSRYDQVRHAEVYPIPSTVCSGKREKCIIQKENNFKQPGERYRSFTPDRQERFIRRWVEALSDPRITYEIRSIWITYWSQADKSLGQKLASRLNVRPSI

SEQ ID NO: 43083 - DNA, 1476 bp, Zea mays
  CDS (1)..(1476)
atggacccgtacaagcaccgcccgtcgagcgccttcaacgccccgtactggaccaccaactccggcgcccccgtgtggaacaacgacagctccctcaccgtaggcgcacgaggtcccatcctgctggaggactaccactgtgagaagctagccaacttcgaccgcgagcgcatcccggagcgcgtggtgcacgcgcgtggcgccagcgccaagggcttcttcgaggtgacccacgacatcacccacctgacgtgcgccgacttcctgcgcgcgcccggggtgcagacgcccgtcatcgtccgcttctccacggtcatccacgagcgcgggagccccgagacgctccgggacccgcgcgggttcgccgtcaagttctacacccgggagggcaactgggacctggtgggcaacaacttccccgtcttcttcatccgcgacggcatcaagttcccggacatggtgcacgcgctcaagcccaacccgcggacgcacatccaggacaactggcgcatcctcgacttcttctcgcaccacccggagagcctgcacatgttctccttcctcttcgacgacgtcggcatccccgccgactaccgccacatggacggatccggggtgcacacgtacacgctcgtcagccgcgccggcaccgtcacctacgtcaagttccactggcgccccacctgcggcgtgcgctcgctgatggacgacgaggccgtccgttgcggcgccaaccacagccacgccaccaaggacctcacggacgccatcgcggcggggaacttccccgagtggacgctctacatccagaccatggaccccgagatggaagaccgcctcgacgacctggacccgctggacgtgaccaagacgtggcccgaggacacgttcccgctgcagcccgtgggccgcctggtgctcaaccgcaacatcgacaacttcttcgcggagaacgagcagctggccttctgcccgggcctcatcgtccctggtatctactactccgacgacaagctgctgcagaccaggatcttctcctactccgacacgcagcgccaccgcctcggccccaactacctgctgctaccggccaacgcgcccaagtgcgcacaccacaacaaccactacgacggatccatgaacttcatgcaccgccacgaggaggtcgactacttcccctccaggtacgacgccgtcaggaacgcgccgaggtacccgatcccgaccgcccacatcgccggccgccgagagaagactgtgattagcaaggagaacaacttcaagcagcccggggagaggtaccgcgcgatggacccagcaaggcaagagcggttcataaccagatgggtcgacgcgctctccgacccccgcctcacccacgagatcaggaccatctggctctccaactggtctcaggccgacaggtctctgggccagaagctcgcgagccgcctcagcgccaagccgagcatgtaa

SEQ ID NO: 43084 - protein, 491 aa, Zea mays
MDPYKHRPSSAFNAPYWTTNSGAPVWNNDSSLTVGARGPILLEDYHCEKLANFDRERIPERVVHARGASAKGFFEVTHDITHLTCADFLRAPGVQTPVIVRFSTVIHERGSPETLRDPRGFAVKFYTREGNWDLVGNNFPVFFIRDGIKFPDMVHALKPNPRTHIQDNWRILDFFSHHPESLHMFSFLFDDVGIPADYRHMDGSGVHTYTLVSRAGTVTYVKFHWRPTCGVRSLMDDEAVRCGANHSHATKDLTDAIAAGNFPEWTLYIQTMDPEMEDRLDDLDPLDVTKTWPEDTFPLQPVGRLVLNRNIDNFFAENEQLAFCPGLIVPGIYYSDDKLLQTRIFSYSDTQRHRLGPNYLLLPANAPKCAHHNNHYDGSMNFMHRHEEVDYFPSRYDAVRNAPRYPIPTAHIAGRREKTVISKENNFKQPGERYRAMDPARQERFITRWVDALSDPRLTHEIRTIWLSNWSQADRSLGQKLASRLSAKPSM

SEQ ID NO: 43085 - DNA, 1479 bp, Nicotiana plumbaginifolia
  CDS (1)..(1479)
atggatccctctaagtttcgaccatcaagcgcatatgactcccctttcttgacaacaaatgctggcggtcctgtctacaacaacgtttcttccttgactgttggacctagagggcctgtccttcttgaggattatcacttaattgagaagcttgctacttttgatcgtgagaggatacccgagcgtgttgtccacgctagaggtgccagtgctaaaggtttctttgaagtcactcatgatatttctcatctcacttgtgctgattttctccgtgctcctggtgttcaaacacctgttattgtccgcttctctactgtcgtccatgagcgtggaagccccgagtcccttagggacattcgcggttttgctgtcaaattttacaccagagagggtaactttgatctggttggaaacaacgttcctgtcttctttaatcgtgatgcaaaatcgttccctgacacgatccgtgcactgaaaccaaatccaaagtcacacattcaggaatactggaggatccttgatttcttctctttccttccagagagtttgcatacgttcgcctggttctttgatgatgtttgtctcccgataaattacagacacatggaaggttatggtgtccacgcctatcaattaatcaacaaggctggaaaagcacattatgtgaagtttcactggaagccaacttgtggtgtcaagtgcatgacagaggaagaagctattagggtcggaggtacaaatcatagtcacgccaccaaggatctgtacgattcgattgctgttggaaactatcccgagtggaaactctctatccacattatggaccctgaggatgttgaaagattcgactttgatcctcttgatgtaaccaagatctggcctgaggatatcttgccattgatgccagttggtcgattggtacttaacaggaatatcgataacttctttgctgagaacgagcagctcgcgtttaaccctggccatattgtccctggtctgtactattcggaggataagcttctccagacaaggatattcgcgtatgctgatactcagagacaccgtattggaccaaactatatgcagcttcctgttaatgctcccaagtgtgctcatcacaataatcaccgcgatggtgccatgaacttcatgcatcgcgatgaagaggtggattatttgccctcaaggttcgatccttgtcgtcatgctgaacagtacccaattccttctcgtgtcttgaatggaaggcgtgaaatgtgtgtcattgagaaagagaacaacttcaagcaggcaggagagagatacagatcctgggaacctgacaggcaagacagatacgttagcaaatgggttgagcatttatctgatccccgagtcacttatgagatacgcagtatatggatatcatacttgtctcaggctgacaagtcttgtggtcagaaggtcgcttctcgtctcactttaaagcctacaatgtga

SEQ ID NO: 43086 - protein, 492 aa, Nicotiana plumbaginifolia
MDPSKFRPSSAYDSPFLTTNAGGPVYNNVSSLTVGPRGPVLLEDYHLIEKLATFDRERIPERVVHARGASAKGFFEVTHDISHLTCADFLRAPGVQTPVIVRFSTVVHERGSPESLRDIRGFAVKFYTREGNFDLVGNNVPVFFNRDAKSFPDTIRALKPNPKSHIQEYWRILDFFSFLPESLHTFAWFFDDVCLPINYRHMEGYGVHAYQLINKAGKAHYVKFHWKPTCGVKCMTEEEAIRVGGTNHSHATKDLYDSIAVGNYPEWKLSIHIMDPEDVERFDFDPLDVTKIWPEDILPLMPVGRLVLNRNIDNFFAENEQLAFNPGHIVPGLYYSEDKLLQTRIFAYADTQRHRIGPNYMQLPVNAPKCAHHNNHRDGAMNFMHRDEEVDYLPSRFDPCRHAEQYPIPSRVLNGRREMCVIEKENNFKQAGERYRSWEPDRQDRYVSKWVEHLSDPRVTYEIRSIWISYLSQADKSCGQKVASRLTLKPTM

SEQ ID NO: 43087 - DNA, 1479 bp, Ricinus communis
  CDS (1)..(1479)
atggatccttacaagtttcgcccatcaagctctaatgacacgcccttttggactaccaatgccggtgatccagtttccaacaacaattcctccatgacagttggacccagaggtccaattcttctcgaggactatcatatgatagagaaacttgccaactttactagggaaaggattccagagcgtgttgtccatgctagaggaatgagtgctaagggtttctttgaggtcacccatgatgtcactgaccttacatgcgctgatttccttcgtgcccccggtgttcagactcctgtcattgtccgtttctccactgttattcatgagcgtggcagccctgaaaccctcagagaccctcgaggttttgctaccaagttttacaccagagagggtaactttgatatagtgggaaacaacttcccagttttcttcatccgcgatggaattaaattcccagacgtggtccatgcatttaagcccaaccctaagtctcacatccaggagtattggaggatctttgatttctgctcacaccatcctgaaagtttgagcactttcgcctggttctttgatgatgtcggcattcctcaagattatagacacatggaagggtttggtgttcacacctactgtctaatcaacaaggctggaaaagttacctatgtcaaatttcactggaaacccacttgcggtgtcaagtgtttgatggatgatgaggctattaaggtcggaggagccaatcacagtcatgctactcaggatttatatgattccattgctgctggcaattttcctgagtggaaactcatgatccagacaatggatcctgcggatgaagacaaattctcctttgatccacttgatatgaccaagatttggcctgaggatatgttccccttgcatccagttgggcgattggtcttgaacaggaacatcgataactggtttgctgagaatgagatgcttgcattcaaccctgctcatgtggttcctggagtttactactccaatgataagttattccagcttaggctatttgcctatagtgatactcagaggcaccgactaggaacaaactatctacagctccctgtcaatgctcctaagtgtccttatcacaacaatcattatgatggtttcatgaatttcatgcacagagatgaggaggttgattacttccaatccagatatgatccagtccgccatgctgagaaagtccccattcctaatgctatctgcagtggcaggcgtgagaagtgtgtgattgagaaggaggacaacttcaggcaacctggagacaggtatcgatcatgggcaccagacaggcaagaaagattcttatgcagattggttaatgccttatcagaaccgcgtatcacccatgaaatccgcagtatctgggtctcatggtggactcagtgtgacaaatctctgggtcagaagctagcatctcgtcttaatgtgagaccaaacatctga

SEQ ID NO: 43088 - protein, 492 aa, Ricinus communis
MDPYKFRPSSSNDTPFWTTNAGDPVSNNNSSMTVGPRGPILLEDYHMIEKLANFTRERIPERVVHARGMSAKGFFEVTHDVTDLTCADFLRAPGVQTPVIVRFSTVIHERGSPETLRDPRGFATKFYTREGNFDIVGNNFPVFFIRDGIKFPDVVHAFKPNPKSHIQEYWRIFDFCSHHPESLSTFAWFFDDVGIPQDYRHMEGFGVHTYCLINKAGKVTYVKFHWKPTCGVKCLMDDEAIKVGGANHSHATQDLYDSIAAGNFPEWKLMIQTMDPADEDKFSFDPLDMTKIWPEDMFPLHPVGRLVLNRNIDNWFAENEMLAFNPAHVVPGVYYSNDKLFQLRLFAYSDTQRHRLGTNYLQLPVNAPKCPYHNNHYDGFMNFMHRDEEVDYFQSRYDPVRHAEKVPIPNAICSGRREKCVIEKEDNFRQPGDRYRSWAPDRQERFLCRLVNALSEPRITHEIRSIWVSWWTQCDKSLGQKLASRLNVRPNI

SEQ ID NO: 43089 - DNA, 1479 bp, Triticum aestivum
  CDS (1)..(1479)
atggatccctacaagcaccggcccacgagcggggccaactccgcctactggaccaccaactccggcgcccccgtctggaacaacaacaacgccctcaccgtcggacaccgaggacctatcctccttgaggattaccatctgattgaaaagcttgcacaatttgaccgggaacgcatacctgaacgtgttgttcatgcacggggagccagtgcaaaggggttctttgaggtgactcatgatgtttctcagctcacatgtgctgactttctccgggctcctggggttcagaccccggttattgtccggttctctaccgttgtgcatgagcgtggaagccctgagaccctcagggatccacgtggttttgcagtgaagttctacaccagagagggtaactttgaccttgttgggaacaatatgcctgtgttttttatccgagatgggatgaagttccctgacatggtccatgctttcaagccaagttcgaagaccaacatgcaggagaactggagagtagttgacttcttttcgcaccacccggagagtctgcacatgttcaccttcctatttgacgatgttggcattccactcaactacaggcacatggacggttttggtgtcaacacctacaccttaatcagcagggatggaaaggctcacctggttaagttccattggaaacctacatgtggtgtgaagtgcctcttggatgatgaagctgttactgttggaggcacctgccacacccatgccacaaaggacttgactgattctattgcagctgggaattacccagaatggaagcttttcatccagaccattgatgctgatcacgaggatagatttgactttgaccctcttgatgtcaccaagacctggccagaggacatcatcccactgcaaccagttggacggatggtactgaacaagaacattgacaatttcttcgcggaaaatgaacagcttgctttctgcccagcagtcactgtccctggaatccactactctgatgataagctgctccagacaaggatcttctcatatgctgatacccaaaggcaccgtcttggtccaaactacttgatgctccccgtgaatgccccgaaatgtgctcaccacaacaaccatcatgatggcttaatgaatttcattcacagggatgaggaggtgaactacttcccttcaagggttgatcctactcgtcatgctgaaaaggaccctatgcctccgcgtgttctatctggctgccgggagaagtgcattatcgacaaggagaacaatttcaagcaggctggtgagagatatcggtccttcgaccctgccaggcaagaccgtttcctccagcggtgggttgatgcgctcacggatgctcgtgtcacccatgaaatccagagcatctgggtctcatactggtcacagtgcgatgcgtccctcgggcagaagctggcgtcgcggctcaagattaagccgaacatgtaa

SEQ ID NO: 43090 - protein, 492 aa, Triticum aestivum
MDPYKHRPTSGANSAYWTTNSGAPVWNNNNALTVGHRGPILLEDYHLIEKLAQFDRERIPERVVHARGASAKGFFEVTHDVSQLTCADFLRAPGVQTPVIVRFSTVVHERGSPETLRDPRGFAVKFYTREGNFDLVGNNMPVFFIRDGMKFPDMVHAFKPSSKTNMQENWRVVDFFSHHPESLHMFTFLFDDVGIPLNYRHMDGFGVNTYTLISRDGKAHLVKFHWKPTCGVKCLLDDEAVTVGGTCHTHATKDLTDSIAAGNYPEWKLFIQTIDADHEDRFDFDPLDVTKTWPEDIIPLQPVGRMVLNKNIDNFFAENEQLAFCPAVTVPGIHYSDDKLLQTRIFSYADTQRHRLGPNYLMLPVNAPKCAHHNNHHDGLMNFIHRDEEVNYFPSRVDPTRHAEKDPMPPRVLSGCREKCIIDKENNFKQAGERYRSFDPARQDRFLQRWVDALTDARVTHEIQSIWVSYWSQCDASLGQKLASRLKIKPNM

SEQ ID NO: 43091 - DNA, 1479 bp, Arabidopsis thaliana
  CDS (1)..(1479)
atggatccttacaagtatcgtccttcaagcgcgtacaacgccccattctacaccacaaacggtggtgctccagtctccaacaacatctcttccctcaccatcggagaaagaggtccggttcttcttgaggattatcatttgatcgagaaggttgctaatttcaccagagagaggatccctgagagagtggttcatgctagaggaatcagtgctaagggtttctttgaagtcacccatgacatttcaaacctcacttgtgctgattttctcagagcccctggtgttcaaactccggttattgtccgtttctccaccgttgtccacgaacgtgccagtcctgaaaccatgagggatattcgtggttttgctgtcaagttttacaccagagagggaaactttgatcttgttgggaacaacactccggtgttcttcatccgtgatgggattcagttcccggatgttgtccacgcgttgaaacctaacccgaaaacaaacatccaagagtactggaggattctggactacatgtcccacttgcctgagagtttgctcacatggtgctggatgtttgatgatgttggtattccacaagattacaggcacatggagggtttcggtgtccacacctacactcttattgccaaatctggaaaagttctctttgtgaagttccactggaaaccaacttgtgggatcaagaatctgactgatgaagaggccaaggttgttggaggagccaatcacagccacgccactaaggatctccacgatgccattgcatctggcaactaccccgagtggaaacttttcatccagaccatggatcctgcagatgaggataagtttgactttgacccacttgatgtgaccaagatctggcctgaggatattttgcctctgcaaccggttggtcgcttggttctgaacaggaccattgacaatttcttcaatgaaactgagcagcttgcgttcaacccgggtcttgtggttcctggaatctactactcagacgacaagctgctccagtgtaggatctttgcttatggtgacactcagagacatcgccttggaccgaattatttgcagcttccagtcaatgctcccaaatgtgctcaccacaacaatcaccatgaaggttttatgaacttcatgcacagagatgaggagatcaattactacccctcaaagtttgatcctgtccgctgcgctgagaaagttcccacccctacaaactcctacactggaattcgaacaaagtgcgtcatcaagaaagagaacaacttcaaacaggctggagacaggtacagatcatgggcaccagacaggcaagacaggtttgttaagagatgggtggagattctatcggagccacgtctcacccacgagatccgcggcatctggatctcttactggtctcaggctgatcgatccttgggacagaaacttgcaagccgtctgaacgtgaggccaagcatctag

SEQ ID NO: 43092 - protein, 492 aa, Arabidopsis thaliana
MDPYKYRPSSAYNAPFYTTNGGAPVSNNISSLTIGERGPVLLEDYHLIEKVANFTRERIPERVVHARGISAKGFFEVTHDISNLTCADFLRAPGVQTPVIVRFSTVVHERASPETMRDIRGFAVKFYTREGNFDLVGNNTPVFFIRDGIQFPDVVHALKPNPKTNIQEYWRILDYMSHLPESLLTWCWMFDDVGIPQDYRHMEGFGVHTYTLIAKSGKVLFVKFHWKPTCGIKNLTDEEAKVVGGANHSHATKDLHDAIASGNYPEWKLFIQTMDPADEDKFDFDPLDVTKIWPEDILPLQPVGRLVLNRTIDNFFNETEQLAFNPGLVVPGIYYSDDKLLQCRIFAYGDTQRHRLGPNYLQLPVNAPKCAHHNNHHEGFMNFMHRDEEINYYPSKFDPVRCAEKVPTPTNSYTGIRTKCVIKKENNFKQAGDRYRSWAPDRQDRFVKRWVEILSEPRLTHEIRGIWISYWSQADRSLGQKLASRLNVRPSI

SEQ ID NO: 43093 - DNA, 1479 bp, Cucurbita pepo
  CDS (1)..(1479)
atggatccctacaagtaccgcccttcaagtgcctacaacacgcccttttgcaccaccaactccggtgcaccaatatggaacaacaccgccgtcatgtcggtcggagaacgaggtcccattcttttggaagactaccaactcattgaaaaaatcgcaaccttcacacgcgagcgtatcccggagcgtgttgtccaccgaagaggagccagtgccaagggattctttgaagtaacccatgacatttccaacctcacttgcgccgacttccttcgcgcccccggagtccaaaccccagtcatcgtccgcttctccaccgtcatccacgaacgcggtagccctgagaccctccgcgatccccgtggcttcgccgtcaaattctacacacgagaaggcaacttcgacttggtcggtaataacttcccggtcttcttcgtccgcgacgccatgcaattccccgacgtcatccgcgcgttcaaaccaaaccctaaatcccatctccaagaaccatggagatacctggatttctgttcttaccaccccgaaagtctgttgtcgtttgcttggttttacgacgacgtcggcatcccgatcaactaccgccacatggagggctttggcgtgcaagcttactccttaatcaacaaatccggcaaagcccggctcgtgaaattccattggaaacccacttgtggggttaaaagcatgatggaggaggaagccattagaattggtgggacgaaccacagccatgccactcaagatctatacgagtcaatagccgccgggaacttcccggagtggaggctctacattcaaaccattgattacgaggatcagaataagtatgattttgagccgttggatacgacgatcacttggccggaggatgtggtgccgttgcagccggtggggcggttggtgttgaacaagaacatagataatttctttgcggagaatgagatgttggcgttctccatgtcgttggtgcctgggattcattactccgatgataagatgttgcaagctaggagctttgcttatgctgatactcaaaggcatcgccttggccctaattaccttcagcttccggtcaatgctcccaagtgtccgcatcataataaccatcatgaggggtttatgaacttcatgcatagagatgaagaggtgaattactttccttctagatatgatccttgccggcatgctgagaagtttccgatgccgcccaatgtgttgaccggaaaaagagaaaggtgtgtgattccaaaggagaataacaacttcaagcaagctggggatagataccgatcatgggcaccggacaggcaagaccggttcgtgaagcggtttgtggaagcgttgtcggatccccgcgtgaccgatgaagttcgcaacatatggatctcttattggtctcaagctgataggtctctgggccaaaagatagcgtctcgactgaacgtgaggccgaacatctaa

SEQ ID NO: 43094 - protein, 492 aa, Cucurbita pepo
MDPYKYRPSSAYNTPFCTTNSGAPIWNNTAVMSVGERGPILLEDYQLIEKIATFTRERIPERVVHRRGASAKGFFEVTHDISNLTCADFLRAPGVQTPVIVRFSTVIHERGSPETLRDPRGFAVKFYTREGNFDLVGNNFPVFFVRDAMQFPDVIRAFKPNPKSHLQEPWRYLDFCSYHPESLLSFAWFYDDVGIPINYRHMEGFGVQAYSLINKSGKARLVKFHWKPTCGVKSMMEEEAIRIGGTNHSHATQDLYESIAAGNFPEWRLYIQTIDYEDQNKYDFEPLDTTITWPEDVVPLQPVGRLVLNKNIDNFFAENEMLAFSMSLVPGIHYSDDKMLQARSFAYADTQRHRLGPNYLQLPVNAPKCPHHNNHHEGFMNFMHRDEEVNYFPSRYDPCRHAEKFPMPPNVLTGKRERCVIPKENNNFKQAGDRYRSWAPDRQDRFVKRFVEALSDPRVTDEVRNIWISYWSQADRSLGQKIASRLNVRPNI

SEQ ID NO: 43095 - DNA, 1491 bp, Zea mays
  CDS (1)..(1491)
atgacaatggatcctaccaagttccgtccgtccagcagccacgacacgacggtgacgacgacgaacgctggcgctcctgtgtggaacgacaacgaggcgctgactgtggggcctcgcggtcccatcctgctggaggactaccacctgatcgagaaggtggcgcacttcgcgcgcgagcgcatcccggagcgcgtggtgcacgcgcgcggcgcgtccgccaagggcttcttcgagtgcacccacgacgtgacgtcgctgacgtgcgccgacttcctgcgcgcgcccggcgtgcggacgcccgtgatcgtgcgcttctcgacggtgatccacgagcgggggtccccggagacgatccgcgacccgcgcgggttcgccgtgaagttctacacccgcgagggcaactgggacctgctgggcaacaacttccccgtcttcttcatccgcgacggcatcaagttccccgacgtgatccacgcgttcaagcccaacccgcggtcgcacgtgcaggagtactggcgggtgttcgacttcctgtcgcacctccccgagagcctgcacaccttcttcttcctcttcgacgacgtgggcgtgccgtccgactaccgccacatggaagggttcggcgtgaacacgtacacgttcgtgagcgcggcggggaaggcgcagtacgtgaagttccactggaagccgacgtgcggcgtgcggtgcatcctgacggacgaggaggcggcgctggtcgggggacggaaccacagccacgcgacgcaggacctgtacgactccatcgcggcggggagcttcccggagtggacgctgtacgtgcaggtgatggacccggacacggaggagcagtacgacttcgacccgctggacgacaccaagacgtggccggaggacctgctgccgctccgccccgtggggaggctggtgctggacaggaacgtggacaacttcttcaacgagaacgagcagctggcgttcgggccggggctggtggtgccagggatctactactcggacgacaagatgctgcagtgccgggtgttcgcctacgccgacacgcagcgctacaggctgggtcccaactacctgatgctgcccgtcaacgcgccgcgctgcgcgcaccacaacaaccactacgacggcgccatgaacttcatgcaccgcgacgaggaggtggactactacccgtccaggcacgcgccgctgcggcaggcggcgccgcccacgccactgccgcccaggccggtcgcggggaggagggagaaggcaaccatacgcaagcccaacgacttcaagcagccaggggagaggtaccgctcctgggacgccgaccgacaggaccgattcgtgaggcgattcgccgactcgctcggacacccaaaggtcagccaggagctcaggtccatctggatagacctcctcgccaagtgcgacgcgtcgctggggatgaagattgccacccggctcaacatgaaggcaaacatgtga

SEQ ID NO: 43096 - protein, 496 aa, Zea mays
MTMDPTKFRPSSSHDTTVTTTNAGAPVWNDNEALTVGPRGPILLEDYHLIEKVAHFARERIPERVVHARGASAKGFFECTHDVTSLTCADFLRAPGVRTPVIVRFSTVIHERGSPETIRDPRGFAVKFYTREGNWDLLGNNFPVFFIRDGIKFPDVIHAFKPNPRSHVQEYWRVFDFLSHLPESLHTFFFLFDDVGVPSDYRHMEGFGVNTYTFVSAAGKAQYVKFHWKPTCGVRCILTDEEAALVGGRNHSHATQDLYDSIAAGSFPEWTLYVQVMDPDTEEQYDFDPLDDTKTWPEDLLPLRPVGRLVLDRNVDNFFNENEQLAFGPGLVVPGIYYSDDKMLQCRVFAYADTQRYRLGPNYLMLPVNAPRCAHHNNHYDGAMNFMHRDEEVDYYPSRHAPLRQAAPPTPLPPRPVAGRREKATIRKPNDFKQPGERYRSWDADRQDRFVRRFADSLGHPKVSQELRSIWIDLLAKCDASLGMKIATRLNMKANM

SEQ ID NO: 43097 - DNA, 2160 bp, Neurospora crassa
  CDS (1)..(2160)
atgcgtgtcaacgctcttctaccgttgagcggccttattggcactgctctagcggcatgcccctttgccgacccttctgctcttggtcgccgtgccgagggcggtgaggttgacgcccgtcagaggttgaaggaggttgaggttgacgacaacggccaattcatgacaacagatttcggcggcaacattgaggaacagttcagtctgaaggctggtggccggggctcgacattgcttgaggacttcatcttccgtcagaagctccagcacttcgaccatgagcgcattcccgagagagtcgttcatgcccgtggtgccggtgcccacggtatcttcaccagttatggcgactggtccaacatcaccgccgcctccttcctgggcgccaaggacaagcaaacaccggtcttcgtccgcttctctaccgttgccggttccaggggttccgccgacactgcccgtgatgttcacggcttcgccacgagattctataccgacgagggcaactttgatatcgtcggcaacaacattcccgtctttttcatccaggatgccatccgcttccccgaccttattcactccgtcaagcctagccccgacaatgaggttccccaagccgccaccgcccacgactccgcttgggacttcttcagctcccagccctccgctctccacaccctcttctgggccatgtctggcaacggtattccccgcagctaccgtcatatggatggtttcggtatccataccttccgtctggtgaccgaggacggcaagtccaagctcgtcaagtggcattggaagacgaaacagggaaaggccgctctcgtctgggaggaggctcaagtcctcgccggcaagaacgccgacttccaccgtcaggatctctgggacgctatcgagtccggaaacgccccttcatgggagctcgccgttcagcttattgacgaggacaaggcccaggcttacggcttcgaccttcttgatcccaccaagttccttcccgaggagttcgcccctctccaggttctcggtgagatgaccctcaaccgcaaccctatgaactacttcgccgagaccgagcagatctccttccagcccggccacattgttcgcggcgtcgacttcaccgaggatcccctgctgcagggtcgtctctacagctacctcgacacccagctcaaccgccacaggggccccaactttgagcagctccccatcaaccgccctgtctctggcgtccacaacaaccaccgcgacggtcaaggccaggcttggatccacaagaacatccaccactacagcccgtcttacctcaacaagggctaccctgcccaggccaaccagaccgtcggccgcggcttcttcactacccccggccgcaccgcgtctggcgtcctgaaccgcgagctcagcgccacctttgacgaccactacacccagccccggctcttcttcaactcgctcacccccgtcgagcagcagttcgtcatcaacgcgatccgcttcgaggccagccacgtcaccaacgagcaggtcaagaagaacgttctcgagcagcttaacaagatctccaacgacgtggccaagcgcgtggccgttgcgctcggcctcgaggcgccccagcccgacccgacctactaccacaacaatgtcacccgcggcgtttccatcttcaacgagagcctccccaccatcgccaccctccgcgtcggcgtcctctccaccaccaagggcggctccctcgacaaggccaaggccctcaaggagcagctcgagaaggacggcctcaaggtcaccgtcatcgccgagtaccttgccagcggtgtcgaccagacctactccgctgccgacgccaccgccttcgatgccgttgtcgtggccgagggcgctgagcgcgtcttcagcggcaagggcgccatgagccctcttttccctgctggccgtcctagccagattcttactgatggttaccgctggggtaagcccgttgctgccgtcggcagcgccaagaaggcgctccagagcatcggggtagaggagaaggaggccggtgtttatgccggtgctcaggacgaggttatcaagggcgtcgaggagggcctcaaggtgttcaagttccttgagcgtttcgccgttgatggcgatgatgaggagtaa

SEQ ID NO: 43098 - protein, 719 aa, Neurospora crassa
MRVNALLPLSGLIGTALAACPFADPSALGRRAEGGEVDARQRLKEVEVDDNGQFMTTDFGGNIEEQFSLKAGGRGSTLLEDFIFRQKLQHFDHERIPERVVHARGAGAHGIFTSYGDWSNITAASFLGAKDKQTPVFVRFSTVAGSRGSADTARDVHGFATRFYTDEGNFDIVGNNIPVFFIQDAIRFPDLIHSVKPSPDNEVPQAATAHDSAWDFFSSQPSALHTLFWAMSGNGIPRSYRHMDGFGIHTFRLVTEDGKSKLVKWHWKTKQGKAALVWEEAQVLAGKNADFHRQDLWDAIESGNAPSWELAVQLIDEDKAQAYGFDLLDPTKFLPEEFAPLQVLGEMTLNRNPMNYFAETEQISFQPGHIVRGVDFTEDPLLQGRLYSYLDTQLNRHRGPNFEQLPINRPVSGVHNNHRDGQGQAWIHKNIHHYSPSYLNKGYPAQANQTVGRGFFTTPGRTASGVLNRELSATFDDHYTQPRLFFNSLTPVEQQFVINAIRFEASHVTNEQVKKNVLEQLNKISNDVAKRVAVALGLEAPQPDPTYYHNNVTRGVSIFNESLPTIATLRVGVLSTTKGGSLDKAKALKEQLEKDGLKVTVIAEYLASGVDQTYSAADATAFDAVVVAEGAERVFSGKGAMSPLFPAGRPSQILTDGYRWGKPVAAVGSAKKALQSIGVEEKEAGVYAGAQDEVIKGVEEGLKVFKFLERFAVDGDDEE

SEQ ID NO: 43099 - DNA, 1479 bp, Nicotiana plumbaginifolia
  CDS (1)..(1479)
atggatccatacaagtatcgtccttcaagtgctaacaattcccccttctggacaactaattctggtgctcctgtgtggaacaacaactcttccatgactgttggaactagaggcccaattcttcttgaggattatcatctggtggagaagcttgccaattttgatcgtgaacgaattccggagcgcgttgttcatgccagaggtgccagtgccaagggtttctttgaggtcacacatgatattacccatcttacatgtgctgatttcctccgagctcctggggtccagacacctgttattgtgaggttctctactgttatccacgagcgtggaagccctgaaaccctcagggaccccagaggatttgctgtaaaattttacaccagagagggcaactttgatttggttggaaacaacttccccgtcttctttgtccgtgatgggatgaagttccctgacatggttcatgcactgaaaccaaatccaaagtcccacattcaggagaactggaggatccttgatttcttctctcatcatccagaaagtctgcatatgttctccttcctgtttgatgatctcggtgtcccacaagattacaggcacatggaaggttccggtgttaatacctacatgttgatcaacaaagctgggaaagcacattatgtgaaattccattggaagccaacttgtggagtcaagtgcttgttggaggaagaagctattaaggtaggaggagcgaatcatagtcacgccaccaaggatctctacgattcaattgctgctggaaactatccagagtggaaactgttcatccaaattatcgatcctgatcatgaagacagatttgactttgaccccctagatgtaaccaagacctggcctgaggacatcttgccattgcagccagttggtcgcttggtattgaataagaatatcgataacttctttgcagagaatgaacagcttgccttttggcctgccattgttgtccctggtgtttactgttcggatgacaagcttctccagactaggatattctcatattctgatgcccagagacaccgtcttgggccaaactatctgcagctcccagttaacgctcccaagtgtgctcatcacaataatcaccatgaaggtttcatgaatttcatgcaccgcgatgaagaggtcaactatttcccctcaaggtttgatccttgtcgtcatgcagaacagtatccaattcctccttgtgtcttgacaggaaaacgtgacaagtgcatcattgaaaaagagaacaacttcaagcagccgggagagagatacagatcttgggcaccggacaggcaagaaagatttatctgcagatgggttgatgctctatccgatcctcgagtcactcatgagatacgcagtatctggttttcatactggtcacaggctgacaaaactcttggtcagaagatcgcgtcccgtctcaatgtcaggcccacaatgtga

SEQ ID NO: 43100 - protein, 492 aa, Nicotiana plumbaginifolia
MDPYKYRPSSANNSPFWTTNSGAPVWNNNSSMTVGTRGPILLEDYHLVEKLANFDRERIPERVVHARGASAKGFFEVTHDITHLTCADFLRAPGVQTPVIVRFSTVIHERGSPETLRDPRGFAVKFYTREGNFDLVGNNFPVFFVRDGMKFPDMVHALKPNPKSHIQENWRILDFFSHHPESLHMFSFLFDDLGVPQDYRHMEGSGVNTYMLINKAGKAHYVKFHWKPTCGVKCLLEEEAIKVGGANHSHATKDLYDSIAAGNYPEWKLFIQIIDPDHEDRFDFDPLDVTKTWPEDILPLQPVGRLVLNKNIDNFFAENEQLAFWPAIVVPGVYCSDDKLLQTRIFSYSDAQRHRLGPNYLQLPVNAPKCAHHNNHHEGFMNFMHRDEEVNYFPSRFDPCRHAEQYPIPPCVLTGKRDKCIIEKENNFKQPGERYRSWAPDRQERFICRWVDALSDPRVTHEIRSIWFSYWSQADKTLGQKIASRLNVRPTM

SEQ ID NO: 43101 - DNA, 1479 bp, Glycine max
  CDS (1)..(1479)
atggatccctacaagaatcggccatcaagcgccttcaattctcccttctggactactaattccggtgctcccatctggaacaacaactcatcgctgactgttggatctagaggtccaattctgctggaagattaccatctggtggagaagcttgcaaactttgacagggaacggatccccgaacgtgttgtccatgctcgtggagctagcgcaaagggtttctttgaagtcacgcatgacatttctcacctcacatgtgccgatttcctccgagcccctggagttcagacccctctcatcgtccgtttctccactgttatccacgaacgtggcagccctgaaaccctcagggatcccagaggtttcgctgtgaaattctacactagagagggtaacttcgaccttgtgggaaacaacttccctgtcttcttcgtccgcgatggcctcaagtttcctgacatggtccatgctctcaaacccaaccccaagtcccacatccaggagaattggaggatcctcgatttcttctcccaccatcccgaaagccttcacatgttctccttcttattcgatgacgttggtatccctcaagattacaggcatatggatggttttggtgttaacacttacacccttatcaacaaggctggcaaagccgtctatgtcaaatttcattggaaaaccacctgtggcgaaaagtgtctcttggacgacgaggccattagggttggaggatcgaaccacagtcatgccacccaagacctttacgattcaattgctgctggaaactatcctgagtggaaactctacatccaaacattggatcccgaaaacgaagacaggcttgactttgacccccttgatgtaactaagacctggcctgaggacgttttgcccctccagcctgttggccgcatggtcttgaataagaacattgataacttctttgccgagaacgaacaacttgcattttgccctgcaattattgtacctggtgtatactactccgacgataaattgcttcagactcgcatattctcctatgctgatacccaaagacacagacttgggccaaattatctgcagcttcctgctaattcccccaagtgtgcccatcacaacaatcaccatgatggtttcatgaatttcatgcacagggatgaagaggtcaattacttcccttcaaggtatgatcctgtccgtcacgcggaaagggtccccgttcctccacgtaccctaggtgggaagcgtgaaaagtgcatgattgagaaggagaacaacttcaagcaacctggggagagataccgatcctggccctctgacaggcaagaaagatttgtccgccgatgggttgatgctttgtctgacccacgtgtcacccatgaaatccgcagcatctggatatcatactggtctcaggctgatcgttctcttggacaaaagatagcatctcacttgaacttgaagccaagtatctaa

SEQ ID NO: 43102 - protein, 492 aa, Glycine max
MDPYKNRPSSAFNSPFWTTNSGAPIWNNNSSLTVGSRGPILLEDYHLVEKLANFDRERIPERVVHARGASAKGFFEVTHDISHLTCADFLRAPGVQTPLIVRFSTVIHERGSPETLRDPRGFAVKFYTREGNFDLVGNNFPVFFVRDGLKFPDMVHALKPNPKSHIQENWRILDFFSHHPESLHMFSFLFDDVGIPQDYRHMDGFGVNTYTLINKAGKAVYVKFHWKTTCGEKCLLDDEAIRVGGSNHSHATQDLYDSIAAGNYPEWKLYIQTLDPENEDRLDFDPLDVTKTWPEDVLPLQPVGRMVLNKNIDNFFAENEQLAFCPAIIVPGVYYSDDKLLQTRIFSYADTQRHRLGPNYLQLPANSPKCAHHNNHHDGFMNFMHRDEEVNYFPSRYDPVRHAERVPVPPRTLGGKREKCMIEKENNFKQPGERYRSWPSDRQERFVRRWVDALSDPRVTHEIRSIWISYWSQADRSLGQKIASHLNLKPSI

SEQ ID NO: 43103 - DNA, 1479 bp, Glycine max
  CDS (1)..(1479)
atggatccctacaagcaccggccatccagcgccttcaattctcccttctggactacaaattctggtgctcctatttggaacaacaactcctctttaaccgttggagctagaggtccaattctgctggaggattatcatcttgtggagaagcttgcaaattttgatagggaacgtatcccagaacgtgttgtccatgccaggggcgctagtgcaaagggtttctttgaggtcacccatgacatttctcacctgacatgtgcagatttccttcgagcccctggagttcagacgcctgtaattgttcgtttctcaactgtcattcatgagcgtggtagccctgaaaccttgagggaccctcgaggttttgccgtgaagttttacaccagagaaggtaactttgaccttgttggaaacaaccttcccgtcttctttgtacgtgatggcatgaagtttccagatatggttcatgctcttaaacccaatcccaagaaccacatccaggagaattggaggatccttgacttcttctctcactttccagaaagccttcacatgttcacctttttatttgatgatttgggtgttccacaagattacaggcatatggatggttttggagttaacacatacacactgatcaacaaggctgggaaagcagtgtatgtgaaatttcactggaagaccactagtggtataaagtgtctattggaggaagaggccattaaggtgggaggagccaaccacagccatgccactcaagaccttcatgattcaattgctgctggtaactatcctgagtggaaactgttcgttcagacaatagatcctgagcatgaagacaaatttgactttgaccctcttgatgttactaagacttggcctgaggacattatacccttgcagcctgttggtcgcttggtcctgaataaaaacatagataatttctttgctgagaatgaacaacttgcattttgccctgccattgtggttcctggtgtatactactcagatgataagatgcttcagaccaggatattctcttatgctgattcacaaaggcacagacttggaccaaactatctgcaacttcctgctaatgctcccaagtgtgctcaccacaataatcatcatgaaggtttcatgaatttcattcacagggatgaggaggtcaattacttcccttcaaggtatgatcctgttcgtcatgcagaaaggttccccatacctcctgctatctgcagtggaaggcgtgaaaagtgtggaattgagaaggagaacaacttcaagcagcccggagagagataccggtcttgggcacctgacaggcaagatagatttgctcgccgatgggttgatgctttatctgacccacgggtcacccatgagatccgcagtgtctggatatcatactggtctcaggctgaccgttctctaggccaaaagatagcttctcatctcagcacgaggccaaatatttaa

SEQ ID NO: 43104 - protein, 492 aa, Glycine max
MDPYKHRPSSAFNSPFWTTNSGAPIWNNNSSLTVGARGPILLEDYHLVEKLANFDRERIPERVVHARGASAKGFFEVTHDISHLTCADFLRAPGVQTPVIVRFSTVIHERGSPETLRDPRGFAVKFYTREGNFDLVGNNLPVFFVRDGMKFPDMVHALKPNPKNHIQENWRILDFFSHFPESLHMFTFLFDDLGVPQDYRHMDGFGVNTYTLINKAGKAVYVKFHWKTTSGIKCLLEEEAIKVGGANHSHATQDLHDSIAAGNYPEWKLFVQTIDPEHEDKFDFDPLDVTKTWPEDIIPLQPVGRLVLNKNIDNFFAENEQLAFCPAIVVPGVYYSDDKMLQTRIFSYADSQRHRLGPNYLQLPANAPKCAHHNNHHEGFMNFIHRDEEVNYFPSRYDPVRHAERFPIPPAICSGRREKCGIEKENNFKQPGERYRSWAPDRQDRFARRWVDALSDPRVTHEIRSVWISYWSQADRSLGQKIASHLSTRPNI

SEQ ID NO: 43105 - DNA, 2250 bp, Aspergillus fumigatus
  CDS (1)..(2250)
atggccacaaagattgctggaggcttacacagagcgcaggaagtgcttcaaaacacatcctctaaaagcaagaaattggtcgatttagaaagagatacggccgatgcgcatacccagcagccattgactacggatcacggtgtacgagtcagcaacaccgatcaatggcttagagttacgaatgaccgccgaactggcccatccttgctggaggatcagattgccagagaaaagatccatcgctttgatcatgaacgtattcctgaaagagtagtccatgcgcgtggcactggcgcattcggaaacttcaagcttaaggagagcattgaagatctgacttatgccggtgtgttgacggatacatccagaaacacgccagtctttgttcgcttttcaaccgtccaaggaagtagaggtagcgctgatacagtccgcgatgttcgtgggttcgctgtcaagttctacaccgatgaaggcaactgggacattgttgggaacaacatccctgtgtttttcattcaagatgccgtcaagttcccagattttgtccatgctgtcaagccggagcctcacaacgaggtccctcaggcccaaacagcccacaacaacttctgggattttgtgtacttgcacccagaagccacccacatgttcatgtgggccatgtctgaccgcgccatcccccgatcctaccggatgatgcagggatttggtgtcaatacttttgctctcgtcaacaaagaaggaaagcgacactttgtcaagttccactggatcccccatctgggtgttcactctctcgtgtgggacgaagccttgaagctgggaggccaagaccctgatttccatcgcaaagacctgatggaggctatcgacaacaaggcgtatccgaaatgggacttcgcaatccaagtcattccagaggagaagcaggatgactttgagtttgacattttggatgccaccaagatctggcctgaaaaccttgtgccccttcgtgtgattggagagctcgagctgaaccgcaacgtcgacgaattcttccctcagaccgagcaggtcgcattctgcaccagccacatcgtccctggcattgacttcaccgacgatccacttctccaaggccgaaacttctcctacttcgacacccagatcagccgcctgggcatcaattgggaagagctgccaatcaaccgtccagtgtgccctgtgctcaaccacaaccgcgacggacagatgcgccatcgaatcacgcaaggcacggtcaactactggcccaaccgcttcgaagccgtgcccccgaccggcaccaagggctccggagtgggcggcgggttcacaacctacccccagcgggtggagggcatcaagaaccgcgccctcaacgacaaatttcgcgagcaccacaaccaagcccagctcttctacaactcaatgtccgagcacgagaagctccacatgaagaaggctttcagcttcgagctcgaccactgcgacgaccccaccgtctacgaacggctcgccggccatcgcctcgccgaaatcgacctcgagctcgcccagaaagtcgccgagatggtcggtgccccgatcccagccaaggccctcaagcagaaccacggccgacgcgccccgcacctctcccagactgagttcatccccaagaaccccaccatcgccagccgccgcatcgccattatcataggcgacggctacgaccccgtcgcttccaccggcttgaagaccgctatcaaggctgccagcgccctccccttcatcattggcaccaagcgctccgccatctacgcgacggaggacaagacctcctccaagggcatcattccggaccaccactacgacggccagcgctcaaccatgttcgacgcaaccttcatccccggcggcccgcacgtcgccaccctgcgccagaacgggcagatcaagtactggatatccgagaccttcggtcacctcaaggcgctgggtgctaccggcgaggctgtggatctcgtcaaggagacgctgagcggcacgctgcacgtccaggtggcgtcgtcgcagagccctgagcccgtcgagtggtatggtgttgtgactgcgggcgggaagcaaaagcccgagagctttaaggaaagcgtgcagattctcaagggcgcaacggactttgtgggcaagttcttctaccagatctcgcagcacaggaattatcagcgtgaattggacggtctggcatcgaccattgctttctag

SEQ ID NO: 43106 - protein, 749 aa, Aspergillus fumigatus
MATKIAGGLHRAQEVLQNTSSKSKKLVDLERDTADAHTQQPLTTDHGVRVSNTDQWLRVTNDRRTGPSLLEDQIAREKIHRFDHERIPERVVHARGTGAFGNFKLKESIEDLTYAGVLTDTSRNTPVFVRFSTVQGSRGSADTVRDVRGFAVKFYTDEGNWDIVGNNIPVFFIQDAVKFPDFVHAVKPEPHNEVPQAQTAHNNFWDFVYLHPEATHMFMWAMSDRAIPRSYRMMQGFGVNTFALVNKEGKRHFVKFHWIPHLGVHSLVWDEALKLGGQDPDFHRKDLMEAIDNKAYPKWDFAIQVIPEEKQDDFEFDILDATKIWPENLVPLRVIGELELNRNVDEFFPQTEQVAFCTSHIVPGIDFTDDPLLQGRNFSYFDTQISRLGINWEELPINRPVCPVLNHNRDGQMRHRITQGTVNYWPNRFEAVPPTGTKGSGVGGGFTTYPQRVEGIKNRALNDKFREHHNQAQLFYNSMSEHEKLHMKKAFSFELDHCDDPTVYERLAGHRLAEIDLELAQKVAEMVGAPIPAKALKQNHGRRAPHLSQTEFIPKNPTIASRRIAIIIGDGYDPVASTGLKTAIKAASALPFIIGTKRSAIYATEDKTSSKGIIPDHHYDGQRSTMFDATFIPGGPHVATLRQNGQIKYWISETFGHLKALGATGEAVDLVKETLSGTLHVQVASSQSPEPVEWYGVVTAGGKQKPESFKESVQILKGATDFVGKFFYQISQHRNYQRELDGLASTIAF

SEQ ID NO: 43107 - DNA, 1479 bp, Avicennia marina
  CDS (1)..(1479)
atggatccgtacaagtactgtccctccagttcgttcaatacaccccacacgacgaccaatgggggacacccggtgtataacgacaacagctctttgacggtgggaaccagaggcccagtcctccttgaagattaccaattgatagataagcttgcccattttactcgtgagaggatcccagagcgcgttgtccacgcacgaggtgccaccgccaagggcttctttgaggtcacccacgatgtttctcacctcacctgtgccgatttccttcgggcacctggtgttcagactcctcttatcgttcgattctccaccgtcatccacgagcgtggcagccctgaaactctgagggaccccagagggttcgctgtcaaattttacaccagagaggggaactttgatattgtggggaacaacttccccgtcttcttcattcgcgatgcgatcaaattccctgacgtgattcatgcttttaagccaaaccctaaatcccacatccaagagagctggagaatcttggacttctgctcccacttcccggagagtttgcttacctttgcttggttctacgacgatgtgggcattccgcaagattacaggcacatggagggcttcggtgtgcacagctacactctgatcaacaaggccgggaaagtcaattatgtgaaattccactggaagcctacttgtggcgtcaagtgtctgatggaggatgaagctgtcaggattggaggaactaatcacagtcacgccacccaggatctgtacgattcgattgccgctggaaactatccggaatggaagttatatttccagatcatggatcctgatcaggaagacagatttgattttgatcctctcgacacaaccaagatctggcctgaagacatcatacccctgattccagtggggcgcatggtgttgaataagaacatcgataacttctttgctgagaacgagatgcttgcattctcccctcacatgattgtccctggaattaacttttccaatgacaagatgctccagactcggatatttgcttacggcgacacgcagaggcaccgtctcgggccaaactacctgctgcttccagttaatgcaccgaaatgcgcctaccacaacaatcattacgacggtttcatgaatttcatgcacagggacgaggaggtggactatttcccttcgaagtatgaccctactcgccatgcggagaggcaccccattcctaatgcggtgattacaggaaggcgcgataggcgtgtcattgagaaggaagacaactttaagcaagctggagacagataccgttcctgggcaccagacaggcaagagaggttccttcgccgatgggtcgacgctttatctgaccccaggctcaccctcgaaatccgtagtatctgggtttcatactggtctcaggccgacaagtccttcggccagaaacttgcttcccgcctcaatgtaaggccgacaatgtga

SEQ ID NO: 43108 - protein, 492 aa, Avicennia marina
MDPYKYCPSSSFNTPHTTTNGGHPVYNDNSSLTVGTRGPVLLEDYQLIDKLAHFTRERIPERVVHARGATAKGFFEVTHDVSHLTCADFLRAPGVQTPLIVRFSTVIHERGSPETLRDPRGFAVKFYTREGNFDIVGNNFPVFFIRDAIKFPDVIHAFKPNPKSHIQESWRILDFCSHFPESLLTFAWFYDDVGIPQDYRHMEGFGVHSYTLINKAGKVNYVKFHWKPTCGVKCLMEDEAVRIGGTNHSHATQDLYDSIAAGNYPEWKLYFQIMDPDQEDRFDFDPLDTTKIWPEDIIPLIPVGRMVLNKNIDNFFAENEMLAFSPHMIVPGINFSNDKMLQTRIFAYGDTQRHRLGPNYLLLPVNAPKCAYHNNHYDGFMNFMHRDEEVDYFPSKYDPTRHAERHPIPNAVITGRRDRRVIEKEDNFKQAGDRYRSWAPDRQERFLRRWVDALSDPRLTLEIRSIWVSYWSQADKSFGQKLASRLNVRPTM

SEQ ID NO: 43109 - DNA, 1461 bp, Bacteroides fragilis
  CDS (1)..(1461): transl_table=11
atggaaaataaaaaactcacagcagctaatggtcgtcctatcgccgacaaccaaaacagccagacagcaggacctcgcgggcctattatgttacaagacccatggttgattgaaaaacttgctcatttcgaccgtgaagttatccctgaacgccgtatgcatgccaaaggctccggagcttacggtacatttaccgtcacacatgatatcaccaagtacacacgagcagctattttcagtcaagtaggcaagcaaacagaatgttttgtacgtttctccactgtagcaggagaacgcggagctgctgatgcagaacgcgatatccgaggatttgccatgaagttttatacagaagaaggaaactgggatttggtaggtaacaatactcccgtcttcttcttacgcgacccgctaaaatttcctgatttaaatcatgctgtaaaacgcgatccgcgcaacaacatgcgtagcgctaacaataattgggatttctggaccctgttacccgaggctcttcatcaggtaactatcaccatgagtccgcgtggcattccggcttcctatcgccacatgcacggattcggcagccatacttacagtttcctaaacgcagaaaacaaacgaatttgggttaagtttcatctaaagactatgcagggcattaaaaacctgactgatcaggaagctgaagcaatcatcgccaaagatcgtgaatcgcatcaacgtgacctatacgaaagcatcgaacggggtgatttcccaaaatggaagttccagattcagttgatgactgaagaagaagcagataactatcgtatcaatccgttcgaccttaccaaggtttggccacacaaagatttcccattgcaagatgtaggtattcttgaattgaaccgtaatccggaaaactattttgcagaagtagaacaatcggctttcaatccgatgaatattgttgaaggtatcggcttctctcccgacaagatgttgcaaggacgattattttcttatggtgatgcacaacgctaccgattgggtgtaaactcagagcagataccggtaaacaagccacgttgtccgttccacgccttccatcgtgacggagcaatgcgagtggacggaaactatggttcagccaaaggttatgaaccgaatagttatggcgaatggcaagactcgcctgagaaaaaagaaccgcctttaaaagttcacggagatgtattcaactataacgaacgtgaatatgatgacgattactacagtcagccgggtgatttgttccgactgatgcctgcggatgaacaacaattattgtttgaaaataccgcacgcgccatgggtgacgcagaattgttcatcaaacaacggcatgtacgcaactgctacaaagctgatccggcttatggcacaggagtagctcaagcattaggtattgatctggaagaagccttgaaagaataa

SEQ ID NO: 43110 - protein, 486 aa, Bacteroides fragilis
MENKKLTAANGRPIADNQNSQTAGPRGPIMLQDPWLIEKLAHFDREVIPERRMHAKGSGAYGTFTVTHDITKYTRAAIFSQVGKQTECFVRFSTVAGERGAADAERDIRGFAMKFYTEEGNWDLVGNNTPVFFLRDPLKFPDLNHAVKRDPRNNMRSANNNWDFWTLLPEALHQVTITMSPRGIPASYRHMHGFGSHTYSFLNAENKRIWVKFHLKTMQGIKNLTDQEAEAIIAKDRESHQRDLYESIERGDFPKWKFQIQLMTEEEADNYRINPFDLTKVWPHKDFPLQDVGILELNRNPENYFAEVEQSAFNPMNIVEGIGFSPDKMLQGRLFSYGDAQRYRLGVNSEQIPVNKPRCPFHAFHRDGAMRVDGNYGSAKGYEPNSYGEWQDSPEKKEPPLKVHGDVFNYNEREYDDDYYSQPGDLFRLMPADEQQLLFENTARAMGDAELFIKQRHVRNCYKADPAYGTGVAQALGIDLEEALKE

SEQ ID NO: 43111 - DNA, 1440 bp, Botrytis cinerea
  CDS (1)..(1440)
atggctcaaaccaatggcgtattgcaagaaccggccatcacaacgatgaacggtgctcccgttctaaagccagcatctacccaaagaattggcaatcagctcagagccactcttctacttcaagatatcaatctcttggaattgatccaacacatcacccatgagcgaattcctgagcgtgtcgtccatgccagaggtactagcgctcacggatactttgaggtcaccgatgacatatcagatgtcacatctgcggcttttctaaaccgggtcggaaaacaaaccgatatattttgtcggttctccaccgtagctggtcgagcagaatctgccgaaacggttcgggatactcgtggttttgcttttaaaatgtttaccgaggaaggtaacttagattggttgttccttagcactcctgtcttcccaattcgagatggagctaaattcccatctttcactcatgctactaagaagaatccacgaagtggcttacctgatcacaaggcattctgggactacttcactcacaaccaagaggggattcacttcctgatgttcctcttcagtgatcgagctacaccagtcgatttccaacatgccgatattttcagtatcaacacctacaagttcaccaaatcagacggttcattcacatatgtgaagatccatctcaagaccaaccaaggagtgaagaacttcacacaagatgaggctaatcaaaaggctggtgttgatccagacttccaaacccgtagtctttacgaggatatcgaaaatcaaaagtacccaacgtgggacgtttttgcacagatcattgaccctgtcaaggccgagaattatcacatcaatatcttcgacgcaaccaagacattcccattttccgagttccctcttcgcaagttcggtaaaattacactcaacaggaatgtggataatttcttcgctgagcaagagcaaagtgcttttagtccaacaaatctcgttcctggttgggctctaactccagatcctatcattcaaactcgtgctcttgcctacgcagatactcaaagatatcgtctcggagccaacttcgtccaattacctgtcaatgctccatacaaaaagccctttactcccctcattagggatggagctgcaactgtcaacggcaacttaggtggtaccccaaattacttcccatcatctttttacaatgttggagcagcgacacaatatgcacaacctgacgaagaacaattccaaggaacagttgtcaactttgagagtgaagtcgtcgatgcagactacgtgcagccaagaatcttctgggaaaagacactagctgaagagccaggtcaacaggataatcttatcagcaatgttgcgggtcatctaagcgcagtcactggagataaaggacttggaagttcgacaagcggtctatgcaatgttcggtaa

SEQ ID NO: 43112 - protein, 479 aa, Botrytis cinerea
MAQTNGVLQEPAITTMNGAPVLKPASTQRIGNQLRATLLLQDINLLELIQHITHERIPERVVHARGTSAHGYFEVTDDISDVTSAAFLNRVGKQTDIFCRFSTVAGRAESAETVRDTRGFAFKMFTEEGNLDWLFLSTPVFPIRDGAKFPSFTHATKKNPRSGLPDHKAFWDYFTHNQEGIHFLMFLFSDRATPVDFQHADIFSINTYKFTKSDGSFTYVKIHLKTNQGVKNFTQDEANQKAGVDPDFQTRSLYEDIENQKYPTWDVFAQIIDPVKAENYHINIFDATKTFPFSEFPLRKFGKITLNRNVDNFFAEQEQSAFSPTNLVPGWALTPDPIIQTRALAYADTQRYRLGANFVQLPVNAPYKKPFTPLIRDGAATVNGNLGGTPNYFPSSFYNVGAATQYAQPDEEQFQGTVVNFESEVVDADYVQPRIFWEKTLAEEPGQQDNLISNVAGHLSAVTGDKGLGSSTSGLCNVR

SEQ ID NO: 43113 - DNA, 1524 bp, Campylobacter jejuni
  CDS (1)..(1524): transl_table=11
atgaaaaaattaactaacgattttggaaacattatagccgataatcaaaattcattaagtgcaggcacaaaaggacctttacttatgcaagattatcttttgcttgaaaaacttgctcatcaaaatagagaaagaattccagaaagaaccgttcatgctaagggaagtggagcttatggcgaaataaaaatcactgctgatttatctgcttatactaaggcaaaaatatttcaaaaaggagaaataactcctctttttctacgcttttcaacagtagcaggtgaagcaggtgcagcagatgctgaacgcgatgtgagaggttttgctattaaattttacaccaaagaaggaaactgggacttggtaggaaataacactccgacattcttcatccgtgatgcttataaatttcctgatttcatccatactcaaaaaagagatccaagaactcatctaagaagtaataatgctgcttgggatttttggagtttatgtcctgaaagtttacatcaagtaaccattcttatgagagatagaggaattcctgcaagttatcgtcatatgcatggatttggaagccatacttatagttttattaatgataaaaatgaaagattttgggtgaaattccattttaaaacccaacaagggattaaaaatcttaccaaccaagaagctgccgagcttatagcaaaagatagagaaagtcatcaaagagatctctataatgctatagaaaataaagattttccaaaatggaaagttcaagttcaaattcttgctgaaaaagatatagaaaaacttggatttaatccttttgatttaacaaaaatttggcctcatagtcttgtgcctttgatggatataggcgaaatgattctaaacaaaaatcctcaaaattattttaatgaagttgaacaagctgcctttagtccaagcaatatcgttcctggaattggctttagccctgataaaatgttgcaagctagaattttttcatatcctgatgcacaaagatatagaataggaactaattatcatcttttgcccgtaaatcgtgcaaaaagcgaagtgaatacttacaatgtcgctggtgctatgaattttgatagttataaaaatgatgcagcttattatgaaccaaacagctatgataatagcccaaaagaagacaaaagctatcttgaacctgatttagtcttagaaggcgtagcacaaagatatgctccactagataatgacttttatactcaaccaagagctttatttaatcttatgaatgatgatcaaaaaactcaactttttcataatatcgccacttctatggagggagttgatgaaaaaattatcactagagctttagaacattttgaaaaaatttcacctgattatgcaaaaggaattaaaaaagctttccctatagtgagtcgtattagagcttggcgtaatcatggtcatcgatgtttcctgtgtgaaattgttatccgctcacaattccacacaacatacgagccggaagcataa

SEQ ID NO: 43114 - protein, 507 aa, Campylobacter jejuni
MKKLTNDFGNIIADNQNSLSAGTKGPLLMQDYLLLEKLAHQNRERIPERTVHAKGSGAYGEIKITADLSAYTKAKIFQKGEITPLFLRFSTVAGEAGAADAERDVRGFAIKFYTKEGNWDLVGNNTPTFFIRDAYKFPDFIHTQKRDPRTHLRSNNAAWDFWSLCPESLHQVTILMRDRGIPASYRHMHGFGSHTYSFINDKNERFWVKFHFKTQQGIKNLTNQEAAELIAKDRESHQRDLYNAIENKDFPKWKVQVQILAEKDIEKLGFNPFDLTKIWPHSLVPLMDIGEMILNKNPQNYFNEVEQAAFSPSNIVPGIGFSPDKMLQARIFSYPDAQRYRIGTNYHLLPVNRAKSEVNTYNVAGAMNFDSYKNDAAYYEPNSYDNSPKEDKSYLEPDLVLEGVAQRYAPLDNDFYTQPRALFNLMNDDQKTQLFHNIATSMEGVDEKIITRALEHFEKISPDYAKGIKKAFPIVSRIRAWRNHGHRCFLCEIVIRSQFHTTYEPEA

SEQ ID NO: 43115 - DNA, 1515 bp, Candida boidinii
  CDS (1)..(1515)
atgtctaatcctccaacttatacaacttctcaaggttgtccagtcagtgacgccttttccacccaacgtatctctggtacaaagatttcaatcaagactccagttggtccattattattacaagatttcaagtttcttgattctttagctcactttgatagagagcgtatcccagaaagagttgtccatgccaaaggtgctggtgcttatggtgtctttgaagttactgaagatatttcagatatttgttcagctaaattcttagatactgttggtaaaaagaccaaaattttcactagattctctactgttggtggtgaaaagggttcatccgattctgctagagatccaagaggttttgctactaaattctataccgaagaaggtaacttagatttagtttataacaatactccaattttctttattagagatccaactaaattcccacattttattcatactcaaaagagaaatccagctactaattgtaaagatgctaatatgttctgggattacttaactaacaatccagaatctttacatcaaattatgtacttattctcaaatagaggtactccaacttcttacagaaagatgaatggttattcaggtcatagttataaatggtacaatgctaaaggtgaatgggtttcgtcagttcatttcatctctaaccaaggtgttcacaatatgactgatgaagaagctggtgatttaagtggtaaagacccagatttccaaactatggatttatacaaggccattgaacaaggtgattacccatcatgggaatgttatgttcaaactatgactttagaagaagccaagaaacaaccattctcagtttacgatttaactaaagtttggccacataaagatttcccattaagacattttggtaaatttacattaaatgaaaatgcccaaaattattttgctgaagttgaacaagctgctttctctccatctcacactgttccaggtatggaaccatcaaatgatccagttttacaatccagattattctcttacccagatactcaccgtcacagattaggtgttaattactcccaaattccagttaactgcccaatgagagctgttttcgctccacaaattagagatggttcaatgatggttaacggtaacttaggtggtactccaaattatgccggtgcttacaactgcccggttcaatatcaagctccaattaaagcatctagtaagactccagaagaacaatacgaaggcgaaactttaagttatgactggactgaagtcaatgaatacgatttctaccaaccaggtagattctgggaagttttaggtaagactaaaggtgaacaagaagctttagttcataatgttgctaatcacgtttctggtgctgatgaatttatccaagaccgtgtctttgcttatttctcaaaagccaacccagttatcggtgatttaattagaaaagaagttttaaagaagagtccaagaggtgcttctaagaataaattttaa

SEQ ID NO: 43116 - protein, 504 aa, Candida boidinii
MSNPPTYTTSQGCPVSDAFSTQRISGTKISIKTPVGPLLLQDFKFLDSLAHFDRERIPERVVHAKGAGAYGVFEVTEDISDICSAKFLDTVGKKTKIFTRFSTVGGEKGSSDSARDPRGFATKFYTEEGNLDLVYNNTPIFFIRDPTKFPHFIHTQKRNPATNCKDANMFWDYLTNNPESLHQIMYLFSNRGTPTSYRKMNGYSGHSYKWYNAKGEWVSSVHFISNQGVHNMTDEEAGDLSGKDPDFQTMDLYKAIEQGDYPSWECYVQTMTLEEAKKQPFSVYDLTKVWPHKDFPLRHFGKFTLNENAQNYFAEVEQAAFSPSHTVPGMEPSNDPVLQSRLFSYPDTHRHRLGVNYSQIPVNCPMRAVFAPQIRDGSMMVNGNLGGTPNYAGAYNCPVQYQAPIKASSKTPEEQYEGETLSYDWTEVNEYDFYQPGRFWEVLGKTKGEQEALVHNVANHVSGADEFIQDRVFAYFSKANPVIGDLIRKEVLKKSPRGASKNKF

SEQ ID NO: 43117 - DNA, 1479 bp, Capsicum annuum
  CDS (1)..(1479)
atggatctctctaagtatcgcccatcaagtgcatatgattcccctttcttgacaacaaatgctggtggtcctgtctacaacaatgtatcttccttgactgttggacctagagggcctgttcttcttgaggattatcacttaattgagaagcttgcgacttttgttcgtgagcggatacctgagcgtgttgttcatgctagaggtgccagtgccaagggcttctttgaagtcactcatgatatttctcatcttacctgtgctgattttctccgagctcctggtgttcaaacacctgttatttgtcgcttctctactgtcgtccatgagcgtggaagccccgaatccatcagggatattcgcggttttgctgtcaaattttacaccagagagggtaactttgatcttgttggaaacaatgtccccgtcttctttaatcgtgatgcaaagtcattccctgacacgattcgtgcattgaaaccaaatccaaagtcacacattcaggaaaactggaggatccttgatttcttctctttcctcccggagagtttgcatacgtttgctttcttctacgatgatgtttgtctcccgacagattacagacacatggaaggttttggtgttcacgcttatcaattgatcaacaaagctggaaaagcacattatgtgaagttccactggaagccaacttgcggtgtcaagtccatgacggaggaagaagctattagggtcggaggtactaatcatagccacgccaccaaggatctctacgattcaattgctgctggaaactaccccgagtggaaactttttatccaaattatgaaccctgaggatgttgacaaattcgactttgaccctcttgacgtaaccaagacctggcctgaggatatcttgccattgatgccagttggtcgattggtattgaataggaacatcgataacttctttgcagagaacgagcagctcgcatttaaccctggacatattgtccctggtgtctactattcggaggataagcttctccagactaggatatttgcatatgctgatactcagagacaccgtattggaccaaactatatgcagctcccagttaacgctcccaagtgtgctcatcacaataatcaccgtgatggtgccatgaacttcatgcatcgcgatgaggaggtggattatttgccctcaaggtttgatccttgtcgtcctgccgagcagtacccaattccttcttgtgtcttgacaggaaggcgtgaaaagtgtgtcattccgaaagagaacaacttcaagcaggctggggagagatacagatcctgggcacctgacaggcaagacagatatatcaacaaatgggttgagtctttatccgatccccgagcaactcatgagatacgcagtatatggatatcatacttgtctcaggctgacaagtcttgtggtcagaaggtcgcttctcgtctcactgtgaagccaacaatgtga

SEQ ID NO: 43118 - protein, 492 aa, Capsicum annuum
MDLSKYRPSSAYDSPFLTTNAGGPVYNNVSSLTVGPRGPVLLEDYHLIEKLATFVRERIPERVVHARGASAKGFFEVTHDISHLTCADFLRAPGVQTPVICRFSTVVHERGSPESIRDIRGFAVKFYTREGNFDLVGNNVPVFFNRDAKSFPDTIRALKPNPKSHIQENWRILDFFSFLPESLHTFAFFYDDVCLPTDYRHMEGFGVHAYQLINKAGKAHYVKFHWKPTCGVKSMTEEEAIRVGGTNHSHATKDLYDSIAAGNYPEWKLFIQIMNPEDVDKFDFDPLDVTKTWPEDILPLMPVGRLVLNRNIDNFFAENEQLAFNPGHIVPGVYYSEDKLLQTRIFAYADTQRHRIGPNYMQLPVNAPKCAHHNNHRDGAMNFMHRDEEVDYLPSRFDPCRPAEQYPIPSCVLTGRREKCVIPKENNFKQAGERYRSWAPDRQDRYINKWVESLSDPRATHEIRSIWISYLSQADKSCGQKVASRLTVKPTM

SEQ ID NO: 43119 - DNA, 1611 bp, Deinococcus radiodurans
  CDS (1)..(1611): transl_table=11
atgagcgacgaaaacaacaagggcgtcggcacggcggtgcagggcgtgggcggtccccgcgacgggcgcaccgcccccggcgagcaaggcaccaccctgaccacccgccagggccaccccgttcacgacaaccagaacagccgcacggtgggcagccgtggcccgatgacgctggaaaactaccagttcatcgaaaagctctcgcacttcgaccgcgagcgcattcccgagcgtgtggtgcacgcccgcggcgtcggcgcccacggcgtgttcagagcgacgggcaaggtcggcgacgagccggtgagcaagtacacccgcgccaagctgtttcaggaagacggcaaggaaacgcccgtcttcgtgcgcttctcgacggtgggtcacggcacccactcgcccgaaacgctgcgtgacccgcgcgggttcgccgtcaagttctacaccgaagacggcaactgggacctcgtcggcaacaacctcaaaatcttcttcatccgtgacgcgctgaagttccccgacctgatccacagccagaagcccagcccgaccaccaacatccagtcgcaggagcgcatcttcgatttcttcgcgggctcccccgaagcgacccacatgattaccctgctgtactcgccctggggcattccggcgagctaccgcttcatgcagggcagcggcgtgaacacctacaagtgggtcaacgaccagggtgaaggcgtgctggtcaagtaccactgggaacccgtgcagggcgtgcgcaacctgacgcagatgcaggccgacgaggtgcaggcgaccaacttcaaccacgcgacccaggacctgcacgacgccatcgagcgcggcgactttccccagtgggacctgttcgtgcagatcatggaagacggcgagcaccccgaactcgactttgaccccctcgacgacaccaagatctggccccgcgagcagttcccctggcggcacgtcggccagatgacgctgaaccgcaaccccgaaaacgtgtttgccgaaaccgagcaggccgccttcgggaccggcgtgctggtggacggcctggacttcagcgacgacaagatgctccagggccgcaccttcagctactccgacacccagcgctaccgcgtcggccccaactacctgcaactgccgatcaacgcgcccaaaaagcacgtcgccaccaaccagcgcgacgggcagatggcctaccgggtggatacctttgagggccaggaccagcgtgtgaactacgagccgagccttctcagcggtcccaaggaagcgcctcgccgcgcccccgagcacaccccccgcgtggaaggcaacctcgtgcgcgccgccatcgaacgccccaaccccttcgggcaggccgggatgcagtaccgcaacttcgccgactgggagcgtgacgaactggtgagcaacctctccggcgctctggcgggcgtggacaagcgtattcaggacaagatgctcgaatacttcaccgccgccgacgccgactacggccagcgcgtgcgcgagggcattcaggccaaggaagccgagatgaagggccagaagcaggaagcccccgtctacggcaccgaggcgagcagcctgtactga

SEQ ID NO: 43120 - protein, 536 aa, Deinococcus radiodurans
MSDENNKGVGTAVQGVGGPRDGRTAPGEQGTTLTTRQGHPVHDNQNSRTVGSRGPMTLENYQFIEKLSHFDRERIPERVVHARGVGAHGVFRATGKVGDEPVSKYTRAKLFQEDGKETPVFVRFSTVGHGTHSPETLRDPRGFAVKFYTEDGNWDLVGNNLKIFFIRDALKFPDLIHSQKPSPTTNIQSQERIFDFFAGSPEATHMITLLYSPWGIPASYRFMQGSGVNTYKWVNDQGEGVLVKYHWEPVQGVRNLTQMQADEVQATNFNHATQDLHDAIERGDFPQWDLFVQIMEDGEHPELDFDPLDDTKIWPREQFPWRHVGQMTLNRNPENVFAETEQAAFGTGVLVDGLDFSDDKMLQGRTFSYSDTQRYRVGPNYLQLPINAPKKHVATNQRDGQMAYRVDTFEGQDQRVNYEPSLLSGPKEAPRRAPEHTPRVEGNLVRAAIERPNPFGQAGMQYRNFADWERDELVSNLSGALAGVDKRIQDKMLEYFTAADADYGQRVREGIQAKEAEMKGQKQEAPVYGTEASSLY

SEQ ID NO: 43121 - DNA, 2235 bp, Emericella nidulans
  CDS (1)..(2235)
atggctactagtatcaccgccggcctacaaaaggcccagcaagcagtgcaggacactgccaccaagaacaagaagattgtcgatattagccacgacacagtaaatgtccacacagaccaggagcagcgaacagattttggtgtcgcgatcaccgaccctgatcactggctgcgcgtcaccaacgagacgcactcgggcccctcgctgctagaagaccacatcgcgcgagagcgcatccatcgtttcgaccacgagcgcatccctgagcgcgttgttcatgcccgtggaacgggcgcctacggcaatttcaccctcaaggagagcatcgaagatttgacctatgctggagtgttaacggatacttcgcgcaacaccccggtgttcgtgcgtttctctactgtccagggcagccgggggagtgctgataccgttcgcgatgttcgcgggttcgctgtcaagttctacactgacgagggaaattgggatattgtcggcaacaacatccccgtcttcttcattcaggatgccatcaagttccctgactttgtccacgctgtcaagcccgagcctcacaacgaagtgccccaggcccagacggcccataacaatttctgggactttgtgtacttgcaccccgaagccacgcacatgttcatgtgggcgatgtctgaccgcgccatcccgcggtcctaccgtatgatgcagggtttcggtgttaacacgttctcgctggtcaacaaggagggtaagcgccactttgtcaaattccactggatccctcacctcggagtgcactcgctcgtctgggacgaggccctgaagctggcgggacaggatcccgacttccaccgcaaggacctgatggaggccatcgataacaaggcctatcccaagtgggactttgccatccaggccatccccgaggaggaccaggacaagttcgagtttgacatcttcgatgccaccaaggtctggccggaagagcaggtgcccctgcgtgtggtcggcgagctcgaactgaaccgcaacatcgacgagttcttccccgagactgaacaggtcgccttctgcactagccatatcgtgcctggtatcgacttctctgacgacccgcttctccagggccgcaacttctcatatcaggatacacaaattagtcgtctgggtgtgaactgggaagaaatacccatcaaccgacctgtctgcccgttcctcaaccataaccgggacggagctaaacgccaccgcatcaccaagggcacggtgaactattggcccaaccgcttcgaggccaaccctccagctagcgacaagggcttcaagtcgcacccagccccgattacaggccgcaagcgccgcgatctcacacccaagttcaaggaataccacaaccaggcgcagcttttctataactccctctccgaagtcgagaaggtgcacgtcaagaaggccttttccttcgagcttgaccactgtgacgacccgatcgtttacgagcggctcgcaggccagcgcctcgcagagatcgatctccccctggctcaagccgtggccgagatggtcggcgcgcccatccccacgaaggcactgcgtgataaccacggcaagacctccgtccgtctctcccagttcgacttcactcctaaggctcctggcattatcagccgtcgcattgccatcatcatcggtgacggctacgacaagatcgccttcaatggcatgaaggccgctattctcgccgctgcaagcgctccccttcgtcattggcaccaaacgtccgccatctacgcacagggcgaggataagaatagctctaagggtgtgattcccgaccacatgtatgacggcatgcgctccaccatgttcgacgcgaccttcatccccggcggctcgcacattgagactctccaaaagaacggccagattcggtactggattgccgagacattcgggcacctcaaggcgctcggtgccatgggcgaagccgcgcagctggtcaaggaagttctgggcaatgtgatgggcgtccaaattgccggtgcggactctgctgagcccgtcgaatggtatggtgttgttacagctcgtggaccagagagcgccgagagcctcagtgagggcttcaaggtgctcaaggacgccggtgatttcacaagcaagttcttttaccagatcagtcagcaccgcaactggcagcgtgagttggatggattggcttcgacggttgcgttctaa

SEQ ID NO: 43122 - protein, 744 aa, Emericella nidulans
MATSITAGLQKAQQAVQDTATKNKKIVDISHDTVNVHTDQEQRTDFGVAITDPDHWLRVTNETHSGPSLLEDHIARERIHRFDHERIPERVVHARGTGAYGNFTLKESIEDLTYAGVLTDTSRNTPVFVRFSTVQGSRGSADTVRDVRGFAVKFYTDEGNWDIVGNNIPVFFIQDAIKFPDFVHAVKPEPHNEVPQAQTAHNNFWDFVYLHPEATHMFMWAMSDRAIPRSYRMMQGFGVNTFSLVNKEGKRHFVKFHWIPHLGVHSLVWDEALKLAGQDPDFHRKDLMEAIDNKAYPKWDFAIQAIPEEDQDKFEFDIFDATKVWPEEQVPLRVVGELELNRNIDEFFPETEQVAFCTSHIVPGIDFSDDPLLQGRNFSYQDTQISRLGVNWEEIPINRPVCPFLNHNRDGAKRHRITKGTVNYWPNRFEANPPASDKGFKSHPAPITGRKRRDLTPKFKEYHNQAQLFYNSLSEVEKVHVKKAFSFELDHCDDPIVYERLAGQRLAEIDLPLAQAVAEMVGAPIPTKALRDNHGKTSVRLSQFDFTPKAPGIISRRIAIIIGDGYDKIAFNGMKAAILAAASAPLRHWHQTSAIYAQGEDKNSSKGVIPDHMYDGMRSTMFDATFIPGGSHIETLQKNGQIRYWIAETFGHLKALGAMGEAAQLVKEVLGNVMGVQIAGADSAEPVEWYGVVTARGPESAESLSEGFKVLKDAGDFTSKFFYQISQHRNWQRELDGLASTVAF

SEQ ID NO: 43123 - DNA, 2157 bp, Erysiphe graminis
  CDS (1)..(2157)
atgcgactttcactttggaacttacttggactttcaggtcttgtagtcgcgtcgtgcccttacatgagcggcgaagaccaggagtatcacatatctcatattcaagcaagaggaacagactccgagtttttagaccaattcaaggtcgaagactcaaactcataccttacaactgatgctggagggcctattcaggatgatgccagtttaaaggcaggagaaagagggcctacacttttagaggattttatttttcgccagaagattcagcactttgatcacgagcgggtaccagagcgcgctgttcacgcccggggtgcaggtgcctatggaacttttactagctatgcagactggactaatataaccgctgctagttttctcaattcaaaaggcaaagaaacaccggtttttgttcgtttctcgacggttgcgggatcccgtggatctgcggacacagtgcgtgatgtccacgggtttgccacacgattctacaccgacgaaggaaactttgatattgtgggaaataatattcctgtattttttattcaggatgccattctattcccagatcttgttcacgctgttaaacccagtccagactctgaaatccctcaagcagcgactggtcatgacagtgcttgggatttcttctctcaacagccatccactcttcacaccttattttgggcaatgtctggccatggtattcctcgatcttatcgtcacatggatgggtttggtgtccacacaatgcgtctagtcactgacgacggaaaaagcaagcttgtaaagtggcattggaagacaaagcaaggaaaggcaagtcttgtctgggaggaagctcaaattttggccgggaaaaatccagatttccatcgtcaagatctatgggatgacataaatgcaggaaatggaccagaatgggagctcggtgtacagattgtagacgaagaagatgtacaggcatttggcttcgatttgctagatcctacaaaatttcttcccgaggaactggttcccgtcaccatactaggaaaaatgaaactgacagacaatccaaccaactactttgcagaaactgaacaggttatgtttcagcctgggcacatagttcgcggcgtagacttttcagatgatccacttcttcaaggccgtatttactcgtatctcgatacacaattgaatcgtaatggaggcccaaattttgaacaactcccagtcaaccgtcctcgtaccaaggttcacaataacaaccgagatggtgctggtcaaatgtttatacacactaataaagccccttattcccctaattcgctatctggaggtaatccgaagcaggcaaatcaaactaaaggtcgtggattttttaccgcaccatctcgtaaagttgtgggctctcttcatcgtggtactgcttcttcattcgcagacgtgtggtctcaacctcgcatgttttacaattccctcattccttcagagcagcagtttcttgtgaacgcaattcgtttcgagatatctcaattaaagtcggatttgattaaaaaaaacacattgatgcaactgaatcgagtctctaatgatcttgctacccgtgtggcagcggttattggttataagccacttgatccatcaccagagttctacacaaatgcaacaaccgactacgtgaccatctttggcaagccgctaccgtctgtcgttggatttactgttggtatacttgcctccacatcttcttcaacttcaattagtcaagctgcgcagcttgcaacatcttttagctccaggggaattagggcagtgattgtaggggaatcacttttgtccggcactgatcaaacttacagttccgcggatgcaactgcttttgatgctgtagtagtcacgatgggtgctgaaactctctttggtccggttgctaaaccaaacacgcttttcccatctgggaggcctagccagattttgcatgatgcataccgatggggtaagccagttggtgctgtatcgaaagcttcggttgtcttagagcctctaccaggtaccaaaaatcaagggggtgtttatagagtggagtccgtaaatgaattagcgaccagtattgcaaaagggcttgagacatttaggttcgtggatcgcttccctctggactcttga

SEQ ID NO: 43124 - protein, 718 aa, Erysiphe graminis
MRLSLWNLLGLSGLVVASCPYMSGEDQEYHISHIQARGTDSEFLDQFKVEDSNSYLTTDAGGPIQDDASLKAGERGPTLLEDFIFRQKIQHFDHERVPERAVHARGAGAYGTFTSYADWTNITAASFLNSKGKETPVFVRFSTVAGSRGSADTVRDVHGFATRFYTDEGNFDIVGNNIPVFFIQDAILFPDLVHAVKPSPDSEIPQAATGHDSAWDFFSQQPSTLHTLFWAMSGHGIPRSYRHMDGFGVHTMRLVTDDGKSKLVKWHWKTKQGKASLVWEEAQILAGKNPDFHRQDLWDDINAGNGPEWELGVQIVDEEDVQAFGFDLLDPTKFLPEELVPVTILGKMKLTDNPTNYFAETEQVMFQPGHIVRGVDFSDDPLLQGRIYSYLDTQLNRNGGPNFEQLPVNRPRTKVHNNNRDGAGQMFIHTNKAPYSPNSLSGGNPKQANQTKGRGFFTAPSRKVVGSLHRGTASSFADVWSQPRMFYNSLIPSEQQFLVNAIRFEISQLKSDLIKKNTLMQLNRVSNDLATRVAAVIGYKPLDPSPEFYTNATTDYVTIFGKPLPSVVGFTVGILASTSSSTSISQAAQLATSFSSRGIRAVIVGESLLSGTDQTYSSADATAFDAVVVTMGAETLFGPVAKPNTLFPSGRPSQILHDAYRWGKPVGAVSKASVVLEPLPGTKNQGGVYRVESVNELATSIAKGLETFRFVDRFPLDS

SEQ ID NO: 43125 - DNA, 1479 bp, Helianthus annuus
  CDS (1)..(1479)
atggatccttacaagtaccgttcttcaagtgcctacaatgccccattctggaccaccaattccggtgctccggtttacaacaacaacaactcattgaccgttggaagcagaggtccaatccttctagaagattaccatttggtggagaagctagctaacttcgaccgtgagcgtatccctgaacgtgttgttcatgccagaggtgccagtgcaaagggattttttgaagtcacacatgacattactgccctcacatgtgctgattttctccgtgcccccggtgtccagactcctgttatcgttcgtttctctactgttatccatgaacgtggtagccccgaaaccctcagggaccctagaggtttcgcagtgaagttctacacccgagagggtaactttgatttggtgggaaacaatttcccggtgttctttattcgtgatggaatgaaatttcccgacatggttcactcgttgaaaccaaaccctaaatcgcacattcaagaagactggagaatcatggactttttctctcaccatcccgagagtttgcacatgttcacatttcttctagacgatatcggtgtgccacaagattaccgccacatggacggatccggtgtcaacacctacactttgatcaacaaagctggaaaagcatattacgtgaagttccactggaaaccaacatgtggcgtaaaaagtttgttggaagaagaagccatcaagatcggtggagcgaatcacagccatgctacacaagatctttacgattcgattgctgctggaaactaccccgagtggaagctttttatccagaccattgatccggatcacgaggatcggctcgactttgacccgcttgatgttaccaagacctggcctgaggatatctttccgttgcagcctgtgggtcgtctggttttgaacaagaatattgacaacttctttgctgagaatgaacagctggcattttgtcctgctatcattgttcctggaatctattattctgatgataagttgctgcaaacccgtattttctcgtattctgacactcagaggcaccgtcttggaccgaactatttgcagcttcctgcaaatgctcctaagtgtgctcatcataataatcactatgatggattcatgaatttcatgcacagagatgaggagatcgattacttcccttcaagatatgatcccgctcgtcatgctgagcagtaccctattcctcctgttaggttgtccggaaagcgtgataagtgtgtgattgagaaagaaaacaacttcaagcagccaggagagagatacagatccttttctccagacaggcaagaacgattcattaacagagttgtgggtggtttgtctgacccgcgtgtcacccatgaggtccgctcaatatgggtttcatactggtcccaggctgacaagtctctgggacagaagatagcttcccgcttgaatgtgaagccaaattactaa

SEQ ID NO: 43126 - protein, 492 aa, Helianthus annuus
MDPYKYRSSSAYNAPFWTTNSGAPVYNNNNSLTVGSRGPILLEDYHLVEKLANFDRERIPERVVHARGASAKGFFEVTHDITALTCADFLRAPGVQTPVIVRFSTVIHERGSPETLRDPRGFAVKFYTREGNFDLVGNNFPVFFIRDGMKFPDMVHSLKPNPKSHIQEDWRIMDFFSHHPESLHMFTFLLDDIGVPQDYRHMDGSGVNTYTLINKAGKAYYVKFHWKPTCGVKSLLEEEAIKIGGANHSHATQDLYDSIAAGNYPEWKLFIQTIDPDHEDRLDFDPLDVTKTWPEDIFPLQPVGRLVLNKNIDNFFAENEQLAFCPAIIVPGIYYSDDKLLQTRIFSYSDTQRHRLGPNYLQLPANAPKCAHHNNHYDGFMNFMHRDEEIDYFPSRYDPARHAEQYPIPPVRLSGKRDKCVIEKENNFKQPGERYRSFSPDRQERFINRVVGGLSDPRVTHEVRSIWVSYWSQADKSLGQKIASRLNVKPNY

SEQ ID NO: 43127 - DNA, 1518 bp, Helicobacter pylori
  CDS (1)..(1518): transl_table=11
atggttaataaagatgtgaaacaaaccactgcttttggcgctcccgtttgggatgacaacaatgtgattacggccggccctagaggtcctgttttattacaaagcacttggtttttggaaaagttagcggcgtttgacagagaaagaatccctgaaagggtggtgcatgctaaaggaagcggagcttatggcactttcactgtgactaaagacatcactaaatacactaaagcgaaaattttctctaaagtgggcaaaaaaaccgaatgcttcttcagattttctactgtggctggtgaaagaggcagtgcggatgcggtgagagaccctagaggttttgcgatgaagtattacactgaagaaggtaactgggatttagtggggaacaacacgcctgttttctttatccgtgatgcgatcaaattccctgatttcatccacactcaaaaacgagatcctcaaaccaatttgcctaaccatgacatggtatgggatttttggagtaatgttcctgaaagcttataccaagtaacatgggttatgagcgataggggtattcctaaatctttccgccacatggatggttttggcagccacactttcagtcttatcaacgcgaaaggcgaacgcttttgggtgaaattccactttcacaccatgcaaggcgttaagcatttgactaacgaagaagccgcagaagttaggaagtatgatccggattccaatcaaagggatttattcaatgcgatcgctagaggggatttcccaaaatggaaattaagcattcaagtgatgccagaagaagatgctaagaagtatcgattccatccgtttgatgtaactaaaatttggtatctccaagattatccattgatggaagtgggcattgtggagttgaataaaaatcctgaaaactatttcgcagaagtggaacaagcggcattcagtccggctaatgtcgttcctggaattggctatagccctgataggatgttacaagggcgcttgttctcttatggagacacacaccgctaccgcttaggcgttaattatcctcaaataccggttaataaaccaagatgcccattccactcttctagcagagatggttacatgcaaaacggatactacggctctttacaaaactatacgcctagctcattgcctggctataaagaagataagagcgcgagagatcctaagttcaacttagctcatattgagaaagagtttgaagtgtggaattgggattacagagctgatgatagcgattactacacccaaccaggtgattactaccgctcattgccagctgatgaaaaagaaaggttgcatgacactattggagagtctttagctcatgttacccataaggaaattgtggataaacaattggagcatttcaagaaagctgaccccaaatacgctgagggagttaaaaaagctcttgaaaaacaccaaaaaatgatgaaagacatgcatggaaaagacatgcaccacacaaaaaagaaaaagtaa

SEQ ID NO: 43128 - protein, 505 aa, Helicobacter pylori
MVNKDVKQTTAFGAPVWDDNNVITAGPRGPVLLQSTWFLEKLAAFDRERIPERVVHAKGSGAYGTFTVTKDITKYTKAKIFSKVGKKTECFFRFSTVAGERGSADAVRDPRGFAMKYYTEEGNWDLVGNNTPVFFIRDAIKFPDFIHTQKRDPQTNLPNHDMVWDFWSNVPESLYQVTWVMSDRGIPKSFRHMDGFGSHTFSLINAKGERFWVKFHFHTMQGVKHLTNEEAAEVRKYDPDSNQRDLFNAIARGDFPKWKLSIQVMPEEDAKKYRFHPFDVTKIWYLQDYPLMEVGIVELNKNPENYFAEVEQAAFSPANVVPGIGYSPDRMLQGRLFSYGDTHRYRLGVNYPQIPVNKPRCPFHSSSRDGYMQNGYYGSLQNYTPSSLPGYKEDKSARDPKFNLAHIEKEFEVWNWDYRADDSDYYTQPGDYYRSLPADEKERLHDTIGESLAHVTHKEIVDKQLEHFKKADPKYAEGVKKALEKHQKMMKDMHGKDMHHTKKKK

SEQ ID NO: 43129 - DNA, 1479 bp, Ipomoea batatas
  CDS (1)..(1479)
atggatccttcaaagtaccgtccatcaagtagcttcaacacacccttctgcactaccaactccggagctccggtatggaacaacacctgcgcactcaccgtcggcagcagaggaccaattctgctagaagattatcacttggtggagaaaattcaaaacttcactcgtgaaaggatcccagaacgagtggtgcatgccaggggtgcaagtgccaagggcttctttgaggtcactcatgacattacacacctcacctgcgccgacttcctccgtgcccccggcgttcagacacctctcatcgtccgcttctccactgtcatccatgagcgtggtagccccgaaactatcagagatccccgtggttttgccgtcaagatgtacacccgtggaggaaactgggatttggtgggcaacaatttcccggtgttctttatccgggacggaacgcagttcccggacgtgatccacgcgttcaagccaaacccgaaatcccacatccaggagaactggagaatcctggattacttatcccatctcccggagagtctcaacaccttcgcctggttctacgacgatgtcggtatccccaccgattaccgccacatggaaggcttcggcgtccacactttcaccatgatcaacaaggaaggcaaggccaattatgtaaaattccactggaaacccacctgcggcgtcaaatgtctgctggaagaggaggcgattaggatcggcggcgagaatcacagccacgccacccaggatttatacgagtccatcgccgccgggaattacccggagtggaagctttatatccaagtgatggacccggatcacgaggaccggttcgattttgacccgctggacacgaccaagatctggccggaagagttgattcctctgcagccggtggggagaatggtgttgaacaagaatattgataatttctttgcggagaatgagatgttggcgatggacccggcgcatattgtccccggaatatacttctccgatgataagatgctccaggctcgagtctttgcctacgccgacactcaccgccaccgccttggccccaactatatgctgcttccggttaatgcccccaagtgcgctcatcacaacaatagctatgatggttacatgaactttgtccacagggatgaagaggttgattactttccctcgaagtttgataacacacgtaacgctgagaggttcccaactccgttgcgtatcgtgacggggcaacgtgataagtgtgttattgagaaggagaacaacttcaagcaacctggagatagatacagatcctgggctccagacaggcaagatagattcatcaaccgatgggtcaaggccttgtctgagccccgagtcacccatgaaattcgcagcacttggatttcttacctcactcaggctgataggtctcttggacagaaggtggcttcccgtctgaacataagaccgacgatgtaa

SEQ ID NO: 43130 - protein, 492 aa, Ipomoea batatas
MDPSKYRPSSSFNTPFCTTNSGAPVWNNTCALTVGSRGPILLEDYHLVEKIQNFTRERIPERVVHARGASAKGFFEVTHDITHLTCADFLRAPGVQTPLIVRFSTVIHERGSPETIRDPRGFAVKMYTRGGNWDLVGNNFPVFFIRDGTQFPDVIHAFKPNPKSHIQENWRILDYLSHLPESLNTFAWFYDDVGIPTDYRHMEGFGVHTFTMINKEGKANYVKFHWKPTCGVKCLLEEEAIRIGGENHSHATQDLYESIAAGNYPEWKLYIQVMDPDHEDRFDFDPLDTTKIWPEELIPLQPVGRMVLNKNIDNFFAENEMLAMDPAHIVPGIYFSDDKMLQARVFAYADTHRHRLGPNYMLLPVNAPKCAHHNNSYDGYMNFVHRDEEVDYFPSKFDNTRNAERFPTPLRIVTGQRDKCVIEKENNFKQPGDRYRSWAPDRQDRFINRWVKALSEPRVTHEIRSTWISYLTQADRSLGQKVASRLNIRPTM

SEQ ID NO: 43131 - DNA, 1437 bp, Lactobacillus sakei
  CDS (1)..(1437): transl_table=11
atgacaaatcaactaacgactaacgaggggcaaccgtgggcggacaatcaacattcgcaaactgccggccaacgcggccccgtcttaatccaagattatcaattactcgaaaaactcgcccactttaaccgcgaacgcatccctgaacgggtggtgcatgccaaaggcgctggcgctaaaggctatttcaaggttaccaaggacatgagcgcatataccaaagccgctgttttcagtggcgtcggcaaaaaaacaccgcttatcactcgtttttctcaagtcgctggtgaagccggctatcccgatacataccgcgatgtccgcggtttcgccgttaaattctatacggaagaaggcaattacgatattgtcggcaataacacgccggtcttcttcgtcaatgatccactaaaattccccgatttcatccactctcaaaaacgtgatccccggacacatgcccgtagccaagatatgcaatgggatttctggtccctgtcacccgaatctgtccaccaagtcacgattctcatgagtgatcgcgggattcctgctagttaccggatgatgcacggctttggtagccacaccttcaaatgggttaacgcacaaggtgaacaattctgggttaaataccatttcaagacgaaccaaggtattcacaatctcagcaacgaactcgccgatgaactcgctggtaaggatactgattaccttcaaaatgatttattcgacgcaattgaaaccggcgattatccaagttggacggttgccgtccaactcgtcccttatgaagatggcttgaattatccccaagatatttttgatgttactaaagttatttcacaaaaggattatccattaatcgaaatcggtcaaatggtcctcgatgaaaatccaacgaataacttcgaagatatccaagaactggccttctcaccggctaacttagtccctgggattgaagcatcacccgacaaattacttcaaggtcgactatttggctataaggatgctgaacgttaccggcttggtgccaactacgagcaactccctgtcaaccgaccaaaagtccccgttcataattacgaacgtgacggtgcgatggcccaaaatcaagcaactggcgttaactacgaacccaacagtcaagatggacccactgaagtcccagcagctaagattcatggcgatcaactctctggtacaactggcaacttctctgccgatcccgattattactcagcagctggcaaactttaccggttattatcagccgatgaacaaacccgcttaatcgaaaatattcgcatgaatcttggtcaagtgactaaaccagaaattcaaattcgcgaagttaaacaattttaccaagctgatccagaatatggtcggcgcgtcgcaaccagcgttaaacttagatttagctcagtttga

SEQ ID NO: 43132 - protein, 478 aa, Lactobacillus sakei
MTNQLTTNEGQPWADNQHSQTAGQRGPVLIQDYQLLEKLAHFNRERIPERVVHAKGAGAKGYFKVTKDMSAYTKAAVFSGVGKKTPLITRFSQVAGEAGYPDTYRDVRGFAVKFYTEEGNYDIVGNNTPVFFVNDPLKFPDFIHSQKRDPRTHARSQDMQWDFWSLSPESVHQVTILMSDRGIPASYRMMHGFGSHTFKWVNAQGEQFWVKYHFKTNQGIHNLSNELADELAGKDTDYLQNDLFDAIETGDYPSWTVAVQLVPYEDGLNYPQDIFDVTKVISQKDYPLIEIGQMVLDENPTNNFEDIQELAFSPANLVPGIEASPDKLLQGRLFGYKDAERYRLGANYEQLPVNRPKVPVHNYERDGAMAQNQATGVNYEPNSQDGPTEVPAAKIHGDQLSGTTGNFSADPDYYSAAGKLYRLLSADEQTRLIENIRMNLGQVTKPEIQIREVKQFYQADPEYGRRVATSVKLRFSSV

SEQ ID NO: 43133 - DNA, 1467 bp, Listeria seeligeri
  CDS (1)..(1467): transl_table=11
atgaccgatagaagaaacttaacgacgaatcaaggagtgccgattggggacaaccaaaattcgatgacagcgggattaaaaggaccaactttgttagaagattatgtgttaattgagaaattggcgcattttgatagagaacgtgttccagaacgtgtggtgcatgctcgtggtgctggtgcgcacggcaaatttgtaacgaaaaaaagcatgaaaaaatatacgaaagcacaatttttacaagaagaaggaacagagacagaggtttttgcgcgtttttctacagtaatccatggtcaacattcaccagaaacgcttcgtgatccacgtggtttttcggttaaattttatacggaagaaggtaactatgactttgtcggtaacaacttacctgtattctttatccgtgatgctatcaagtttcctgacgtaattcactccttgaagccagatccacgtactaacattcaagatggcaatcgttactgggacttctttagtttaactccggaagcgacgacgatgattacttatttatttagcgatgaggggactccggcatcttaccgcgaaattcgtggttcaagcgtacatgcctttaaatggataaacgaagaaggtaagactgtttatgtaaaactacgctgggttccaaaagcaggaatcgtcaatctttcaactgatcaagcagcacaaattcaagcaaaagaatttaaccatgctagtcgcgatttgtatgaagcaattgagaatggtgattatccagagtgggatttatatgtgcaagtgctagatccaaaagacttggataattacgacttcaatccgcttgatgcaaccaaagactggtttgaagatgtatttccatacgagcatgttggaacaatgacattaaatcgtaatccggataatatttttgctgaaacagaatcagttggctttaatccaggtgtgcttgtgccggggatgttaccttctgaggaccgtgtactacaggggcgattgttctcttactctgatacgcaaagacaccgcgttggacctaactacttacaattaccaatcaacagcccaaaaactcctgttgataacaaccaacgtgatggacagatgccgtttaaacagcaaacaagttcgattaattatgaaccaaatagttatgatacagaaccaaaagaaaaccctgcatatatcgagcctgagcaagaaattcgtggggatatctctggccgactagtggcagaaaagccaaataactttggtcatgctaaagaagtttggaagcgttactcagatgcagaacgtgcggctcttgtgaaaaatattgtagacgattgggaaggtgtgcgcgaagatattaagattcgcaacttgcgcaatttctatcaagtagagccggaatttgcagaacgtgtggctgctggaactggaattaaccttgctgaacatgtgatagatttaaaataa

SEQ ID NO: 43134 - protein, 488 aa, Listeria seeligeri
MTDRRNLTTNQGVPIGDNQNSMTAGLKGPTLLEDYVLIEKLAHFDRERVPERVVHARGAGAHGKFVTKKSMKKYTKAQFLQEEGTETEVFARFSTVIHGQHSPETLRDPRGFSVKFYTEEGNYDFVGNNLPVFFIRDAIKFPDVIHSLKPDPRTNIQDGNRYWDFFSLTPEATTMITYLFSDEGTPASYREIRGSSVHAFKWINEEGKTVYVKLRWVPKAGIVNLSTDQAAQIQAKEFNHASRDLYEAIENGDYPEWDLYVQVLDPKDLDNYDFNPLDATKDWFEDVFPYEHVGTMTLNRNPDNIFAETESVGFNPGVLVPGMLPSEDRVLQGRLFSYSDTQRHRVGPNYLQLPINSPKTPVDNNQRDGQMPFKQQTSSINYEPNSYDTEPKENPAYIEPEQEIRGDISGRLVAEKPNNFGHAKEVWKRYSDAERAALVKNIVDDWEGVREDIKIRNLRNFYQVEPEFAERVAAGTGINLAEHVIDLK

SEQ ID NO: 43135 - DNA, 1518 bp, Methanosarcina barkeri
  CDS (1)..(1518): transl_table=11
atgggtgaaaagaattcttccaaggttctcaccactggttttggaataccggtgggggatgatcagaacagccttacagccggaaatagaggaccggttcttatgcaggatgttcatctgcttgataaacttagccatttcgaccatgaacgtatcccagagcgtgtagtacatgccaaaggtgcaggtgctggaggttactttgaagtcactgcagacgtgaccaaatataccaaagctaaatttctgtctgaaatcggtaaacgtactgaagtttttgtccgtttttccacagttggaggagagaagggatcggctgattccgctcgtgatccacgtggttttgccgtgaagttctacacagaagatggtaactacgatcttgtaggcaataatacccctgtgttttttattcgcgaccctttaaagtttcctgattttatccacacacaaaaacgtaacccagctacaaactgtaaagatccagatatgttctgggacttcctttccctgacacctgagtcaattcatcaggtcactattctcttctcagaccgcggtactcctgctacctatagaaacatgaatggttattctagccacacctataagtggtataatgaaaagggtgaatatttctgggtgcagtatcattttaagactgaccaggggataaagaacctgacccttgaagaagcagaaaaaatcggtggatcggatcccgaccacgcgacaagagacctgtatgaggctatcaagaaaggtgattatccctcctggactcttgaaatgcaaataatgactccggagcaggcagaagattaccggtttgacatcagggatataaccaaagtatggccccatggtgatttccctaccatgaaaataggcaagttggtgttgaatcgaaatccaacaaattatttcgctgaagtagaacaagcagcttttagtcctgcaaatcttgtgccaggcatcggtatttcacctgataaaatgctgcagggtagggttttttcttatcacgatactcatatccaccgtcttggtccaaattataatctaatacctgttaatgcaccaaagtactcacctgaaaatagttatcagcgtgatggattcatgcgtgttgatgctaacgggggcagtggacccaactattggccaaacagttttggaggaccttctcccgactctgtttatctggaacctccatttggagtatcaggactagcagctcgcacactctatacacatccaaatgatgactttgtacaggctggaaatttgtaccgtgacgttatgactgactacgatcgtgaaaaccttgtaggaaatatcgtatctcatctctctgccgcacagaagcgtatacagcttaggcagacagcattgttctttaaagctgatcgtgactatggaagccgtgtcgctaagggtcttgagcttgatattaaggaagttgagcgcctagctaatatgaccaatgaagagcgagcccgagcaactgagagataa

SEQ ID NO: 43136 - protein, 505 aa, Methanosarcina barkeri
MGEKNSSKVLTTGFGIPVGDDQNSLTAGNRGPVLMQDVHLLDKLSHFDHERIPERVVHAKGAGAGGYFEVTADVTKYTKAKFLSEIGKRTEVFVRFSTVGGEKGSADSARDPRGFAVKFYTEDGNYDLVGNNTPVFFIRDPLKFPDFIHTQKRNPATNCKDPDMFWDFLSLTPESIHQVTILFSDRGTPATYRNMNGYSSHTYKWYNEKGEYFWVQYHFKTDQGIKNLTLEEAEKIGGSDPDHATRDLYEAIKKGDYPSWTLEMQIMTPEQAEDYRFDIRDITKVWPHGDFPTMKIGKLVLNRNPTNYFAEVEQAAFSPANLVPGIGISPDKMLQGRVFSYHDTHIHRLGPNYNLIPVNAPKYSPENSYQRDGFMRVDANGGSGPNYWPNSFGGPSPDSVYLEPPFGVSGLAARTLYTHPNDDFVQAGNLYRDVMTDYDRENLVGNIVSHLSAAQKRIQLRQTALFFKADRDYGSRVAKGLELDIKEVERLANMTNEERARATER

SEQ ID NO: 43137 - DNA, 1512 bp, Micrococcus luteus
  CDS (1)..(1512): transl_table=11
atggagcaccagaagacgacgccgcacgcgaccggctcgacccgccagaacggcgccccggccgtcagcgaccgccagtccctgaccgtgggcagcgagggtcccatcgtcctgcacgacacccacctgctggagacccaccagcacttcaaccgcatgaacatcccggagcgccgcccgcacgccaagggctcgggcgcgttcggcgagttcgaggtgaccgaggacgtgtcgaagtacaccaaggccctcgtgttccagccgggcacgaagaccgagaccctcctgcgcttctccaccgtggccggcgagctcggctccccggacacctggcgcgacgtgcgcggcttcgcgctgcgcttctacaccgaggagggcaactacgacctcgtcggcaacaacaccccgatcttcttcctgcgcgaccccatgaagttcacccacttcatccgctcgcagaagcgcctgccggactccggcctgcgcgatgccaccatgcagtgggacttctggaccaacaaccccgagtcggcgcaccaggtgacctacctgatgggcccgcgcggcctgccccgcacctggcgtgagatgaacggctacggctcccacacctacctgtgggtcaacgcccagggtgagaagcactgggtgaagtaccacttcatctcccagcagggcgtgcacaacctctcgaacgacgaggccaccaagatcgccggcgagaacgccgacttccaccgccaggacctgttcgagtccatcgccaagggcgaccaccccaagtgggacctctacatccaggcgatcccctacgaggagggcaagacctaccggttcaaccccttcgacctgacgaagacgatctcccagaaggactacccgcgcatcaaggtcggcacgctgaccctgaaccgcaacccggagaaccacttcgcgcagatcgagtccgccgcgttcagcccgagcaacaccgtgccgggcatcggcctgtccccggaccgcatgctcctgggccgcgccttcgcgtaccacgacgcgcagctgtaccgcgtgggcgcccacgtgaaccagctgccggtgaaccgtcccaagaacgcggtgcacaactacgccttcgagggccagatgtggtacgaccacaccggcgaccgctccacctacgtgccgaactccaacggcgactcctggtcggacgagaccggcccggtggacgacggctgggaggccgacggcaccctgacccgtgaggcccaggcgctgcgcgcggacgacgacgacttcggccaggccggcaccctcgtccgcgaggtcttctcggaccaggagcgtgacgacttcgtggagaccgtggccggcgcgctgaagggtgtccgccaggacgtccaggcccgcgccttcgagtactggaagaacgtggacgccacgatcggccagcgcatcgaggacgaggtcaagcgccacgagggcgacggcatcccgggcgtcgaggccggcggcgaggcccgcatgtga

SEQ ID NO: 43138 - protein, 503 aa, Micrococcus luteus
MEHQKTTPHATGSTRQNGAPAVSDRQSLTVGSEGPIVLHDTHLLETHQHFNRMNIPERRPHAKGSGAFGEFEVTEDVSKYTKALVFQPGTKTETLLRFSTVAGELGSPDTWRDVRGFALRFYTEEGNYDLVGNNTPIFFLRDPMKFTHFIRSQKRLPDSGLRDATMQWDFWTNNPESAHQVTYLMGPRGLPRTWREMNGYGSHTYLWVNAQGEKHWVKYHFISQQGVHNLSNDEATKIAGENADFHRQDLFESIAKGDHPKWDLYIQAIPYEEGKTYRFNPFDLTKTISQKDYPRIKVGTLTLNRNPENHFAQIESAAFSPSNTVPGIGLSPDRMLLGRAFAYHDAQLYRVGAHVNQLPVNRPKNAVHNYAFEGQMWYDHTGDRSTYVPNSNGDSWSDETGPVDDGWEADGTLTREAQALRADDDDFGQAGTLVREVFSDQERDDFVETVAGALKGVRQDVQARAFEYWKNVDATIGQRIEDEVKRHEGDGIPGVEAGGEARM

SEQ ID NO: 43139 - DNA, 1503 bp, Neisseria gonorrhoeae
  CDS (1)..(1503): transl_table=11
atgactacctccaaatgccccgtaacccatctgaccatgaacaacggggcgcccgttgccgacaatcaaaacagcctgaccgccggcacgcgcggccccctgctgacgcaagatttgtggctgaatgaaaaactcgccgacttcgtgcgcgaagtcatccccgaacgccgtatgcacgccaaaggttcgggcgcgttcggtacgtttaccgtaacacgcgacatcaccaaatacacccgcgccaaaattttcagcgaagtcggcaaaaaaaccgagatgttcggccgtttggccaccgtggcgggcgagcgcggcgcagatgcgtatacgcgcgtccgcggttttgcgttgaaattctataccgaagaaggcaactgggatgtggtcggcaacaacacgcccgtgttctatcccgacctgcgcaaattccccgacctgaacaaagccgtcaaacgatccgcgcaccaatacagttccgccacaaacaactgggacttctgggcgctgctgcccgaagccctgcaccaagttaccatcgtgatgagcgaccggggcattcccgccagctaccgccatatgcacggcttcggttcgcatacctacagcctctggaacgaagcgggcgaacgtttttgggtgaaattccatttccgcagccagcaagggattaaaaacctgaccaacgaagaagctgcaaaaatcatcgccgacgaccgcgaaagccatcagcgcgacctgtacgaagccatcgagcgcggcgagttcccgaaatggacgatgtacatccaagtcatgcctgaagccgatgccgcaaaagtgccttatcatccgtttgacttgaccaaagtttggccgaaaaaagactatccgctgattgaagtggccgaattcgagttgaaccgcaatcccgaaaacttcttcgccgatgtggaacaatccgccttcgcaccgagcaacctcgttcccggtatcggcgcgagcccggataaaatgttgcaagcccgtttgttcaattacgccgacgcgcaacgttaccgcttgggtgtgaacttccgccaaatccccgtcaatcgtccgcgttgccctgttcacagcaaccagcgcgacggacaaggccgcgcgacggaactacggcagcctgcgcactacgaacccaacagcttcggccaatggagccaacaacccgacttcgccgaaccgcctttgaaaatcaacggcgacgcggcacactgggactaccgccaagacgatgacgactacttcagccaaccgcgcgccttgttcaacctgatgaacgacgcgcagaaacaggctttgtttgacaacaccgccgcagccatgggcgatgcgcccgacttcatcaaataccgccatatccgcaactgctaccgttgcgacccggcatacggtgaaggcggtagcaaagccctcggactgaccgtcgaagagccacaagccgcgcgcgcgaccgatcccgcgctgggtcagggaggtttgctgtaa

SEQ ID NO: 43140 - protein, 500 aa, Neisseria gonorrhoeae
MTTSKCPVTHLTMNNGAPVADNQNSLTAGTRGPLLTQDLWLNEKLADFVREVIPERRMHAKGSGAFGTFTVTRDITKYTRAKIFSEVGKKTEMFGRLATVAGERGADAYTRVRGFALKFYTEEGNWDVVGNNTPVFYPDLRKFPDLNKAVKRSAHQYSSATNNWDFWALLPEALHQVTIVMSDRGIPASYRHMHGFGSHTYSLWNEAGERFWVKFHFRSQQGIKNLTNEEAAKIIADDRESHQRDLYEAIERGEFPKWTMYIQVMPEADAAKVPYHPFDLTKVWPKKDYPLIEVAEFELNRNPENFFADVEQSAFAPSNLVPGIGASPDKMLQARLFNYADAQRYRLGVNFRQIPVNRPRCPVHSNQRDGQGRATELRQPAHYEPNSFGQWSQQPDFAEPPLKINGDAAHWDYRQDDDDYFSQPRALFNLMNDAQKQALFDNTAAAMGDAPDFIKYRHIRNCYRCDPAYGEGGSKALGLTVEEPQAARATDPALGQGGLL

SEQ ID NO: 43141 - DNA, 1449 bp, Onchocerca volvulus endobacterium
  CDS (1)..(1449): transl_table=11
atgagccagaataaaacccttactaccgccagcgggccacctgtcgcggataaccagaattcccgttccgccggcccacgcggcccgctgctgctcgacgactttcacctgatcgagaagctcgctcacttcaaccgtgaaaacattcctgagcgtcgtgtacacgccaaaggctcgggcgcttacggtaccttcaccgtcactcaagacatcacgcagtacaccagcgccaagctgttcgattctgtgggcaagcaaactccgactttcctgcgcttctccacggtgggtggcgagcgtggttcggctgatactgagcgcgacccgcgtggtttcgcgttgaagttctacaccgaagaaggcaactgggacatcgttggtaacaacaccccggtgttcttcatccgcgacccgctgaagtttcccgactttatccacacccaaaagcgcctgccgcaaagcaacctgaaaagtgcacagatgatgtgggacttctggtcgcactcccctgaggcgctgcaccaggtcaccatcctgttttcggaccgtggcatcccggacggctaccgtcacatgcacggcttcggcagtcacacctacagcttgattaacgccaaaggcgagcgtcactgggtgaagtggcactacaagaccaagcaaggtatcaagaacctggcgccggctgacgctgcacgcctggcgggtaccgaccctgattacgctcagcgcgatctgttcggtgctattgagcgtggtgacttcccgaaatggcgcgtgtgcattcagatcatgactgaggcccaggccaacgctcactacgaaaacccgttcgacgtgaccaagacctggtcgcagaaagagttcccgctgatcgaagtgggtgagctggaactgaaccgcaacccgctgaactacttcgctgaagttgaacaggcggctttcggtccaagcaacatggtcccgggtgttggcctgtcgccagaccgcatgctgcaagggcgcgtgttcgcttacgccgatgcccatcgctatcgcgtaggtaccaatcaccagcaactgccggtgaatgcgccacgcagcccagtcaacagctaccagcgtgatggttcgatggcattcggctccaatggtggtgcggcccccaattacgagccaaacagctacgccgatgcgccgaagcaggctcctcagtatgccgagccagccttggccctgagcggtgcggctgatcgttacgatcaccgcgaagataccgactactacagccatgccggtgcgctgttccgcctgatgaacgatgagcagaaagccctgctgatcaacaatatcgccggcgcaatggcgggtgtttccagcgacgtggtgcagcgccagttgcagtacttcttcaaggccgacccggcttatggagaagggatcgcatctgcactgggtgtatcgcttaactga

SEQ ID NO: 43142 - protein, 482 aa, Onchocerca volvulus endobacterium
MSQNKTLTTASGPPVADNQNSRSAGPRGPLLLDDFHLIEKLAHFNRENIPERRVHAKGSGAYGTFTVTQDITQYTSAKLFDSVGKQTPTFLRFSTVGGERGSADTERDPRGFALKFYTEEGNWDIVGNNTPVFFIRDPLKFPDFIHTQKRLPQSNLKSAQMMWDFWSHSPEALHQVTILFSDRGIPDGYRHMHGFGSHTYSLINAKGERHWVKWHYKTKQGIKNLAPADAARLAGTDPDYAQRDLFGAIERGDFPKWRVCIQIMTEAQANAHYENPFDVTKTWSQKEFPLIEVGELELNRNPLNYFAEVEQAAFGPSNMVPGVGLSPDRMLQGRVFAYADAHRYRVGTNHQQLPVNAPRSPVNSYQRDGSMAFGSNGGAAPNYEPNSYADAPKQAPQYAEPALALSGAADRYDHREDTDYYSHAGALFRLMNDEQKALLINNIAGAMAGVSSDVVQRQLQYFFKADPAYGEGIASALGVSLN

SEQ ID NO: 43143 - DNA, 1485 bp, Pisum sativum
  CDS (1)..(1485)
atggatccttacaagcatcgtccttctagcgctttcaattctcctttctggactacgaactccggtgctcctgtttggaataataactcttccctaaccgttggatctagaggtccaattctattggaagattatcatcttgtggaaaagcttgcccaatttgatagggaaaggatcccagaacgtgttgtccatgctaggggagcaagtgcaaagggtttctttgaagtcacacatgatatttcgcacctgacatgtgcagatttccttcgagcccctggtgttcagacacctgtcattgtgcgtttctcaactgtcattcatgaacgtggcagccctgaaaccttgagggatccccgaggttttgctgtgaaattttacaccagagagggtaactatgaccttgttggaaacaactttcccgtcttcttcgttcatgacggtatgaattttccagatatggtccatgctcttaaacccaatccccagacccacatccaggagaattggagaattcttgatttcttctacaactttccagaaagccttcacatgttctccttcctatttgatgatgtgggtgtcccacaagattataggcatatggatggttttggagttaacacatacaccctgatcaacaaggctggaaaatcggtgtatgtcaaatttcactggaagcccacctgtggtgtgaagtgtctattggaggaagaggccattcaggtgggaggatccaaccacagccatgctactaaagacctttatgactcaattgctgctggtaactatcctgagtggaaactttacattcaaacaatagatcctgctcatgaagacagatttgagtttgacccacttgatgtaactaagacttggcccgaggacatcataccccttcagcccgtaggtcgcatggtcttgaacaagaacatagataatttctttgctgagaatgaacagcttgcattttgtcctgccattatgctgcctggtatatattactcagatgacaagatgcttcaaactagggttttctcttatgctgattcacagaggcacagacttggaccgaactacctgcaacttcctgttaatgctcccaagtggtctcaccacaacaatcaccatgagggtttcatgaatgccattcacagggatgaggaggtcaattacttcccttcaaggcatgatactgttcgtcatgcagaaagggtccccattcctactactcatttatctgcaaggcgtgaaaagtgcaatattccgaaacagaatcacttcaagcaggctggagaaagataccgaacttgggcacctgacaggcaggaaagatttctccgcaggtgggtagaagctttatccgacaccgatccacgcatcacccatgaaatccgcagcatttgggtatcatactggtctcaggctgatcgttctcttgggcagaagttagcatctcatctgaacatgaggcctagcatttaa

SEQ ID NO: 43144 - protein, 494 aa, Pisum sativum
MDPYKHRPSSAFNSPFWTTNSGAPVWNNNSSLTVGSRGPILLEDYHLVEKLAQFDRERIPERVVHARGASAKGFFEVTHDISHLTCADFLRAPGVQTPVIVRFSTVIHERGSPETLRDPRGFAVKFYTREGNYDLVGNNFPVFFVHDGMNFPDMVHALKPNPQTHIQENWRILDFFYNFPESLHMFSFLFDDVGVPQDYRHMDGFGVNTYTLINKAGKSVYVKFHWKPTCGVKCLLEEEAIQVGGSNHSHATKDLYDSIAAGNYPEWKLYIQTIDPAHEDRFEFDPLDVTKTWPEDIIPLQPVGRMVLNKNIDNFFAENEQLAFCPAIMLPGIYYSDDKMLQTRVFSYADSQRHRLGPNYLQLPVNAPKWSHHNNHHEGFMNAIHRDEEVNYFPSRHDTVRHAERVPIPTTHLSARREKCNIPKQNHFKQAGERYRTWAPDRQERFLRRWVEALSDTDPRITHEIRSIWVSYWSQADRSLGQKLASHLNMRPSI

SEQ ID NO: 43145 - DNA, 1479 bp, Phaseolus aureus
  CDS (1)..(1479)
atggatccctacaagtaccggccatccagcgcttttaattctcccttctggactacaaattctggtgctcctgtttggaacaacaacaactctttaactgttggaactagaggtccaattctcctggaggattatcatcttgtggaaaagcttgcaaactttgacagggaacggatcccagaacgagttgtccatgccaggggagctagtgcaaagggtttctttgaggtcacacatgacgtttctcacctgacatgtgcagatttccttcgagcacctggagttcagacaccagtaattgtccgtttttcaactgtcatccatgagcgtggtagccctgaaactttgcgggaccctcgaggttttgctgtgaaattttacaccagagagggtaactttgatcttgttggaaacaaccttcccgtcttctttgtacgtgacggcatgaagtttccagatatggtccatgctcttaaacccaatcctaagaaccacatccaggagaattggaggatccttgacttcttctctcactttccggaaagccttcacatgttctcctttttatttgatgatttgggtgttccacaagattacaggcatatggatggttttggagttaacacatataccttgatcaacaaggctgggaaagcagtgtatgtgaaatttcactggaagaccacgagtggtgtgaagtgtctattggaggaagaagccattaaggtgggaggagccaaccatagccatgctacacaagaccttcatgattcgattgctgctggtaactatcctgagtggaaactattcattcagacaatagatcctgagcacgaagacaaatttgactttgaccctcttgatgtaaccaagacttggcccgaggacattatacccttgcagcctgttggtcgcttggtcctgaataagaacatagataacttctttgctgagaatgaacaacttgcattttgccctgccataatagttcctggtgtatattactctgatgataagatgcttcaaaccaggatattctcttatgctgattcacagaggcacaggcttggaccaaactatctgctacttcctgccaatgctcccaagtctgctcaccacaacaatcaccatgaaggtttcatgaatttcatccacagggatgaggaggtcaattacttcccctcaaggtatgatcctgttcgtcatgcagaaaagttccccatacctcctgctgtcttctctggaaggcgtgaaaagattgcaattgagaaggagaacaacttcaagcaggctggagagagattccgatcttgggcacctgacaggcaagatagatttatccgccgatgggttgatgctttatctgacccacgtgtcacccatgaaatccgcagtgtctggatatcatactggtctcaggctgaccgttctcttggccaaaagatagcatctcatctgaacatgaggccaaatatttaa

SEQ ID NO: 43146 - protein, 492 aa, Phaseolus aureus
MDPYKYRPSSAFNSPFWTTNSGAPVWNNNNSLTVGTRGPILLEDYHLVEKLANFDRERIPERVVHARGASAKGFFEVTHDVSHLTCADFLRAPGVQTPVIVRFSTVIHERGSPETLRDPRGFAVKFYTREGNFDLVGNNLPVFFVRDGMKFPDMVHALKPNPKNHIQENWRILDFFSHFPESLHMFSFLFDDLGVPQDYRHMDGFGVNTYTLINKAGKAVYVKFHWKTTSGVKCLLEEEAIKVGGANHSHATQDLHDSIAAGNYPEWKLFIQTIDPEHEDKFDFDPLDVTKTWPEDIIPLQPVGRLVLNKNIDNFFAENEQLAFCPAIIVPGVYYSDDKMLQTRIFSYADSQRHRLGPNYLLLPANAPKSAHHNNHHEGFMNFIHRDEEVNYFPSRYDPVRHAEKFPIPPAVFSGRREKIAIEKENNFKQAGERFRSWAPDRQDRFIRRWVDALSDPRVTHEIRSVWISYWSQADRSLGQKIASHLNMRPNI

SEQ ID NO: 43147 - DNA, 1524 bp, Pichia angusta
  CDS (1)..(1524)
atgtcaaacccccctgttttcactacttcgcaaggttgtcccgtgtcggatcccttcaccacccaacggatccctctggattccacgggctacaagtatgcccctccaattggtccattgctcttgcaggacttcaagctcattgacacactctcccactttgacagagaaagaattccagagagagtggtgcacgccaagggtgccggagcttacggtgtgtttgaagtgaccgacgacattaccgatgtttgcagtgccaagttcctcgacactgttggtaagaagacaagaattttcaccagattctccactgtgggtggagaaaaaggttctgcagacacagccagggacccaaggggatttgctaccaaattctacacagaagacggaaacttggaccttgtgtacaacaacacgccgatcttcttcatcagggacccaattaagttcccccactttattcacacgcagaagagaaacccggccaccaacttgaaggacccaaacatgttctgggactacctgacggccaatgacgagtctttgcaccaagtcatgtatttattctccaacagaggtacgcctgcctcgtacagaaccatgaacggctactctggccacacctacaaatggtacaattccaagggcgagtgggtgtatgtgcaggtccacttcattgccaaccaaggcgtgcacaatctgctcgacgaggaagctggaaggctggctggagaagatccagaccactccaccagagacttgtgggaagcaattgagaaaggagattatccatcgtgggagtgctacatccagaccatgacccttgagcagtccaagaagctgccattctctgtgtttgacttgaccaaggtctggccacacaaggacttcccgctgagacactttggcagattcactcttaatgagaatcctaagaattactatgctgaaacggagcagattgccttctctccttcgcacaccgttcctggaatggagccttcgaacgaccctgtcttgcaatcgagactgttttcgtacccagacacgcacagacacagacttggacctaactaccaccagatccctgtcaactgtccactgaaatcgggctcgttcaatcctatcaacagagacggtcctatgtgtgttgatggcaacttgggaggcacgccgaactacgcaaacgcttacaactgtcctattcagtacgctgtgagccctaaggcatctggcaataagccagacgaaaagtatactggagaagtggtcccataccactgggagcacactgattatgactacttccagccaaagatgttctggaaggttcttggcaggacgccaggcgaacaggagtcccttgtcaagaacgttgcaaaccatgtttctgctgctgacgagttcatccaggaccgtgtttacgaatacttctcgaaggccgagcctattattggagatctgatcagaaagaaggttcaggagctcaaaagaaaggcttcttctccatccaaaatataa

SEQ ID NO: 43148 - protein, 507 aa, Pichia angusta
MSNPPVFTTSQGCPVSDPFTTQRIPLDSTGYKYAPPIGPLLLQDFKLIDTLSHFDRERIPERVVHAKGAGAYGVFEVTDDITDVCSAKFLDTVGKKTRIFTRFSTVGGEKGSADTARDPRGFATKFYTEDGNLDLVYNNTPIFFIRDPIKFPHFIHTQKRNPATNLKDPNMFWDYLTANDESLHQVMYLFSNRGTPASYRTMNGYSGHTYKWYNSKGEWVYVQVHFIANQGVHNLLDEEAGRLAGEDPDHSTRDLWEAIEKGDYPSWECYIQTMTLEQSKKLPFSVFDLTKVWPHKDFPLRHFGRFTLNENPKNYYAETEQIAFSPSHTVPGMEPSNDPVLQSRLFSYPDTHRHRLGPNYHQIPVNCPLKSGSFNPINRDGPMCVDGNLGGTPNYANAYNCPIQYAVSPKASGNKPDEKYTGEVVPYHWEHTDYDYFQPKMFWKVLGRTPGEQESLVKNVANHVSAADEFIQDRVYEYFSKAEPIIGDLIRKKVQELKRKASSPSKI

SEQ ID NO: 43149 - DNA, 1485 bp, Rhizobium meliloti
  CDS (1)..(1485): transl_table=11
atgacagatcgtccgacgatcaccaccaccgccggggcgccggtgccggacaaccagaattcgctgacggcaggcccgcgtggcggcatcatgctgcaggattatcagctcatcgagaagctggcgcaccagaaccgcgagcgcattccggaacgcgtcgtccatgccaagggctggggtgctttcggctcgctgaagatcaccggcgacatctcgcaatacaccagggcgaagtgtctccagcccggcgcggaaacgccgatgctggcccgcttctcgaccgttgccggcgaacagggcgccgccgaccacgagcgcgacgtccgcggtttcgcgctgaaattctacaccgatgaaggcaactgggacctcgtcggcaacaatacgccggtcttcttcattcgcgatccctacaagttccccgacttcatccacacgcagaagcgtcatccgaagaccaatctccgttccgccactgccatgtgggactactggtccctgtcgccggaaagcctgcatcaggtgacgatcctgatgtccgaccgcggcctcccgcagacgccgatgcatatgaacggctacggctcgcacacctattccttctggaacgacgcgggcgaacgctattgggtcaagttccacttcaagacccagcagggccataagttcttcaccaacgaggaaggcgaggcggtcatcggcaagacccgcgagggctatcaggagtcactgttctacgccatcgagaacggcgagttcccgcgctggacggtgcaggtgcagatcatgccggagctcgacgtcgagaagacgccctacaacccgttcgacctgaccaaagtctggccgcatgccgactacccgccggtcgagatcggcgtgctggagctgaaccgcaacccggaaaactattttgccgagatcgagaacgcagccttctcgccctccaatatcgtgcccggcatcggcttctcgccggacaaggtgctgcaggcccgcatcttctcctatgcggacgcccaccgctaccgcctcggcacgcattacgagcacatcccggtcaaccagccgcgctgcccggttcaccactatcatcgcgatggtcagatgaacacctatggcggcattcgcaccggcaatccggacgcctattacgagcccaactccttcaatggcccggccgaacagccgctggccaaggaaccgccgctcagaatagacggcgacatgtcccgctacgaccaccgcgtcggcaatgacgactacgtccaggtgcgggcgctgttcggcctcttcgacgaagggcagaagtcgcgcctcttctccaacatcgcggccgccatgggcggcgtcccgggcgagatcatcgagcggcagctcattcatttcgcccgtgtccacccggaatacgaagcgggcgtccgccaggcactgaagaccgcccacggctacgaggcggacacgatcagcacggcggccgagtaa

SEQ ID NO: 43150 - protein, 494 aa, Rhizobium meliloti
MTDRPTITTTAGAPVPDNQNSLTAGPRGGIMLQDYQLIEKLAHQNRERIPERVVHAKGWGAFGSLKITGDISQYTRAKCLQPGAETPMLARFSTVAGEQGAADHERDVRGFALKFYTDEGNWDLVGNNTPVFFIRDPYKFPDFIHTQKRHPKTNLRSATAMWDYWSLSPESLHQVTILMSDRGLPQTPMHMNGYGSHTYSFWNDAGERYWVKFHFKTQQGHKFFTNEEGEAVIGKTREGYQESLFYAIENGEFPRWTVQVQIMPELDVEKTPYNPFDLTKVWPHADYPPVEIGVLELNRNPENYFAEIENAAFSPSNIVPGIGFSPDKVLQARIFSYADAHRYRLGTHYEHIPVNQPRCPVHHYHRDGQMNTYGGIRTGNPDAYYEPNSFNGPAEQPLAKEPPLRIDGDMSRYDHRVGNDDYVQVRALFGLFDEGQKSRLFSNIAAAMGGVPGEIIERQLIHFARVHPEYEAGVRQALKTAHGYEADTISTAAE

SEQ ID NO: 43151 - DNA, 1539 bp, Schizosaccharomyces pombe
  CDS (1)..(1539)
atgaactcgaaagactcaaataccgtccctgtttacaccaccaacaccggttgtcccatttttaaccctatggctgcggctcgtgtgggtaagggaggtcctgtcttacttcaagattcccatttaatcgacgtctttcaacactttgatcgcgagcgtattcctgaacgtgtcgtccatgcaaagggttccggtgcttttggtgaattcgaatgcaccgacgacattaccaagtataccaaacataccatgttttctaaggttggtaagaaaacccctatggttgctcgtttctccaccgtcggtggtgaaaggggtactcctgatactgctcgtgatcctcgtgggttcgcattaaagttctacaccgatgaaggtattttcgatatggttggaaacaatacccctgtcttcttccttcgtgatcccgctaaattccctctcttcatccatactcagaagcgtaaccctcaaaatgatatgaaggatgctactatgttttgggattacctttctcaaaacgcagagtccatccatcaagttatgattcttttctctgacttgggtggtaccccttatagctaccgtttcatggatggcttttccagtcatacctacaaatttgttaatgataagggtgaattctactattgcaaatggcatttcattactaatcaaggaaccaagggtttaacaaatgaagaagccgctgcattggatggatccaatcccgaccatgctcgtcaagatctattcgaagctattgaacgtggtgattaccccagttggacgctttacgttcaagttatgacccctcaggaggctgaaaaatatcgctacaacattttcgatcttactaaggtctggcctcataaggacgtaccaatgcaaagggttggacgctttaccttgaatcagaatcctaccaatttctttgcagatatcgagcaggctgggttctctccttctcatatggttcctggtattgaagtctcagcggatcctgttttgcaagtacgtacattttcctatcctgatacccaccgccatcgtttgggtgctaatttcgagcaaattcccgtcaattctcctaagtgtcctgtctttaactattctcgtgacggccctatgaatgtcaatggaaaccaaggaaattggccaaactatccatcctcaatccgaccacttgctaaagttcaatatgagcctgacgaaggtcacgaaaagtgggtaggtcaagttacttaccatatggacgaaattaccgacgttgattttgagcaacctagagcgttttggcaaaatgttttgggcaagaaacctggacagcaagataactttgttaagaacgttgccggtcacttgtctggtgctatatctcctgtacgtgaacgccaatacggtgtatttactcgtgttgattcagagcttggtcgccgtattcgtgaggctactgaagctgaagtgaagaagatggaagaaaaagcccccaagccaattaacaagggcgaaccccatatgttccaaggaagctcataa

SEQ ID NO: 43152 - protein, 512 aa, Schizosaccharomyces pombe
MNSKDSNTVPVYTTNTGCPIFNPMAAARVGKGGPVLLQDSHLIDVFQHFDRERIPERVVHAKGSGAFGEFECTDDITKYTKHTMFSKVGKKTPMVARFSTVGGERGTPDTARDPRGFALKFYTDEGIFDMVGNNTPVFFLRDPAKFPLFIHTQKRNPQNDMKDATMFWDYLSQNAESIHQVMILFSDLGGTPYSYRFMDGFSSHTYKFVNDKGEFYYCKWHFITNQGTKGLTNEEAAALDGSNPDHARQDLFEAIERGDYPSWTLYVQVMTPQEAEKYRYNIFDLTKVWPHKDVPMQRVGRFTLNQNPTNFFADIEQAGFSPSHMVPGIEVSADPVLQVRTFSYPDTHRHRLGANFEQIPVNSPKCPVFNYSRDGPMNVNGNQGNWPNYPSSIRPLAKVQYEPDEGHEKWVGQVTYHMDEITDVDFEQPRAFWQNVLGKKPGQQDNFVKNVAGHLSGAISPVRERQYGVFTRVDSELGRRIREATEAEVKKMEEKAPKPINKGEPHMFQGSS

SEQ ID NO: 43153 - DNA, 1479 bp, Soldanella alpina
  CDS (1)..(1479)
atggatccttacaagtaccgctcttcaagtgctttcaacactcctttctggaccacaaattcaggtgctccagtgtggaacaacaactcctcattgactgttggaaccagagggccaattttgcttgaggattaccatctagtggagaagcttgcaaattttgacagggagcgtatcccagaacgtgtcgtacatgctagaggagcaagtgctaagggctttttcgaggttacacatgacatttctcaccttacttgtgccgatttcctaagagctccaggtgtccagacgccagttattgttcgtttctccactgttattcatgaacgtggtagccctgagactcttagggaccctcgtggttttgcagtgaaattctacacaagagagggtaactttgacttggtgggaaacaatttcccagttttctttgttcgtgatggaatgaaatttcccgacatggtccatgctcttaagcccaaccccaagtcacacattcaggaaaattggagaatactcgacttcttctctcaccacccagagagtttgcatatgttcactttccttttcgacgatcttggtgttccgcaagattacaggcacatggaaggctcgggtgtgaatacatacacattaataaataaagctggaaaagctcaatatgttaagttccattggaaacctacatgtggagtgaaatgtttattagaagatgaggcaataaaggtcggaggcgcaaatcatagtcacgccacgaaggatctatacgactcgatatcagctggaaattatcctgaatggaaactctttattcagataatagagcctgatcatgaggataaattcgactttgatccacttgatgtgaccaaaacttggcctgaggatatcatacccttgatgcctgtgggtcgcttggtgttgaacaaaaatatcgataatttctttgcagaaaatgagcaattggcgttttgcccagctcttatagtgcctggtgtttattattcggacgataagctgctccaaactcggatattttcttatgctgatacccaaaggcaccgtcttggacctaattatctgcagcttccacctaatgcccctaagtgtgcccatcacaacaatcaccatgagggtcttatgaactttatgcacagagatgaggaggtgaactatttcccttcaaggttcgatccagtacgtcatgctgagaggcacccaatccctcctcctgtcttgaccggaaagcgcgacaggtgcatgattgagaaagagaacaatttcaagcagcctggagagagatacagaacctttgcaccagacaggcaagaacggtttgtctgcaggtgggttgatgctttatctgacccacgtgtcacccatgaaatccgcagcatctggatttcgtactggactcaggcggacaaatctctgggacagaaattagcatctcgcttgaatgtgaggccaaccatgtga

SEQ ID NO: 43154 - protein, 492 aa, Soldanella alpina
MDPYKYRSSSAFNTPFWTTNSGAPVWNNNSSLTVGTRGPILLEDYHLVEKLANFDRERIPERVVHARGASAKGFFEVTHDISHLTCADFLRAPGVQTPVIVRFSTVIHERGSPETLRDPRGFAVKFYTREGNFDLVGNNFPVFFVRDGMKFPDMVHALKPNPKSHIQENWRILDFFSHHPESLHMFTFLFDDLGVPQDYRHMEGSGVNTYTLINKAGKAQYVKFHWKPTCGVKCLLEDEAIKVGGANHSHATKDLYDSISAGNYPEWKLFIQIIEPDHEDKFDFDPLDVTKTWPEDIIPLMPVGRLVLNKNIDNFFAENEQLAFCPALIVPGVYYSDDKLLQTRIFSYADTQRHRLGPNYLQLPPNAPKCAHHNNHHEGLMNFMHRDEEVNYFPSRFDPVRHAERHPIPPPVLTGKRDRCMIEKENNFKQPGERYRTFAPDRQERFVCRWVDALSDPRVTHEIRSIWISYWTQADKSLGQKLASRLNVRPTM

SEQ ID NO: 43155 - DNA, 1479 bp, Solanum melongena
  CDS (1)..(1479)
atggatctctctaagtatcgcccttcaagcgcatacgacacccctttcttgacaacaaatgctgggggtcctgtgtacaacaatgtatcttccttgactgttggacctagagggcctgttctgcttgaggattatcatttaatagagaagcttgcgacttttgatcgcgagaggatacctgagcgtgttgttcatgctcgaggtgctagtgccaagggattctttgaagtcactcatgatgtttctcatcttacttgtgctgatttcctccgagctcctggcgttcaaacgcctgttatttgtcgcttctctactgttgttcatgaacgtggaagccccgagtctatcagggatattcgcggttttgctgtcaaattttacaccagagaggggaactttgatctggttggaaacaacgtccctgtcttctttaatcgcgatgcaaagtcattccctgacacgattcgtgcattgaaaccaaatccaaagtcacacattcaggaaaactggaggatccttgatttcttctctttccttccggagagtttgcatacgtttgcctttttctatgacgatgtttgtctaccgataaattacagacacatggaaggatttggggttcatgcttatcaattgatcaacaaagctgggaaagcacattatgtgaagtttcactggaagccaacttgtggtgtcaaaagcatgacggaggaagaagctattagagtcggaggtactaatcatagccacgcgaccaaggatctctacgattcaattgctgctggaaactatccagagtggaaactttttatccaaattatggaccctgaggatgtagacaaattcgactttgatcctctcgatgtaaccaagacatggcctgaggatatcttgcctttgatgccagttggtcgattggtgttgaatagaaacattgataacttctttgctgagaatgagcagctcgcgtttaaccctggtcatatcgtccctggtgtttactattcggaggataagcttcttcagactaggatatttgcatatgctgatactcagagacaccgtattgggccaaactatatgcagctcccagttaatgctcccaagtgtgctcatcacaacaatcatcgcgatggtgccatgaacttcatgcatcgcgatgaagaggtggattatttgccctcaaggtttgatccttgtcgtcctgctgagcagtacccaattccttcttgtgtcttgacaggaaggcgcgagaagtgtgtcattccgaaggagaacaacttcaaacaggcaggggagagataccgaacctgggaacctgacaggcaagatagatacatcaacaaatgggttgagtctttatccgatccacgagtcactcatgagattcgcagtatatggatatcatacttgtctcaggctgacaagtcctgtggtcagaaggtcgcttctcgtctactggtcaagcctacaatgtga

SEQ ID NO: 43156 - protein, 492 aa, Solanum melongena
MDLSKYRPSSAYDTPFLTTNAGGPVYNNVSSLTVGPRGPVLLEDYHLIEKLATFDRERIPERVVHARGASAKGFFEVTHDVSHLTCADFLRAPGVQTPVICRFSTVVHERGSPESIRDIRGFAVKFYTREGNFDLVGNNVPVFFNRDAKSFPDTIRALKPNPKSHIQENWRILDFFSFLPESLHTFAFFYDDVCLPINYRHMEGFGVHAYQLINKAGKAHYVKFHWKPTCGVKSMTEEEAIRVGGTNHSHATKDLYDSIAAGNYPEWKLFIQIMDPEDVDKFDFDPLDVTKTWPEDILPLMPVGRLVLNRNIDNFFAENEQLAFNPGHIVPGVYYSEDKLLQTRIFAYADTQRHRIGPNYMQLPVNAPKCAHHNNHRDGAMNFMHRDEEVDYLPSRFDPCRPAEQYPIPSCVLTGRREKCVIPKENNFKQAGERYRTWEPDRQDRYINKWVESLSDPRVTHEIRSIWISYLSQADKSCGQKVASRLLVKPTM

SEQ ID NO: 43157 - DNA, 1509 bp, Toxoplasma gondii
  CDS (1)..(1509)
atgactcaggttccgcccgtaacattccagcagtatggaccggttatcacgacctctgctgggaacccagtcgatgacaaccaaaactcggtaactgctggaccctacggccccgcgatcctgagtaacttccatctcatcgacaagctggcccacttcgatcgagaacgcattcccgagcgcgttgtgcatgccaagggcggtggcgcctttggctatttcgaggtcactcatgacatcaccagattctgcaaagcgaagctgttcgagaaaatcggaaagcggacgcctgtgtttgcacgtttttcgacggtggctggcgagtcggggagtgcggacaccaggcgcgacccgcgcggcttcgcactcaagttctacacggaggaggggaactgggacatggttggaaacaacactcctatctttttcgttcgagacgccataaagttccccgacttcattcatacgcagaagcggcatccgcaaacgcacctccacgacccgaacatggtgtgggatttcttctcgctcgttccggaaagtgtgcatcaagtgaccttcctgtacacggaccgtggcacaccggacggcttccgccatatgaatggctacgggagtcacacgttcaaattcatcaacaaagacaacgaagccttttatgtcaagtggcacttcaagacaaaccaaggaatcaagaacctgaacagacagcgcgcaaaagaactcgagagcgaagatcctgactacgcggttcgtgacctgttcaacgccattgccaagcgagagtttccctcttggaccttctgtattcaggtaatgcccttgaaagatgcagagacgtacaaatggaatgtctttgacgtgaccaaagtgtggccgcacggcgactacccactcatcccggtcggaaaactcgtgctggatcgcaacccagaaaactatttccaagacgtggaacaagcagcttttgcgccagctcatatggtgccagggattgaaccgagcgaagatcgcatgctgcagggacgcatgttctcctacatcgacactcatcggcacagacttggcgccaattaccatcagattcctgtgaaccgcccgtggaacgcccgtgggggcgactactccgtccgcgatggtccaatgtgcgtcgacgggaacaaagggtctcagctgaattacgaaccgaacagtgtggacggttttccaaaggaagacagaaatgctgctgtgtcgggaacgaccacagtgagtggcacggtcgcgtgccatcctcaagagcaccccaacagtgactttgagcagccagggaacttttatagaacggtcttgagtgagccggagagggaagcgctcattggcaacatcgccgagcatctcaggcaggcgagacgagatattcaagagcgacaggtgaagattttttacaagtgcgatccagagtatggcgagcgcgtcgctcgagccatcggtttgccgactgcggcgtgctacccagccaagatgtag

SEQ ID NO: 43158 - protein, 502 aa, Toxoplasma gondii
MTQVPPVTFQQYGPVITTSAGNPVDDNQNSVTAGPYGPAILSNFHLIDKLAHFDRERIPERVVHAKGGGAFGYFEVTHDITRFCKAKLFEKIGKRTPVFARFSTVAGESGSADTRRDPRGFALKFYTEEGNWDMVGNNTPIFFVRDAIKFPDFIHTQKRHPQTHLHDPNMVWDFFSLVPESVHQVTFLYTDRGTPDGFRHMNGYGSHTFKFINKDNEAFYVKWHFKTNQGIKNLNRQRAKELESEDPDYAVRDLFNAIAKREFPSWTFCIQVMPLKDAETYKWNVFDVTKVWPHGDYPLIPVGKLVLDRNPENYFQDVEQAAFAPAHMVPGIEPSEDRMLQGRMFSYIDTHRHRLGANYHQIPVNRPWNARGGDYSVRDGPMCVDGNKGSQLNYEPNSVDGFPKEDRNAAVSGTTTVSGTVACHPQEHPNSDFEQPGNFYRTVLSEPEREALIGNIAEHLRQARRDIQERQVKIFYKCDPEYGERVARAIGLPTAACYPAKM

SEQ ID NO: 43159 - DNA, 1449 bp, Vibrio fischeri
  CDS (1)..(1449): transl_table=11
atgagtaagaagttaacaacagcagcaggctgtcctgttgcacataaccaaaatgttcaaactgcgggtaaacgtggccctcaattattgcaagatgtgtggtttttagaaaaactggcgcattttgatcgtgaagttattcctgagcgtcgtatgcatgcgaaaggctctggtgcttacggtacatttacggttactcacgacattacgaaatatacgaaagcaaaattgttttctgaaattggtaaacaaaccgagttattcgcgcgtttcacaacggtagcgggtgagcgtggtgctgctgatgctgagcgtgatattcgtggttttgcattaaaattctacacagaagaaggtaactgggatttggttggtaataatacacccgtattcttcctacgtgatccactaaaattccctgatttaaaccacgcagtgaaacgcgatcctcgcacaaatatgcgaagcgctaaaaataactgggatttttggacatcactacctgaagcacttcatcaagtgaccatcgtaatgagtgatcgtggtattcctgcaacataccgtcatatgcatggttttggtagccacacgtttagttttattaatagcgataatgagcgtttttgggttaaattccactttaaatcacaacaaggcattaaaaacttgtcagatgctgaagctgcacaagtgattggtcaagatcgtgaaagtcatcaacgtgatttacttgaaagtattgataaccaagatttccctaaatggacactaaaagttcagatcatgccagaagcggatgcggcaacagtgccttacaatccgtttgatttaacaaaagtatggccacataaagattatcctttgattgaagtgggtgagtttgagttaaaccgtaatccgcaaaacttctttgctgaagtagagcaatcggcatttaaccctgcaaacgtagttcctggtattagcttctctccagataagatgctacaaggtcgtttatttgcatacggtgatgcacaacgctaccgtttaggtgtaaaccaccaacatattcctgtgaacgctcctcgttgtcctgttcacagctatcaccgtgatggtgctatgcgtgttgatggtaactttggcagcacgctaggttatgaaccaaataatgaaggccaatgggctgagcaacctgattttgcagaaccagcattaaatcttgatggtgcagctgcgcattgggatcaccgtgaagatgaagattacttctcacaaccgggtgatttattccgcttaatgaccgcagagcaacaagctatattgtttgataatactgctcgtaacttaaatggcgtaccaaaagagattcaacttcgtcatttaagacattgttataaagctgaccctgcttatggtgaaggtatcggtaaactgcttgatattgatgtaagcgaatttaattga

SEQ ID NO: 43160 - protein, 482 aa, Vibrio fischeri
MSKKLTTAAGCPVAHNQNVQTAGKRGPQLLQDVWFLEKLAHFDREVIPERRMHAKGSGAYGTFTVTHDITKYTKAKLFSEIGKQTELFARFTTVAGERGAADAERDIRGFALKFYTEEGNWDLVGNNTPVFFLRDPLKFPDLNHAVKRDPRTNMRSAKNNWDFWTSLPEALHQVTIVMSDRGIPATYRHMHGFGSHTFSFINSDNERFWVKFHFKSQQGIKNLSDAEAAQVIGQDRESHQRDLLESIDNQDFPKWTLKVQIMPEADAATVPYNPFDLTKVWPHKDYPLIEVGEFELNRNPQNFFAEVEQSAFNPANVVPGISFSPDKMLQGRLFAYGDAQRYRLGVNHQHIPVNAPRCPVHSYHRDGAMRVDGNFGSTLGYEPNNEGQWAEQPDFAEPALNLDGAAAHWDHREDEDYFSQPGDLFRLMTAEQQAILFDNTARNLNGVPKEIQLRHLRHCYKADPAYGEGIGKLLDIDVSEFN

SEQ ID NO: 43161 - DNA, 1548 bp, Saccharomyces cerevisiae
  CDS (1)..(1548)
atgtcgaaattgggacaagaaaaaaatgaagtaaattactctgatgtaagagaggatagagttgtgacaaactccactggtaatccaatcaatgaaccatttgtcacccaacgtattggggaacatggccctttgcttttgcaagattataacttaattgattctttggctcatttcaacagggaaaatattcctcaaaggaatccacatgctcatggttctggtgccttcggctattttgaagtaaccgatgacattactgatatctgcgggtctgctatgtttagtaaaattgggaaaagaacgaaatgtctaacaagattttcgactgtgggtggtgataaaggtagtgccgacacggttcgtgatccaagggggtttgccaccaaattctacactgaagaaggtaatttagattgggtctacaataatacaccggtattctttatcagagacccttccaagttccctcactttatccacacacagaagagaaacccacaaaccaacctaagggatgctgacatgttttgggatttcctcaccactcctgaaaatcaggtggccattcatcaagtaatgatccttttttcagaccgtggtacccctgccaactaccgtagtatgcatggttattctggtcatacctataaatggtccaataaaaacggagattggcattatgtgcaagttcatatcaaaaccgatcaaggaataaagaatttgaccatagaagaggctaccaaaattgcgggatccaatccagattactgccagcaggatttatttgaggctattcagaatggaaactatccttcctggacagtttatattcaaacaatgaccgaacgcgatgccaaaaaattaccattttcagtctttgatttgactaaagtatggcctcaggggcaattccctttacggcgtgtgggtaagattgttttgaacgagaatccactgaacttcttcgcacaggtggaacaagctgccttcgcccccagtaccacggttccttaccaagaagcaagcgctgatccagtattacaggcccgtttgttttcatatgcggatgctcatagatacaggctaggtcctaacttccatcaaatacccgtaaactgtccatatgcatctaaatttttcaatcccgctatcagagatggaccgatgaatgttaacggcaacttcggctcagaacctacatatttggccaacgataaatcgtacacgtatatccaacaggacagacccattcaacaacaccaagaggtatggaatgggccagctatcccttatcattgggcaacatccccaggtgatgtagatttcgtgcaagcaagaaatctctaccgcgttttgggtaaacaacctggacagcaaaagaacttggcatataacatcggcattcatgtagaaggcgcctgtcctcaaatacagcagcgcgtttatgatatgtttgctcgtgttgataagggactatctgaggcaattaaaaaagtagctgaggcaaaacatgcttctgagctttcgagtaactccaaattttga

SEQ ID NO: 43162 - protein, 515 aa, Saccharomyces cerevisiae
MSKLGQEKNEVNYSDVREDRVVTNSTGNPINEPFVTQRIGEHGPLLLQDYNLIDSLAHFNRENIPQRNPHAHGSGAFGYFEVTDDITDICGSAMFSKIGKRTKCLTRFSTVGGDKGSADTVRDPRGFATKFYTEEGNLDWVYNNTPVFFIRDPSKFPHFIHTQKRNPQTNLRDADMFWDFLTTPENQVAIHQVMILFSDRGTPANYRSMHGYSGHTYKWSNKNGDWHYVQVHIKTDQGIKNLTIEEATKIAGSNPDYCQQDLFEAIQNGNYPSWTVYIQTMTERDAKKLPFSVFDLTKVWPQGQFPLRRVGKIVLNENPLNFFAQVEQAAFAPSTTVPYQEASADPVLQARLFSYADAHRYRLGPNFHQIPVNCPYASKFFNPAIRDGPMNVNGNFGSEPTYLANDKSYTYIQQDRPIQQHQEVWNGPAIPYHWATSPGDVDFVQARNLYRVLGKQPGQQKNLAYNIGIHVEGACPQIQQRVYDMFARVDKGLSEAIKKVAEAKHASELSSNSKF

SEQ ID NO: 43163 - DNA, 2187 bp, Ajellomyces capsulata
  CDS (1)..(2187)
atgcggtcgctcaagcttatactcgcctcggcgagtgttgtttctgcaacttgtccctacatgtcaggggagatgcctaacagtcagaatggacccctcgatcgccgccatgacactctatccgaccctacggaccagtttcttagcaagttttacattgacgatgaacagtcggtgctaacaacggacgtgggtggtcccatcgaggaccaacacagcttgaaggctggaaatagaggcccaactctacttgaggattttatcttccgccagaagattcaacactttgatcatgagagggttcctgagcgcgccgtccatgctcgaggagctggtgcccatggcgtattcacatcctataataactggtcgaatatcacagccgcatccttcttgaacgcggcaggaaagcagacaccagtattcgtgcggttttctacagtcgctggtagcagaggcagtgttgactctgctcgcgatatccacggatttgcgacccgtctgtataccgatgaaggcaattttgatatcgtcggaaacaacgttccagtcttcttcattcaggacgctattcaattccctgatttgattcacgctgtcaagccgcaaccagacagtgaaattccccaggctgcaactgcacatgatacggcatgggatttcttcagccagcagcccagctcattgcatgccctcttctgggcaatgtcaggacatggaatccctcgctcaatgcgtcatgttgatgggtggggcgtccataccttccgacttgtcaccgatgagggcaactcgaccttggtcaagtttcgctggaagaccctccaaggaagagcgggcctggtatgggaagaggcacaggctcttggcggaaaaaatcccgacttccatcgacaagacctctgggatgccattgaatctggaaggtaccctgagtgggagctgggctttcaattggtgaatgaagcagatcaatccaagtttgatttcgatctattagatcccaccaaaatcatcccagaagaacttgttcctttcaccccaatcggaaaaatggtcttgaaccgaaacccaaaaaattattttgccgaaactgagcagatcatgttccaaccaggtcatgtagttcgcggaatcgatttcacggatgaccctttgcttcagggccgcttgtactcctaccttgacactcaattgaatcgccatggaggtcccaacttcgagcaactgccgatcaacagaccccgcatcccattccataacaacaatcgcgacggtgctggacaaatgttcatccctctaaacacggccgcatatacacccaactcaatgagcaacggattccctcaacaagccaaccggacccataacagaggattcttcaccgcacctgggcgtatggtaaatggaccactagtgcgcgagctcagcccgagcttcaacgacgtctggtcccaaccgcgtctcttctacaactcactcacggtcttcgagaagcaattcctcgtcaacgccatgcgcttcgaaaactcccacgtgcggagtgaaaccgtgcgtaagaacgtcatcatccagctgaaccgcgtcgacaacgacctcgcccgccgcgtcgcgctagctatcggcgtcgaacccccatccccggacccaaccttctaccacaacaagacaaccgtccccatcggcaccttcggcacgaatctcctgcggctcgacgggctgaaaatcgccctcctgacaagagacgacggtagcttcacgatcgcggagcagctccgggccgcgtttaacagcgccaacaacaaagtagatatcgtcctagtgggctcatcgcttgatccccaacgcggcgtgaacatgacctattccggcgccgacggctcgatcttcgatgccgtgatcgtcgtcggcggcctgctcacgagcgcctcaacgcaatacccaagaggtcgcccgctcaggattattacggatgcatacgcgtatggaaagcccgttggcgccgtcggtgacggtagcaatgaagcccttcgtgacgtccttatggccgctggtggggatgcgtcgaatgggctggaccagcccggtgtgtatatttccaacgatgtgagtgaggcctacgttagaagtgtcttggacggattgacggcatatcggttcttgaataggttcccgttggataggtaa

SEQ ID NO: 43164 - protein, 728 aa, Ajellomyces capsulata
MRSLKLILASASVVSATCPYMSGEMPNSQNGPLDRRHDTLSDPTDQFLSKFYIDDEQSVLTTDVGGPIEDQHSLKAGNRGPTLLEDFIFRQKIQHFDHERVPERAVHARGAGAHGVFTSYNNWSNITAASFLNAAGKQTPVFVRFSTVAGSRGSVDSARDIHGFATRLYTDEGNFDIVGNNVPVFFIQDAIQFPDLIHAVKPQPDSEIPQAATAHDTAWDFFSQQPSSLHALFWAMSGHGIPRSMRHVDGWGVHTFRLVTDEGNSTLVKFRWKTLQGRAGLVWEEAQALGGKNPDFHRQDLWDAIESGRYPEWELGFQLVNEADQSKFDFDLLDPTKIIPEELVPFTPIGKMVLNRNPKNYFAETEQIMFQPGHVVRGIDFTDDPLLQGRLYSYLDTQLNRHGGPNFEQLPINRPRIPFHNNNRDGAGQMFIPLNTAAYTPNSMSNGFPQQANRTHNRGFFTAPGRMVNGPLVRELSPSFNDVWSQPRLFYNSLTVFEKQFLVNAMRFENSHVRSETVRKNVIIQLNRVDNDLARRVALAIGVEPPSPDPTFYHNKTTVPIGTFGTNLLRLDGLKIALLTRDDGSFTIAEQLRAAFNSANNKVDIVLVGSSLDPQRGVNMTYSGADGSIFDAVIVVGGLLTSASTQYPRGRPLRIITDAYAYGKPVGAVGDGSNEALRDVLMAAGGDASNGLDQPGVYISNDVSEAYVRSVLDGLTAYRFLNRFPLDR

SEQ ID NO: 43165 - DNA, 2187 bp, Aspergillus fumigatus
  CDS (1)..(2187)
atgcgtctcacgttcatccccagcctcattggcgttgccaatgcggtatgtccctatatgaccggcgagctcaaccgtcgtgatgagatatccgatggcgacgctgccgcagccacagaggaattcttgtcccagtattatctcaacgacaatgatgccttcatgacgtccgatgtgggcggccctatcgaagatcagaatagtctcagtgccggagagcgtggtcccaccctgctcgaagatttcattttccgtcaaaagatacagcgtttcgaccatgaacgggtccccgagcgtgcggtccatgcccgtggtgccggcgcccatggagtcttcacttcatatggcgacttctcgaacatcactgcggcttctttcctggccaaggaaggcaagcaaacccctgtatttgtccgcttctcgacggtcgcaggaagcagaggcagttcggatctggcccgtgatgttcacggttttgccactcgtttctataccgacgagggcaatttcgatatcgttggaaacaatatccctgtattcttcatccaggatgctatcctcttccccgatctgatccacgccgtcaagcccagaggtgacaacgagatccctcaggctgcgactgctcatgactcggcctgggacttcttcagccagcagccaagcacgatgcacacactgctctgggctatgtctgggcatggcattcctcgttctttccgacatgttgatgggttcggtgtgcataccttccgattcgtgacagatgacggtgcatccaagctcgtcaaatttcactggaagtctttgcagggcaaggccagcatggtctgggaagaggcccagcagacctctggcaagaatcctgacttcatgcgtcaggatttgcacgatgcaatcgaggctggacgctatccggagtgggaactcggtgttcaaatcatggatgaggaggaccaactgcggttcggttttgacctcttggaccccacaaagatcgtgccagaggaattcgtgcccatcaccaagttgggcaagatgcaactgaaccgcaaccctcgcaactatttcgctgagaccgaacaagttatgttccaacctggtcacattgtccgtggtgttgacttcactgaagaccctctcctgcaaggccgtctgttttcgtacctggacactcagctgaaccgtcacggtggccccaactttgaacaactccccatcaaccaacctcgcgttcccgtgcacaacaacaaccgcgatggagcaggccaaatgttcattcccctcaaccctcacgcgtactcgcccaagacctccgtcaacggttccccaaaacaagccaaccagaccgtcggcgatggcttcttcacagctcctggacgtaccaccagtggcaagcttgtccgtgcggtcagctcaagctttgaggatgtctggtctcagccacggctcttctacaattctttggttcctgccgagaagcagttcgttattgacgccatccgcttcgaaaatgcaaacgttaaatctcccgtggtaaagaacaacgtcatcattcagttgaaccgcatcgataacgaccttgcacgacgcgttgcgcgcgctattggtgtcgccgagcctgagcccgacccgaccttctatcacaacaacaagactgccgatgtcggcacttttggaaccaagctgaagaagcttgatggcctcaaggtcggcgtcctgggttctgtccagcacccgggctcggttgagggagcttccaccctccgcgaccgtctgaaggacgacggtgtcgacgtggttcttgtcgcagagcgtctggccgacggtgttgaccagacctattctacttcagatgcaatccaatttgacgctgtggtcgttgccgccggtgcagagagtctcttcgcggcatcctcgtttaccggtgggtccgccaactcagctagtggtgcaagctctctgtaccccaccggtcggcccctgcagattctcattgacggattccggttcggcaagactgttggggcgctgggaagcggcacagctgctctccgcaacgcggggattgcaacgtctcgggacggcgtgtatgtggctcagtcagtcactgatgactttgccaatgatcttaaggagggccttagaacttttaagtttttggaccggtttcccgtggatcactag

SEQ ID NO: 43166 - protein, 728 aa, Aspergillus fumigatus
MRLTFIPSLIGVANAVCPYMTGELNRRDEISDGDAAAATEEFLSQYYLNDNDAFMTSDVGGPIEDQNSLSAGERGPTLLEDFIFRQKIQRFDHERVPERAVHARGAGAHGVFTSYGDFSNITAASFLAKEGKQTPVFVRFSTVAGSRGSSDLARDVHGFATRFYTDEGNFDIVGNNIPVFFIQDAILFPDLIHAVKPRGDNEIPQAATAHDSAWDFFSQQPSTMHTLLWAMSGHGIPRSFRHVDGFGVHTFRFVTDDGASKLVKFHWKSLQGKASMVWEEAQQTSGKNPDFMRQDLHDAIEAGRYPEWELGVQIMDEEDQLRFGFDLLDPTKIVPEEFVPITKLGKMQLNRNPRNYFAETEQVMFQPGHIVRGVDFTEDPLLQGRLFSYLDTQLNRHGGPNFEQLPINQPRVPVHNNNRDGAGQMFIPLNPHAYSPKTSVNGSPKQANQTVGDGFFTAPGRTTSGKLVRAVSSSFEDVWSQPRLFYNSLVPAEKQFVIDAIRFENANVKSPVVKNNVIIQLNRIDNDLARRVARAIGVAEPEPDPTFYHNNKTADVGTFGTKLKKLDGLKVGVLGSVQHPGSVEGASTLRDRLKDDGVDVVLVAERLADGVDQTYSTSDAIQFDAVVVAAGAESLFAASSFTGGSANSASGASSLYPTGRPLQILIDGFRFGKTVGALGSGTAALRNAGIATSRDGVYVAQSVTDDFANDLKEGLRTFKFLDRFPVDH

SEQ ID NO: 43167 - DNA, 2166 bp, Emericella nidulans
  CDS (1)..(2166)
atgcgagctctcggcctggtcggccttgttggcgtcgccaatgccgtctgtccgtatatgacaggcgagctcggccgtcgcgataccaaccccgatgctaccgaggccactgaggaatttctgtccgagtactaccttgacgacacggactcgtacctgacgactgacgtcggcggcccaattgaggaccagcagagtctcaaggccggtgcgcgcgggtctaccctgctggaagactttatcttccgtcagaagatccagcgattcgaccacgagcgggtccccgagcgtgccgtccatgctcggggtgcaggtgcccacggtgtcttcacctcgtacggcgacttctccaacatcaccgccgcctccttcctctctgctgagggtaaggagacccccgtcttcgtccggttctcgaccgtcgccggcagtcgtggcagttctgacctcgcccgcgatgtccacggtttcgccacccgcttttacactgacgagggcaactttgatatcgtcggtaacaacattcccgtctttttcatccaggatgccatccagttccccgacctgatccacgccgtcaagcccaagggcgatcgtgaaatcccgcaggctgccacggcccatgacgccgcctgggatttcttcagccagcagccctcgactcttcacaccctgctctgggccatggccggtcacggtatcccgcgttcgttccgccacgtcgatgggttcggtgtgcacactttccggctcgtcacggaggatggctccaccaagctcgtcaagttccactggaagaccctgcaaggtttggcaagtatggtctgggaggaagctcagcaaatttctggcaagaaccccgactacatgcgccaggatctgttcgagtcgattgaggctggccggtaccctgagtgggagcttaacgtgcaaatcatggacgaggaggaccagttgcgctttggcttcgaccttttcgaccctaccaagattgtccctgaggaatacgtcccattgaccccgctgggcaagatgaccctcaaccgcaacccccgcaactactttgccgagactgagcaggtcatgttccaacccggccacgtcgtgcgtggtgttgacttcaccgaggatccccttcttcagggacgtcttttcagctaccttgacacccagctcaaccgcaatggtggcccgaactttgagcagttgcccatcaaccagccgcgcgttgctattcacaacaacaaccgtgacggtgctggccagatgttcattccgctgaaccccgatgcgtacagccccaacacgctgaagggatcaaccctcaaacaggccaaccagactgcgggtcgcggattctttactgctcctgaccgtactgccaacggcaatcttgtgcgtgccaagagctccaccttcgatgatgcttggtcgcagccccggcttttctggaactctcttcttcccgccgagaagcagttcgtggtcaacgccattcgcttcgaaaacgccaatgtgaagagcgatgtcgtgaagaacaacgtcatcgttcagcttaatcgaatctcgaacgaccttgccacccgcgttgccaaggccatcggtgttgatgctcccgagcccgacaacacttactaccacgacaacacgacctccaacatcggtgcgtttggccaccgactccagagcttggctggcctgaagattgccgtacttgcttctgttgacgcagaggaatccttcagcgcggctactgctctgaaggccgagctctccaacgacaacctggacgtcattgtcgtcgctgaacgcttctccaacggcgtgaaccagacctactctgcctctgacgccattcagtttgacgccgtcgttgttgcccctggagcggagaagctcttcggtgccaagtccgcggccaactccagctcaaccctctaccctgccggccgtcccctcgaaatcctcgttgatgctttccgcttcggtaagccagtcgctgctcttggcagcggctccactgctttcgacaacgctggtatcaacaccgccgtcgagggcgtgtacgttgccgatgccgtggacgagagctttgccaacaacctcgaggagggtctgaccgtgttcaagttcttggatcgctttgccctggactcggatgaatag

SEQ ID NO: 43168 - protein, 721 aa, Emericella nidulans
MRALGLVGLVGVANAVCPYMTGELGRRDTNPDATEATEEFLSEYYLDDTDSYLTTDVGGPIEDQQSLKAGARGSTLLEDFIFRQKIQRFDHERVPERAVHARGAGAHGVFTSYGDFSNITAASFLSAEGKETPVFVRFSTVAGSRGSSDLARDVHGFATRFYTDEGNFDIVGNNIPVFFIQDAIQFPDLIHAVKPKGDREIPQAATAHDAAWDFFSQQPSTLHTLLWAMAGHGIPRSFRHVDGFGVHTFRLVTEDGSTKLVKFHWKTLQGLASMVWEEAQQISGKNPDYMRQDLFESIEAGRYPEWELNVQIMDEEDQLRFGFDLFDPTKIVPEEYVPLTPLGKMTLNRNPRNYFAETEQVMFQPGHVVRGVDFTEDPLLQGRLFSYLDTQLNRNGGPNFEQLPINQPRVAIHNNNRDGAGQMFIPLNPDAYSPNTLKGSTLKQANQTAGRGFFTAPDRTANGNLVRAKSSTFDDAWSQPRLFWNSLLPAEKQFVVNAIRFENANVKSDVVKNNVIVQLNRISNDLATRVAKAIGVDAPEPDNTYYHDNTTSNIGAFGHRLQSLAGLKIAVLASVDAEESFSAATALKAELSNDNLDVIVVAERFSNGVNQTYSASDAIQFDAVVVAPGAEKLFGAKSAANSSSTLYPAGRPLEILVDAFRFGKPVAALGSGSTAFDNAGINTAVEGVYVADAVDESFANNLEEGLTVFKFLDRFALDSDE

SEQ ID NO: 43169 - DNA, 1479 bp, Oryza sativa
  CDS (1)..(1479)
atggatccctacaagcatcgggcgtccagcgggagcaattccaccttctggaccaccaactccggcgcccccgtctggaacaacaactccgccctcaccgtcggagagcgaggccctatcctccttgaggactatcatctgattgaaaagcttgcacagtttgacagggagcgtatccctgaacgtgtcgttcatgcaaggggagccagtgccaagggattttttgaggttactcatgatatttctcacctcacatgtgctgattttctccgtgctcctggtgttcagaccccagttattgttcggttctccacagtcgtgcatgagcgtggaagccctgagacattgagggatccacgtggttttgctgtcaagttttacactagagagggtaattttgatcttgttgggaacaatatgcctggcttttttatccgagatgggatgaaattccctgacatggtccatgctttcaagccaagtccaaagaccaatatgcaggagaactggagaatagttgatttcttttcacaccacccagagagcctgcacatgttctccttcctctttgacgatgtaggcatcccactcaactacaggcacatggagggttttggtgtcaacacctacaccctaatcaataaggatggaaagcctcaccttgtcaaattccactggaagcctacctgtggtgtcaaatgcctgttggatgatgaagctgtgactgttggcggcacctgccacagccatgccacgaaggacttgactgattctattgcagcagggaattacccagagtggaagctttacatccagactattgatcctgatcatgaggacagatttgacttcgatcctcttgatgtcaccaagacatggccagaggatatcatccccctgcagccagttggacggatggtcctgaacaaaaacattgataacttctttgcagaaaatgaacagcttgctttctgcccagcgataattgtccctggaatccattactctgatgataagctgctccagacaagaattttctcctatgctgatacccaaaggcaccgtcttggcccaaactatttgatgcttcctgtgaatgcaccaaaatgtgcataccacaacaaccaccacgatggctccatgaatttcatgcacagggatgaagaggttaactacttcccttcaaggtttgatgctgcacgtcatgctgagaaggtccctattcctcctcgtgttctaacaggctgtcgggaaaagtgtgtcattgacaaggagaacaatttccaacaggctggtgagagataccggtcatttgaccctgccaggcaagatcgttttctccagcggtgggttgatgctctctcagatcctcgtattacacatgaactccgtggcatctggatctcctactggtcgcagtgtgatgcgtcccttgggcagaagctggcttcacgtctcaacctgaaaccaaacatgtag

SEQ ID NO: 43170 - protein, 492 aa, Oryza sativa
MDPYKHRASSGSNSTFWTTNSGAPVWNNNSALTVGERGPILLEDYHLIEKLAQFDRERIPERVVHARGASAKGFFEVTHDISHLTCADFLRAPGVQTPVIVRFSTVVHERGSPETLRDPRGFAVKFYTREGNFDLVGNNMPGFFIRDGMKFPDMVHAFKPSPKTNMQENWRIVDFFSHHPESLHMFSFLFDDVGIPLNYRHMEGFGVNTYTLINKDGKPHLVKFHWKPTCGVKCLLDDEAVTVGGTCHSHATKDLTDSIAAGNYPEWKLYIQTIDPDHEDRFDFDPLDVTKTWPEDIIPLQPVGRMVLNKNIDNFFAENEQLAFCPAIIVPGIHYSDDKLLQTRIFSYADTQRHRLGPNYLMLPVNAPKCAYHNNHHDGSMNFMHRDEEVNYFPSRFDAARHAEKVPIPPRVLTGCREKCVIDKENNFQQAGERYRSFDPARQDRFLQRWVDALSDPRITHELRGIWISYWSQCDASLGQKLASRLNLKPNM

SEQ ID NO: 43171 - DNA, 2061 bp, Bacillus subtilis
  CDS (1)..(2061): transl_table=11
atgagtgatgaccaaaacaaacgtgtaaatgaacactcaaaggacgagcagcttgagcagtacaggaccgataacagcgggaagaaaatgacgacaaaccaaggcttgcgagtgtcagaggatgagcactcgttaaaagccggggttcgcggcccgacgctgatggaggattttcatttccgggagaaaatgacgcactttgaccatgagaggattccggagcgcgttgtgcatgcgcgcggatttggcgtgcatggcttttttcaggtttacgaaccaatgacggaatacacacgggccaaatttcttcaggacccttcggtgaagacaccggtatttgtccgtttttctacggttgcgggttctaaaggctccgcagacacggtgcgggatgccagaggctttgcgacaaaattttatactgaagaaggaaactatgaccttgtgggaaataacattccggtgtttttcattcaggacgcaatcaaatttccggatttggttcacgcgtttaagcctgagccacacaatgaaatgcctcaggctgcgactgctcacgatacattttgggattttgtcgccaataaccctgagtctgcccacatggtgatgtggacgatgtctgacagaggcatcccgcgcagctacagaatgatggaaggcttcggcgttcacacgttccgttttgtcaatgaacaaggaaaggcacgtttcgtgaaatttcactggaagccggtgctcggcgtgcattctctcgtatgggatgaagcgcaaaaaattgccgggaaagatccagatttccaccgccgtgacctgtgggaaacaattgaaaacggcggcaaggttgaatacgagctcggcgtgcagatgattgatgaggaagatgaattcaagtttgattttgatattcttgacccaactaagctgtggccggaagagcttgtgccggtgaagatcattggaaaaatgacgctgaaccgcaatcaggataatgtgtttgcggaaacagaacaagtcgcattccacccgggaaatgtcgtgccgggcatcgattttaccaatgacccgctattgcaggggcggcttttcccttatacggatacacagctcatccgtcttggcggcccgaacttccatgagattccgattaaccggccggtctgtccattccataacaaccaatacgacggctatcaccggatgacgatcaataagggacctgtcgcttatcataaaaactcactgcaaaacaatgatccgtcgcctgcgacagctgaagaaggcggctacgtccactatcaggaaaaagtcgagggcaaaaaaatccgccagcgaagcgacagcttcaacgattattactcacaggcgaagcttttctggaacagcatgtctcctgtggagaaacagcacatcatttctgctttctgcttcgaggtcgggaaggttaaaagcaaagacgtacagcggcaggtcgttgatgtcttcagcaatgtcgatgcagatttagcagaagaaatcgccaaaggagtaggcgtggcggcgcccgcaaagcgtaaagcatctaaagaaaatcttacttcgcctgcgttaagccaagcccgtacagtgaaaaccgcctcaacaaggaaagtcgctgtactcgccggaaacggatttcatgaaaaagagctgcaaacagtactggaagccttaaagcaagaaggaatcacagtggatatcatcagtcaaaatctggggtatatgacaagcggcagcggacagcagcttgaggccagcggcacgttcctgacggttgattctgttctgtatgatgccgtctatgccgcaggaggactggagttaaaagacaacaaacaagcgatggcgtttatcagagaagcttacaatcactacaaggcgatcggtgcggcaaatgaaggaattgaccttcttcaatcctctgtcgggacaacagaggggctaggcatcgtaacggctaaagatgaacctgactacaccgctttcagcaaggcatttatcgatgcggttgctgctcatcgccattgggatagacgaatttga

SEQ ID NO: 43172 - protein, 686 aa, Bacillus subtilis
MSDDQNKRVNEHSKDEQLEQYRTDNSGKKMTTNQGLRVSEDEHSLKAGVRGPTLMEDFHFREKMTHFDHERIPERVVHARGFGVHGFFQVYEPMTEYTRAKFLQDPSVKTPVFVRFSTVAGSKGSADTVRDARGFATKFYTEEGNYDLVGNNIPVFFIQDAIKFPDLVHAFKPEPHNEMPQAATAHDTFWDFVANNPESAHMVMWTMSDRGIPRSYRMMEGFGVHTFRFVNEQGKARFVKFHWKPVLGVHSLVWDEAQKIAGKDPDFHRRDLWETIENGGKVEYELGVQMIDEEDEFKFDFDILDPTKLWPEELVPVKIIGKMTLNRNQDNVFAETEQVAFHPGNVVPGIDFTNDPLLQGRLFPYTDTQLIRLGGPNFHEIPINRPVCPFHNNQYDGYHRMTINKGPVAYHKNSLQNNDPSPATAEEGGYVHYQEKVEGKKIRQRSDSFNDYYSQAKLFWNSMSPVEKQHIISAFCFEVGKVKSKDVQRQVVDVFSNVDADLAEEIAKGVGVAAPAKRKASKENLTSPALSQARTVKTASTRKVAVLAGNGFHEKELQTVLEALKQEGITVDIISQNLGYMTSGSGQQLEASGTFLTVDSVLYDAVYAAGGLELKDNKQAMAFIREAYNHYKAIGAANEGIDLLQSSVGTTEGLGIVTAKDEPDYTAFSKAFIDAVAAHRHWDRRI

SEQ ID NO: 43173 - DNA, 2136 bp, Pseudomonas putida
  CDS (1)..(2136): transl_table=11
atgcccagcaagaaaacggacgcgcccaagcagagtgaagccgctggcacccagaccccggaccgggccaataccaatgccaagttgcagagcctggaaaccttccgcagcgacgctaccggccaggccctgcgcaccaaccagggcgtgaagattgccgacaaccagaacagcctcaaggctggcgcacgagggccgtcgctgctcgaagacttcatcatgcgcgagaagatcacccacttcgaccatgagcgcatcccggagcgcatcgtgcatgcccgtggtaccggggcgcacggctactttcagagttatggcaaccatgcggatctgaccaaagccggtttcctgcaagatcccgacaagatcacaccggtgtttgtacgcttttccaccgtgcagggtccccgtggttcgggggataccgtgcgtgatgtgcgcggtttcgcggtcaagttctataccgacgaaggtaacttcgacctggtcggcaacaacatgccggtcttcttcatccaggatgccatcaagttccccgattttgtgcatgcggtcaaacccgagccgcataacgagattcctaccggtggctcggcccacgatacgttctgggatttcgtttcgctggtgccggagtcggcccacatggtgatgtgggccatgtccgaccgggctatcccgcgcagcttgcgcatgatggaaggctttggcgtgcataccttccgcctgatcaacgccgagggcgtggccagtttcgtcaagttccactggaagccgcgccagggcgtgcattcgctgctgtgggacgaggcgcagaaactggcgggcaaggacactgacttccagcgccgtgacttgtgggaggcgatcgaaaacggcgattacccggaatgggaactcggcgtgcagatcgtgccggaggccgacgagcacaagttcgacttcgacttgttggacccgaccaagatcatcccggaagaactggtgcccgtaacgcccttgggcaagatggtgctgaaccgtaacccggacaatttctttgccgaggtcgaacaggtggcgttctgcccaggccatatcgtgcctggaatcgactttaccaatgacccactgctacagggccggctgttctcgtacaccgatacccagatcagccgcctgggcgggccgaacttccaccagatcccgatcaaccgcccggtagcgcctaaccacaacaaccagcgtgatgccctgcaccagcacgtcgtgcataaggggcgggcgtcctacgagccaaactcgatcgacggtggttggccaaaggaaaccccggcagcggcgcaggacggtggtttcgagagctaccaggagcgtatcgatgcgcacaagattcgtcagcgcagcgagtcgttcggtgatcacttctcgcaagcccggctgttcttccagagcatgagcccgaccgaacagcagcacatcatcaaggcttacagcttcgagttgggcaaagtggagcgcgaacatatccgcgcccgggaagtgaatgaaattctcgccaatatcgatttgaagctggcggcggcagttgcagccaacctgggcctgcctgcgccgaaagcgggtacggtgcaggtgaagggcagccagctggcgcaatcaccggccttgagccagatgaaccacccaggttcggtgggtatcaaggggcgcaagattgccgtgctggtggccaatggcgtggacgctgcaagcgtggacaaactgatcaaggccctggaagcgcacagtgcccggccgatgctgttggggccgacctcggcgccggtaaaggcgacggatggcaagcaactgccggtggaggcatcgatggaggggatgccatcgatcatgttcgacgggattgtcgtgccatcaggtaaggcttcgacggatgccttggcagccagcgggctagccaaacacttcttgctggaaggctacaagcacctgaaggctatggtgttgaccaaggaactggcgaccggcctgggacttaaggaagacaagggcttgctgctggcggatgaccaaaaagccgtggatgcctttgtcaaagcggttgaggggcatcgggtgtgggagcgggaagctgctgcggaggctgtgccggcctaa

SEQ ID NO: 43174 - protein, 711 aa, Pseudomonas putida
MPSKKTDAPKQSEAAGTQTPDRANTNAKLQSLETFRSDATGQALRTNQGVKIADNQNSLKAGARGPSLLEDFIMREKITHFDHERIPERIVHARGTGAHGYFQSYGNHADLTKAGFLQDPDKITPVFVRFSTVQGPRGSGDTVRDVRGFAVKFYTDEGNFDLVGNNMPVFFIQDAIKFPDFVHAVKPEPHNEIPTGGSAHDTFWDFVSLVPESAHMVMWAMSDRAIPRSLRMMEGFGVHTFRLINAEGVASFVKFHWKPRQGVHSLLWDEAQKLAGKDTDFQRRDLWEAIENGDYPEWELGVQIVPEADEHKFDFDLLDPTKIIPEELVPVTPLGKMVLNRNPDNFFAEVEQVAFCPGHIVPGIDFTNDPLLQGRLFSYTDTQISRLGGPNFHQIPINRPVAPNHNNQRDALHQHVVHKGRASYEPNSIDGGWPKETPAAAQDGGFESYQERIDAHKIRQRSESFGDHFSQARLFFQSMSPTEQQHIIKAYSFELGKVEREHIRAREVNEILANIDLKLAAAVAANLGLPAPKAGTVQVKGSQLAQSPALSQMNHPGSVGIKGRKIAVLVANGVDAASVDKLIKALEAHSARPMLLGPTSAPVKATDGKQLPVEASMEGMPSIMFDGIVVPSGKASTDALAASGLAKHFLLEGYKHLKAMVLTKELATGLGLKEDKGLLLADDQKAVDAFVKAVEGHRVWEREAAAEAVPA

SEQ ID NO: 43175 - DNA, 2118 bp, Rhizobium meliloti
  CDS (1)..(2118): transl_table=11
atggccaagaaaccctctgcgccgaacaatacgaaaccggccaccattcatgaccagaaagcgacacgcggcaacggtggagaacttcaccagatcgccgaaggcgacacgcccgtcctgacgaccgcccagggcggccccgtcgccgacgaccagaacagcctgcgcgccggcgaacgcggccctacgctcatcgaggatttccacttccgcgagaagatcttccacttcgatcacgagcgcattcccgagcgtgtcgtgcacgcccgcggctacggggtgcatggcttcttcgagacctacgaatcgcttgcagcctacacccgggcggatctgttccagcgcccgggcgagcgaacccccgccttcgtgcgtttctcgacggtcgccggaagcaagggctccttcgacctcgcccgcgacgttcgcggtttcgcggtcaagatctacaccaaggagggcaattgggacctcgtcggcaacaacatcccggtcttcttcatccaggacgcaatcaagtttcccgacgtcatacattcggtaaagcccgaaccggaccgggagtttccccaggcgcagtccgcccacgacaatttctgggacttcatcagcctgacgccggaaagcatgcacatgatcatgtgggtcatgtcggaccgggcgatcccgcgctccttccggttcatggaaggcttcggcgtccatacgtttcgtttcgtcaatgccaaggacgagtccactttcgtcaaattccattggaagccgaagctcgggctgcagtcggtcgtgtggaacgaggccgtgaagatcaacggtgccgatcctgacttccaccggcgcgacatgtggcaagccatccagtccggcaacttcccggaatgggacctgcatgtgcagcttttcgatcaggacttcgccgacaagttcgatttcgacattctcgatccgaccaagatcatcccggaggaagtgctgccgacgaagcctgtgggccggctggtgctcgatcgcatgccggagaatttcttcgccgaaaccgagcaggtcgccttcatgacgcagaacgtgccgccgggcatcgacttcagcgacgatccattgctgcaggggcgcaacttctcctatctggacacgcagctgaagcggctcggcagcccgaacttcacccatctgccgatcaacgcgccgaaatgtcccttccagcactttcagcaggacggccacatggccatgcgcaaccccgtcgggcgcgtgaactaccagcccaattcctggggcgagggcccgcgcgagtcgcccatgaaaggcttccgccattttccttccgaggagcaggggcccaagctgcgcatccgcgccgagagctttgccgaccattacagccaggcccggcagttcttcatcagccagacgccgcccgagcagcgccacatcgccgacgccctgaccttcgaattgagcaaggtggagacgccggtgatccgcgagcggatggtcgcgcatcttctcaacatcgatgaaaccttggggaaaaaggtcggccacgccctcggcctggagacgatgccgaagccggcggatgcggccgttgccacccgccaggacctcgacccgtcgccggccctcagcatcatccagcgtgggccgaagcgtttcgagggccgcaagctcgggatattggcgacggacggcgcggacggcgcgcttctcgacgccttgatagcggcggtcgagaaggagaaggcggccttcgagctgatcgcgccgaaagtcggcggcttcaccgcctccgacggaaaacgcatcgccgcccaccagatgctcgacggcggcccgtcggtactttacgacgcggtggtcctgcttccttccgcagaggccgtcacggatctgatcgacgtcgccaccgcgcgcgatttcgtggccgacgccttcgcccattgcaaatatatcggctatgccggcgccgccgttccccttctcgaaagggccggcattgcggaactgctcgatgagggaacgatcgaactcaccgacgctgcgagtgcggcagccttcctcacggagatcggtaaactgcgcgtctggggaagagaaccctcggtcaagctgaaatag

SEQ ID NO: 43176 - protein, 705 aa, Rhizobium meliloti
MAKKPSAPNNTKPATIHDQKATRGNGGELHQIAEGDTPVLTTAQGGPVADDQNSLRAGERGPTLIEDFHFREKIFHFDHERIPERVVHARGYGVHGFFETYESLAAYTRADLFQRPGERTPAFVRFSTVAGSKGSFDLARDVRGFAVKIYTKEGNWDLVGNNIPVFFIQDAIKFPDVIHSVKPEPDREFPQAQSAHDNFWDFISLTPESMHMIMWVMSDRAIPRSFRFMEGFGVHTFRFVNAKDESTFVKFHWKPKLGLQSVVWNEAVKINGADPDFHRRDMWQAIQSGNFPEWDLHVQLFDQDFADKFDFDILDPTKIIPEEVLPTKPVGRLVLDRMPENFFAETEQVAFMTQNVPPGIDFSDDPLLQGRNFSYLDTQLKRLGSPNFTHLPINAPKCPFQHFQQDGHMAMRNPVGRVNYQPNSWGEGPRESPMKGFRHFPSEEQGPKLRIRAESFADHYSQARQFFISQTPPEQRHIADALTFELSKVETPVIRERMVAHLLNIDETLGKKVGHALGLETMPKPADAAVATRQDLDPSPALSIIQRGPKRFEGRKLGILATDGADGALLDALIAAVEKEKAAFELIAPKVGGFTASDGKRIAAHQMLDGGPSVLYDAVVLLPSAEAVTDLIDVATARDFVADAFAHCKYIGYAGAAVPLLERAGIAELLDEGTIELTDAASAAAFLTEIGKLRVWGREPSVKLK

SEQ ID NO: 43177 - DNA, 2193 bp, Aspergillus niger
  CDS (1)..(2193)
atgcgtcatttctggcttttgccagctgttgctggtatcgctggggctcaatgcccctacctgtcgggtgaaatgagtttcacccaggagcaggacaatgctggcgataccattgaggtcacggagcagcccattgacaacaccctgtatgtcaatgacaccggtagctacatgactaccgactttggcactccgatctccgaccagaccagtctcaaggccgggccccgtggtcctaccctgttggaggactttatcttccgtcagaagcttcagcggttcgaccatgagcgtgtccccgagcgcgtcgtccacgcccgtggtgccggtgcatatggtactttcaaatcctacgccgactggtcgaacgtcacggctgccgatttcttgagtgccaacgataaggagacccctatgttctgtcgcttctctactgtggtcggtttccgtggtagtgttgacactgcgcgtgatgttcacggtcacgcttgtcggttctacactgacgagggtaactatgacatcgtcggtatcaatttcgcccccttcttcatccaggacgccatccagttccccgatcttgtccacgccatcaagcccatgcccaacaatgagatcccccaggccgctactgcacacacttccgcttgggacttcttcagccagcagagcactgccctccacagtgccttgtggctgatgtctggtaacggtattcctcgttctttccgccacatgaacggctacggagtccacagcttccgcttcgtcgctgccaatggcacttccaaggtggtgcgaacaccttggaagtcccaacagggtgttgccagtctggtgtgggatgaagctcaggccgctgctggtaagaacagtgactaccaccgccaggatctgtacaatgcgatgcccaatggccactacccgaaatacgagctccaagcccagatcatggatgaggctgacatgcttcgtttcggcttcgaccttctggatcccaccaagttggtccccgaggaggttgtcccttacactcctctcggaatgatggagctcaatgccaaccccaccaactactttgctgaagttgaacaggctggtttccaacccggtcacgtcgttcctggcattgacttcaccgacgaccccctgctgcaaggccgtctcttctcctacctcgacactcagttgacccgtcacggcggtcccaacttcgagcaaatccccgtcaaccgtcctcgcaagcccgttcacaacaacaaccgtgacggcttcggccagcagcagatccccaccaacaactgggcctacacccccaacagcatgagcaacggttaccccatgcaagccaaccagacccagggtcatggtttcttcaccgcgccctaccgctacgcttccggccatctcgtccgccagaccagcccgaccttcaatgaccactggtcccagcccgccatgttctggaactctctgatccccgctgagcagcagatggttgtcaacgccattgtctttgagaactccaaggttaacagcccccacgttcggaagaacgttgtcaaccagctgaacatggtcaacaacaacctcgccgtccgtgtcgctcgtggtcttggtctcgatgagccctcccccaacccgacttactacacctccaacaagacctccaacgtcggtaccttcggcaagcccctcctcagcatcgagggtctgcaggtcggcttcctggcctcgaactcccaccccgaatccatcaagcagggccaggccatggccgcgcagttctctgccgctggcgtcgacctgaacattgtcaccgaggcctacgccgatggtgtcaacaccacctacgccctgtctgatgccatcgactttgacgccctcatcatcgccgatggtgtgcagagcctcttcgcctcccccgctctcgctaaccagatgaactctaccgccacctctactctctaccctcctgccagacctttccagatcctggtcgattctttcaggtacggtaagcccgtggctgctgtcggcagtggcagtgttgcgctcaagaacgctggtattgattcctcccgctctggtgtgtacactggctcgagcgagacgacggagaagatcgccaaggaggtcttggagggactctacactttccgttttgtggaccggtttgcgctggatgagtaa

SEQ ID NO: 43178 - protein, 730 aa, Aspergillus niger
MRHFWLLPAVAGIAGAQCPYLSGEMSFTQEQDNAGDTIEVTEQPIDNTLYVNDTGSYMTTDFGTPISDQTSLKAGPRGPTLLEDFIFRQKLQRFDHERVPERVVHARGAGAYGTFKSYADWSNVTAADFLSANDKETPMFCRFSTVVGFRGSVDTARDVHGHACRFYTDEGNYDIVGINFAPFFIQDAIQFPDLVHAIKPMPNNEIPQAATAHTSAWDFFSQQSTALHSALWLMSGNGIPRSFRHMNGYGVHSFRFVAANGTSKVVRTPWKSQQGVASLVWDEAQAAAGKNSDYHRQDLYNAMPNGHYPKYELQAQIMDEADMLRFGFDLLDPTKLVPEEVVPYTPLGMMELNANPTNYFAEVEQAGFQPGHVVPGIDFTDDPLLQGRLFSYLDTQLTRHGGPNFEQIPVNRPRKPVHNNNRDGFGQQQIPTNNWAYTPNSMSNGYPMQANQTQGHGFFTAPYRYASGHLVRQTSPTFNDHWSQPAMFWNSLIPAEQQMVVNAIVFENSKVNSPHVRKNVVNQLNMVNNNLAVRVARGLGLDEPSPNPTYYTSNKTSNVGTFGKPLLSIEGLQVGFLASNSHPESIKQGQAMAAQFSAAGVDLNIVTEAYADGVNTTYALSDAIDFDALIIADGVQSLFASPALANQMNSTATSTLYPPARPFQILVDSFRYGKPVAAVGSGSVALKNAGIDSSRSGVYTGSSETTEKIAKEVLEGLYTFRFVDRFALDE

SEQ ID NO: 43179 - DNA, 1644 bp, Bacillus subtilis
  CDS (1)..(1644): transl_table=11
ttgaaagatgatcatcaaaacaagcagcaccaatcaaatgcccaagggagcgaggaagcgttttctcataagacatccgggaaaaacgagtcagaggataccttaacgaataggcaggggcatcctgttactgacaaccagaatgtgagaaccgtcgggaatagagggcctacaacacttgagaactatgattttctcgaaaagatcagccacttcgaccgggaacgcatcccagagcgggttgttcatgccaggggagcaggtgcacatggatattttgaagcgtacggaagcttcggagacgaaccgatttcaacatacacaagggccaagctctttcaggaaaaaggcaagaaaacaccggcatttgtccgtttttcaactgtgaatcatggaaaacactcgcctgaaacattgagagacccgcgcggttttgctgtaaagctatatacagaagacggaaactgggatttggtcggaaacaacctgaaaatcttttttatccgcgacccgctgaaatttccggatcttgtacacgcatttcagcctgatccagtgacaaacatccaggatggtgaacgtatcttcgatttcatttctcaatctcctgaagcgacacacatgatcaccttcttgttttcgccttggggcattccggccaactaccggcaaatgcagggttcaggcgtacatgcctataaatgggtgaatgaggagggcaaggccgttctcgtgaaataccattttgaaccgaagcagggcatccgcaacctgacacagaaggaagcagaagagattcaagggaaaaactttaaccatgccacacaggatctatatgacgcgattgaaaatggcgattatccagagtgggaagtatatgctcaaatcatgagcgatgatgagcatcctgaactggactttgatcctcttgatccaacaaaactgtggtataaagacgatttcccatggaaaccgatcggcaaattggttctgaacaaaaatccggaaaactaccatgcggaagtggagcaagcttcatttggaacgggagtgcttgtcgacgggcttgatttttcagacgacaaattgctccaggggcgtacgtttgcctactctgatacgcagcgctaccgtgtaggcgcaaattacctgcagcttccgatcaactcgccgaaaaagcatgtcgccaccaaccaggaaggcgggcaaatgcaatatcgggtcgatagagcagaaggacaaaacccgcacgtcaactacgagccatccattatgggcgggctgaaggaagcgaagcaagacggaaaagaccatacgccgcatgtcgaaggtgatgtaaagcgtgaagcgattgacagaacaaacaacttcggacaggctggagaaacgtaccggagatttactgaatttgagcggaacgaattgattacgaatttggtgaatacgctttctacgtgccgaaaagaaattcaggatcaaatgattgagaatttcacaaaagctgatcctgactacggaaaacgcgtagcagaagggctaaaaaaggtctccgaaaacaacagcaacgggccgatcggcacaactgaaacggaacaggctgcaaagcaggctgaacaggagagtcatccgtctgatccgtattaa

SEQ ID NO: 43180 - protein, 547 aa, Bacillus subtilis
MKDDHQNKQHQSNAQGSEEAFSHKTSGKNESEDTLTNRQGHPVTDNQNVRTVGNRGPTTLENYDFLEKISHFDRERIPERVVHARGAGAHGYFEAYGSFGDEPISTYTRAKLFQEKGKKTPAFVRFSTVNHGKHSPETLRDPRGFAVKLYTEDGNWDLVGNNLKIFFIRDPLKFPDLVHAFQPDPVTNIQDGERIFDFISQSPEATHMITFLFSPWGIPANYRQMQGSGVHAYKWVNEEGKAVLVKYHFEPKQGIRNLTQKEAEEIQGKNFNHATQDLYDAIENGDYPEWEVYAQIMSDDEHPELDFDPLDPTKLWYKDDFPWKPIGKLVLNKNPENYHAEVEQASFGTGVLVDGLDFSDDKLLQGRTFAYSDTQRYRVGANYLQLPINSPKKHVATNQEGGQMQYRVDRAEGQNPHVNYEPSIMGGLKEAKQDGKDHTPHVEGDVKREAIDRTNNFGQAGETYRRFTEFERNELITNLVNTLSTCRKEIQDQMIENFTKADPDYGKRVAEGLKKVSENNSNGPIGTTETEQAAKQAEQESHPSDPY

SEQ ID NO: 43181 - DNA, 25 bp, Artificial sequence
  Primer sequence
atgtcgcaacataacgaaaagaacc

SEQ ID NO: 43182 - DNA, 27 bp, Artificial sequence
  Primer sequence
ttaggcaggaattttgtcaatcttagg

SEQ ID NO: 43183 - protein, 587 aa, Artificial sequence
  Consensus
  Variant (3)..(4): Xaa in position 3 to 4 is any amino acid
  Variant (6)..(6): Xaa in position 6 is any amino acid
  Variant (9)..(16): Xaa in position 9 to 16 is any amino acid
  Variant (17)..(17): Xaa in position 17 is any or no amino acid
  Variant (19)..(19): Xaa in position 19 is any amino acid
  Variant (20)..(30): Xaa in position 20 to 30 is any or no amino acid
  Variant (33)..(33): Xaa in position 33 is any amino acid
  Variant (36)..(36): Xaa in position 36 is any amino acid
  Variant (38)..(40): Xaa in position 38 to 40 is any amino acid
  Variant (41)..(41): Xaa in position 41 is any or no amino acid
  Variant (45)..(46): Xaa in position 45 to 46 is any amino acid
  Variant (48)..(49): Xaa in position 48 to 49 is any amino acid
  Variant (56)..(56): Xaa in position 56 is any amino acid
  Variant (62)..(63): Xaa in position 62 to 63 is any amino acid
  Variant (65)..(65): Xaa in position 65 is any amino acid
  Variant (67)..(67): Xaa in position 67 is any amino acid
  Variant (69)..(73): Xaa in position 69 to 73 is any amino acid
  Variant (74)..(78): Xaa in position 74 to 78 is any or no amino acid
  Variant (81)..(82): Xaa in position 81 to 82 is any amino acid
  Variant (84)..(84): Xaa in position 84 is any amino acid
  Variant (86)..(90): Xaa in position 86 to 90 is any amino acid
  Variant (91)..(91): Xaa in position 91 is any or no amino acid
  Variant (93)..(93): Xaa in position 93 is any amino acid
  Variant (94)..(94): Xaa in position 94 is any or no amino acid
  Variant (96)..(96): Xaa in position 96 is any amino acid
  Variant (98)..(99): Xaa in position 98 to 99 is any amino acid
  Variant (105)..(108): Xaa in position 105 to 108 is any amino acid
  Variant (111)..(111): Xaa in position 111 is any amino acid
  Variant (113)..(114): Xaa in position 113 to 114 is any amino acid
  Variant (117)..(117): Xaa in position 117 is any amino acid
  Variant (122)..(122): Xaa in position 122 is any amino acid
  Variant (127)..(127): Xaa in position 127 is any amino acid
  Variant (138)..(138): Xaa in position 138 is any amino acid
  Variant (144)..(144): Xaa in position 144 is any or no amino acid
  Variant (146)..(146): Xaa in position 146 is any amino acid
  Variant (152)..(152): Xaa in position 152 is any amino acid
  Variant (153)..(168): Xaa in position 153 to 168 is any or no amino acid
  Variant (172)..(172): Xaa in position 172 is any amino acid
  Variant (174)..(175): Xaa in position 174 to 175 is any amino acid
  Variant (177)..(179): Xaa in position 177 to 179 is any amino acid
  Variant (181)..(186): Xaa in position 181 to 186 is any amino acid
  Variant (187)..(203): Xaa in position 187 to 203 is any or no amino acid
  Variant (206)..(206): Xaa in position 206 is any amino acid
  Variant (208)..(209): Xaa in position 208 to 209 is any amino acid
  Variant (213)..(213): Xaa in position 213 is any amino acid
  Variant (215)..(221): Xaa in position 215 to 221 is any amino acid
  Variant (222)..(223): Xaa in position 222 to 223 is any or no amino acid
  Variant (225)..(225): Xaa in position 225 is any amino acid
  Variant (227)..(227): Xaa in position 227 is any or no amino acid
  Variant (230)..(231): Xaa in position 230 to 231 is any amino acid
  Variant (234)..(234): Xaa in position 234 is any amino acid
  Variant (236)..(236): Xaa in position 236 is any amino acid
  Variant (238)..(238): Xaa in position 238 is any amino acid
  Variant (239)..(240): Xaa in position 239 to 240 is any or no amino acid
  Variant (242)..(243): Xaa in position 242 to 243 is any amino acid
  Variant (246)..(247): Xaa in position 246 to 247 is any amino acid
  Variant (250)..(251): Xaa in position 250 to 251 is any amino acid
  Variant (252)..(252): Xaa in position 252 is any or no amino acid
  Variant (254)..(256): Xaa in position 254 to 256 is any amino acid
  Variant (263)..(266): Xaa in position 263 to 266 is any amino acid
  Variant (269)..(270): Xaa in position 269 to 270 is any amino acid
  Variant (272)..(274): Xaa in position 272 to 274 is any amino acid
  Variant (275)..(275): Xaa in position 275 is any or no amino acid
  Variant (278)..(279): Xaa in position 278 to 279 is any amino acid
  Variant (281)..(281): Xaa in position 281 is any amino acid
  Variant (283)..(290): Xaa in position 283 to 290 is any amino acid
  Variant (294)..(294): Xaa in position 294 is any amino acid
  Variant (297)..(298): Xaa in position 297 to 298 is any amino acid
  Variant (300)..(300): Xaa in position 300 is any amino acid
  Variant (303)..(303): Xaa in position 303 is any amino acid
  Variant (305)..(305): Xaa in position 305 is any amino acid
  Variant (307)..(307): Xaa in position 307 is any amino acid
  Variant (310)..(310): Xaa in position 310 is any amino acid
  Variant (312)..(320): Xaa in position 312 to 320 is any amino acid
  Variant (321)..(322): Xaa in position 321 to 322 is any or no amino acid
  Variant (324)..(325): Xaa in position 324 to 325 is any amino acid
  Variant (326)..(326): Xaa in position 326 is any or no amino acid
  Variant (328)..(328): Xaa in position 328 is any amino acid
  Variant (331)..(332): Xaa in position 331 to 332 is any amino acid
  Variant (334)..(335): Xaa in position 334 to 335 is any amino acid
  Variant (336)..(337): Xaa in position 336 to 337 is any or no amino acid
  Variant (340)..(341): Xaa in position 340 to 341 is any amino acid
  Variant (344)..(344): Xaa in position 344 is any amino acid
  Variant (346)..(346): Xaa in position 346 is any amino acid
  Variant (351)..(352): Xaa in position 351 to 352 is any amino acid
  Variant (353)..(353): Xaa in position 353 is any or no amino acid
  Variant (357)..(357): Xaa in position 357 is any amino acid
  Variant (359)..(359): Xaa in position 359 is any amino acid
  Variant (362)..(362): Xaa in position 362 is any amino acid
  Variant (365)..(365): Xaa in position 365 is any amino acid
  Variant (367)..(367): Xaa in position 367 is any amino acid
  Variant (368)..(369): Xaa in position 368 to 369 is any or no amino acid
  Variant (375)..(376): Xaa in position 375 to 376 is any amino acid
  Variant (378)..(378): Xaa in position 378 is any amino acid
  Variant (380)..(380): Xaa in position 380 is any amino acid
  Variant (384)..(385): Xaa in position 384 to 385 is any or no amino acid
  Variant (391)..(391): Xaa in position 391 is any amino acid
  Variant (393)..(396): Xaa in position 393 to 396 is any amino acid
  Variant (400)..(400): Xaa in position 400 is any amino acid
  Variant (401)..(402): Xaa in position 401 to 402 is any or no amino acid
  Variant (405)..(406): Xaa in position 405 to 406 is any amino acid
  Variant (411)..(411): Xaa in position 411 is any amino acid
  Variant (413)..(421): Xaa in position 413 to 421 is any amino acid
  Variant (422)..(430): Xaa in position 422 to 430 is any or no amino acid
  Variant (433)..(439): Xaa in position 433 to 439 is any amino acid
  Variant (440)..(455): Xaa in position 440 to 455 is any or no amino acid
  Variant (457)..(457): Xaa in position 457 is any or no amino acid
  Variant (459)..(470): Xaa in position 459 to 470 is any amino acid
  Variant (471)..(513): Xaa in position 471 to 513 is any or no amino acid
  Variant (515)..(515): Xaa in position 515 is any amino acid
  Variant (517)..(520): Xaa in position 517 to 520 is any amino acid
  Variant (522)..(539): Xaa in position 522 to 539 is any amino acid
  Variant (540)..(552): Xaa in position 540 to 552 is any or no amino acid
  Variant (554)..(562): Xaa in position 554 to 562 is any amino acid
  Variant (563)..(579): Xaa in position 563 to 579 is any or no amino acid
  Variant (581)..(582): Xaa in position 581 to 582 is any amino acid
  Variant (584)..(586): Xaa in position 584 to 586 is any amino acid
TTXXGXPVXXXXXXXXXGXXXXXXXXXXXXGPXLLXDXXXXEKLXXFXXERIPERXVHARGXXAXGXFXXXXXXXXXXISXXTXAXXXXXXGXXTXVXXRFSTVXXXXGSXDXXRDXRGFAXKFYTXEGNWDLVGNNXPVFFIXDXIKFPDXXXXXXXXXXXXXXXXXIHAXKXXPXXXIXXXXXXXXXXXXXXXXXXXXXXXDFXSXXPESXHXXXXXXXXXDXGXIPXXYRXMXGXXXGXXTYXXINXXXGXXXYVKFHWXXXXGVXXLXXXXEAXXVXGXXXXXXXXDLYXAIXXGXYPXWXLXIQXMXXXXXXXXXXXFXXXDXTKXXPXXXXPLXXVGXMXLNRNXXXNFFXEXEQXAFXPXXXIVPGIXXSXDXLLQXXRLFSYXDXXXXRLGXXXNYXXLPVNXPXXXXXXXXXXXXXXXXXXDGXXXXXXXXXXXXXXXXXXXXXXXYXPXXXXXXXXXXXXXXXXXXXXXXXXXXXXXXXXXXXXXXXXXXXXXXXXXXXXXXXFXQXXXXYXXXXXXXXXXXXXXXXXXXXXXXXXXXXXXXLXXXXXXXXXXXXXXXXXXXXXXXXXXGXXVXXXL

SEQ ID NO: 43184 - protein, 39 aa, Artificial sequence
  Consensus
  Variant (3)..(3): Xaa in position 3 is any amino acid
  Variant (4)..(4): Xaa in position 4 is any or no amino acid
  Variant (6)..(6): Xaa in position 6 is any amino acid
  Variant (7)..(7): Xaa in position 7 is any or no amino acid
  Variant (9)..(12): Xaa in position 9 to 12 is any amino acid
  Variant (13)..(13): Xaa in position 13 is Asp, Glu or Gln
  Variant (14)..(14): Xaa in position 14 is any amino acid
  Variant (15)..(15): Xaa in position 15 is Phe, Ile, Leu, Met or Val
  Variant (16)..(17): Xaa in position 16 to 17 is any amino acid
  Variant (19)..(19): Xaa in position 19 is any amino acid
  Variant (20)..(20): Xaa in position 20 is His or Arg
  Variant (22)..(23): Xaa in position 22 to 23 is any amino acid
  Variant (27)..(28): Xaa in position 27 to 28 is any amino acid
  Variant (31)..(31): Xaa in position 31 is any amino acid
  Variant (33)..(33): Xaa in position 33 is any amino acid
  Variant (34)..(34): Xaa in position 34 is Ala, Gly, Ser or Thr
  Variant (36)..(36): Xaa in position 36 is any amino acid
  Variant (38)..(38): Xaa in position 38 is any amino acid
  Variant (39)..(39): Xaa in position 39 is Phe or Leu
GPXXLXXDXXXXXXXXXFXXEXXPERXXHAXGXXAXGXX

SEQ ID NO: 43185 - protein, 51 aa, Artificial sequence
  Consensus
  Variant (2)..(3): Xaa in position 2 to 3 is any or no amino acid
  Variant (5)..(5): Xaa in position 5 is Gln, Ser or Thr
  Variant (7)..(10): Xaa in position 7 to 10 is any amino acid
  Variant (12)..(13): Xaa in position 12 to 13 is any amino acid
  Variant (14)..(14): Xaa in position 14 is Asp or Glu
  Variant (15)..(16): Xaa in position 15 to 16 is any amino acid
  Variant (19)..(19): Xaa in position 19 is any amino acid
  Variant (20)..(20): Xaa in position 20 is His or Arg
  Variant (23)..(23): Xaa in position 23 is Ala or Ser
  Variant (24)..(24): Xaa in position 24 is any amino acid
  Variant (25)..(25): Xaa in position 25 is Lys or Arg
  Variant (26)..(26): Xaa in position 26 is any amino acid
  Variant (29)..(29): Xaa in position 29 is any amino acid
  Variant (30)..(30): Xaa in position 30 is Ala, Asp, Glu, Gly or Gln
  Variant (32)..(33): Xaa in position 32 to 33 is any amino acid
  Variant (35)..(37): Xaa in position 35 to 37 is any amino acid
  Variant (40)..(40): Xaa in position 40 is any amino acid
  Variant (42)..(42): Xaa in position 42 is any amino acid
  Variant (45)..(46): Xaa in position 45 to 46 is any amino acid
  Variant (48)..(48): Xaa in position 48 is Ala, Gly, Pro or Ser
  Variant (49)..(50): Xaa in position 49 to 50 is any amino acid
FXXSXVXXXXGXXXXXRDXXGFXXXXYTXXGXXDXXXNNXPXFFXXDXXXF

SEQ ID NO: 43186 - protein, 39 aa, Artificial sequence
  Consensus
  Variant (2)..(3): Xaa in position 2 to 3 is any amino acid
  Variant (4)..(4): Xaa in position 4 is Ala, Ser or Thr
  Variant (5)..(8): Xaa in position 5 to 8 is any amino acid
  Variant (9)..(9): Xaa in position 9 is Ala, Asp, Asn, Ser or Thr
  Variant (10)..(17): Xaa in position 10 to 17 is any amino acid
  Variant (19)..(19): Xaa in position 19 is any amino acid
  Variant (21)..(25): Xaa in position 21 to 25 is any amino acid
  Variant (27)..(34): Xaa in position 27 to 34 is any amino acid
  Variant (35)..(38): Xaa in position 35 to 38 is any or no amino acid
GXXXXXXXXXXXXXXXXKXHXXXXXGXXXXXXXXXXXXA

SEQ ID NO: 43187 - protein, 19 aa, Artificial sequence
  Consensus
  Variant (3)..(3): Xaa in position 3 is any amino acid
  Variant (4)..(4): Xaa in position 4 is Asp, Glu or Asn
  Variant (5)..(5): Xaa in position 5 is Ala, Asn or Ser
  Variant (7)..(11): Xaa in position 7 to 11 is any amino acid
  Variant (13)..(13): Xaa in position 13 is any amino acid
  Variant (15)..(18): Xaa in position 15 to 18 is any amino acid
DLXXXIXXXXXPXWXXXXQ

SEQ ID NO: 43188 - protein, 36 aa, Artificial sequence
  Consensus
  Variant (2)..(2): Xaa in position 2 is any amino acid
  Variant (4)..(11): Xaa in position 4 to 11 is any amino acid
  Variant (13)..(15): Xaa in position 13 to 15 is any amino acid
  Variant (16)..(16): Xaa in position 16 is Phe, Ile, Leu or Val
  Variant (18)..(18): Xaa in position 18 is any amino acid
  Variant (19)..(20): Xaa in position 19 to 20 is any or no amino acid
  Variant (22)..(26): Xaa in position 22 to 26 is any amino acid
  Variant (27)..(28): Xaa in position 27 to 28 is any or no amino acid
  Variant (30)..(30): Xaa in position 30 is any amino acid
  Variant (32)..(32): Xaa in position 32 is any amino acid
  Variant (33)..(33): Xaa in position 33 is Asp, Glu or Gln
  Variant (34)..(34): Xaa in position 34 is any amino acid
DXTXXXXXXXXPXXXXGXXXLXXXXXXXNXFXXXEQ

SEQ ID NO: 43189 - protein, 39 aa, Artificial sequence
  Consensus
  Variant (2)..(2): Xaa in position 2 is Ile, Leu or Val
  Variant (3)..(4): Xaa in position 3 to 4 is any amino acid
  Variant (5)..(5): Xaa in position 5 is Ser or Thr
  Variant (6)..(6): Xaa in position 6 is any amino acid
  Variant (8)..(8): Xaa in position 8 is any amino acid
  Variant (9)..(9): Xaa in position 9 is any or no amino acid
  Variant (11)..(11): Xaa in position 11 is any or no amino acid
  Variant (13)..(13): Xaa in position 13 is any amino acid
  Variant (15)..(15): Xaa in position 15 is any amino acid
  Variant (17)..(17): Xaa in position 17 is Ala, Asn or Ser
  Variant (19)..(19): Xaa in position 19 is any amino acid
  Variant (21)..(21): Xaa in position 21 is Ala, Gln, Ser or Thr
  Variant (22)..(24): Xaa in position 22 to 24 is any amino acid
  Variant (26)..(26): Xaa in position 26 is any amino acid
  Variant (28)..(28): Xaa in position 28 is any amino acid
  Variant (29)..(29): Xaa in position 29 is any or no amino acid
  Variant (31)..(33): Xaa in position 31 to 33 is any amino acid
  Variant (34)..(34): Xaa in position 34 is Ile or Leu
  Variant (36)..(36): Xaa in position 36 is any amino acid
  Variant (38)..(38): Xaa in position 38 is any amino acid
  Variant (39)..(39): Xaa in position 39 is Ala, Pro or Ser
GXXXXXDXXLXQXRXFXYXDXXXXRXGXXNXXXXPXNXX

SEQ ID NO: 43190 - DNA, 785 bp, Escherichia coli K12; identical to SEQ ID NO: 3693
  CDS (86)..(781)

SEQ ID NO: 43191 - protein, 231 aa, Escherichia coli K12; identical to SEQ ID NO: 3694

SEQ ID NO: 43192 - DNA, 1005 bp, Nostoc sp. PCC 7120; identical to SEQ ID NO: 3695
  CDS (1)..(1005)

SEQ ID NO: 43193 - protein, 334 aa, Nostoc sp. PCC 7120; identical to SEQ ID NO: 3696

SEQ ID NO: 43194 - DNA, 642 bp, Salmonella enterica subsp. enterica serovar Typhi; identical to SEQ ID NO: 3697
  CDS (1)..(642)

SEQ ID NO: 43195 - protein, 213 aa, Salmonella enterica subsp. enterica serovar Typhi; identical to SEQ ID NO: 3698

SEQ ID NO: 43196 - DNA, 942 bp, Nostoc sp. PCC 7120; identical to SEQ ID NO: 3699
  CDS (1)..(942)

SEQ ID NO: 43197 - protein, 313 aa, Nostoc sp. PCC 7120; identical to SEQ ID NO: 3700

SEQ ID NO: 43198 - DNA, 642 bp, Yersinia pestis; identical to SEQ ID NO: 3701
  CDS (1)..(642)

SEQ ID NO: 43199 - protein, 213 aa, Yersinia pestis; identical to SEQ ID NO: 3702

SEQ ID NO: 43200 - DNA, 1668 bp, Thermotoga maritima; identical to SEQ ID NO: 3703
  CDS (1)..(1668)

SEQ ID NO: 43201 - protein, 555 aa, Thermotoga maritima; identical to SEQ ID NO: 3704

SEQ ID NO: 43202 - DNA, 2056 bp, Arabidopsis thaliana (mouse-ear cress); identical to SEQ ID NO: 3705
  CDS (1)..(2025)

SEQ ID NO: 43203 - protein, 674 aa, Arabidopsis thaliana (mouse-ear cress); identical to SEQ ID NO: 3706

SEQ ID NO: 43204 - DNA, 624 bp, Staphylococcus aureus; identical to SEQ ID NO: 3707
  CDS (1)..(624)

SEQ ID NO: 43205 - protein, 207 aa, Staphylococcus aureus; identical to SEQ ID NO: 3708

SEQ ID NO: 43206 - DNA, 639 bp, Streptococcus pneumoniae; identical to SEQ ID NO: 3709
  CDS (1)..(639)

SEQ ID NO: 43207 - protein, 212 aa, Streptococcus pneumoniae; identical to SEQ ID NO: 3710

SEQ ID NO: 43208 - DNA, 642 bp, Mycoplasma genitalium; identical to SEQ ID NO: 3711
  CDS (1)..(642): transl_table=4

SEQ ID NO: 43209 - protein, 213 aa, Mycoplasma genitalium; identical to SEQ ID NO: 3712

SEQ ID NO: 43210 - DNA, 636 bp, Bacillus halodurans; identical to SEQ ID NO: 3713
  CDS (1)..(636)

SEQ ID NO: 43211 - protein, 211 aa, Bacillus halodurans; identical to SEQ ID NO: 3714

SEQ ID NO: 43212 - DNA, 1668 bp, Treponema pallidum subsp. pallidum (syphilis spirochete); identical to SEQ ID NO: 3715
  CDS (1)..(1668)

SEQ ID NO: 43213 - protein, 555 aa, Treponema pallidum subsp. pallidum (syphilis spirochete); identical to SEQ ID NO: 3716

SEQ ID NO: 43214 - DNA, 669 bp, Chlamydophila pneumoniae, Chlamydia pneumoniae; identical to SEQ ID NO: 3717
  CDS (1)..(669)

SEQ ID NO: 43215 - protein, 222 aa, Chlamydophila pneumoniae, Chlamydia pneumoniae; identical to SEQ ID NO: 3718

SEQ ID NO: 43216 - DNA, 621 bp, Lactococcus lactis subsp. lactis; identical to SEQ ID NO: 3719
  CDS (1)..(621)

SEQ ID NO: 43217 - protein, 206 aa, Lactococcus lactis subsp. lactis; identical to SEQ ID NO: 3720

SEQ ID NO: 43218 - DNA, 633 bp, Deinococcus radiodurans; identical to SEQ ID NO: 3721
  CDS (1)..(633)

SEQ ID NO: 43219 - protein, 210 aa, Deinococcus radiodurans; identical to SEQ ID NO: 3722

SEQ ID NO: 43220 - DNA, 1932 bp, Arabidopsis thaliana (mouse-ear cress); identical to SEQ ID NO: 3723
  CDS (1)..(1932)

SEQ ID NO: 43221 - protein, 643 aa, Arabidopsis thaliana (mouse-ear cress); identical to SEQ ID NO: 3724

SEQ ID NO: 43222 - DNA, 636 bp, Bacillus subtilis; identical to SEQ ID NO: 3725
  CDS (1)..(636)

SEQ ID NO: 43223 - protein, 211 aa, Bacillus subtilis; identical to SEQ ID NO: 3726

SEQ ID NO: 43224 - DNA, 624 bp, Borrelia burgdorferi (Lyme disease spirochete); identical to SEQ ID NO: 3727
  CDS (1)..(624)

SEQ ID NO: 43225 - protein, 207 aa, Borrelia burgdorferi (Lyme disease spirochete); identical to SEQ ID NO: 3728

SEQ ID NO: 43226 - DNA, 624 bp, Ureaplasma urealyticum; identical to SEQ ID NO: 3729
  CDS (1)..(624): transl_table=4

SEQ ID NO: 43227 - protein, 207 aa, Ureaplasma urealyticum; identical to SEQ ID NO: 3730

SEQ ID NO: 43228 - DNA, 642 bp, Haemophilus influenzae; identical to SEQ ID NO: 3731
  CDS (1)..(642)

SEQ ID NO: 43229 - protein, 213 aa, Haemophilus influenzae; identical to SEQ ID NO: 3732

SEQ ID NO: 43230 - DNA, 1470 bp, Spinacia oleracea (spinach); identical to SEQ ID NO: 3733
  CDS (49)..(1257)

SEQ ID NO: 43231 - protein, 402 aa, Spinacia oleracea (spinach); identical to SEQ ID NO: 3734

SEQ ID NO: 43232 - DNA, 1533 bp, Triticum sp. (wheat); identical to SEQ ID NO: 3735
  CDS (65)..(1279)

SEQ ID NO: 43233 - protein, 404 aa, Triticum sp. (wheat); identical to SEQ ID NO: 3736

SEQ ID NO: 43234 - DNA, 1240 bp, Arabidopsis thaliana (mouse-ear cress); identical to SEQ ID NO: 3737
  CDS (1)..(1188)

SEQ ID NO: 43235 - protein, 395 aa, Arabidopsis thaliana (mouse-ear cress); identical to SEQ ID NO: 3738

SEQ ID NO: 43236 - DNA, 2077 bp, Saccharomyces cerevisiae; identical to SEQ ID NO: 3739
  CDS (482)..(1987)

SEQ ID NO: 43237 - protein, 501 aa, Saccharomyces cerevisiae; identical to SEQ ID NO: 3740

SEQ ID NO: 43238 - DNA, 642 bp, Mycoplasma pneumoniae; identical to SEQ ID NO: 3741
  CDS (1)..(642): transl_table=4

SEQ ID NO: 43239 - protein, 213 aa, Mycoplasma pneumoniae; identical to SEQ ID NO: 3742

SEQ ID NO: 43240 - DNA, 1245 bp, Chlamydomonas reinhardtii; identical to SEQ ID NO: 3743
  CDS (28)..(1155)

SEQ ID NO: 43241 - protein, 375 aa, Chlamydomonas reinhardtii; identical to SEQ ID NO: 3744

SEQ ID NO: 43242 - DNA, 1520 bp, Mesembryanthemum crystallinum (common ice plant); identical to SEQ ID NO: 3745
  CDS (127)..(1320)

SEQ ID NO: 43243 - protein, 397 aa, Mesembryanthemum crystallinum (common ice plant); identical to SEQ ID NO: 3746

SEQ ID NO: 43244 - DNA, 690 bp, Caenorhabditis elegans; identical to SEQ ID NO: 3747
  CDS (1)..(690)

SEQ ID NO: 43245 - protein, 229 aa, Caenorhabditis elegans; identical to SEQ ID NO: 3748

SEQ ID NO: 43246 - DNA, 1668 bp, Caenorhabditis elegans; identical to SEQ ID NO: 3749
  CDS (1)..(1668)

SEQ ID NO: 43247 - protein, 555 aa, Caenorhabditis elegans; identical to SEQ ID NO: 3750

SEQ ID NO: 43248 - DNA, 1365 bp, Schizosaccharomyces pombe; identical to SEQ ID NO: 3751
  CDS (1)..(1365)

SEQ ID NO: 43249 - protein, 454 aa, Schizosaccharomyces pombe; identical to SEQ ID NO: 3752

SEQ ID NO: 43250 - DNA, 1647 bp, Homo sapiens; identical to SEQ ID NO: 3753
  CDS (1)..(1647)

SEQ ID NO: 43251 - protein, 548 aa, Homo sapiens; identical to SEQ ID NO: 3754

SEQ ID NO: 43252 - DNA, 738 bp, Debaryomyces hansenii; identical to SEQ ID NO: 3755
  CDS (1)..(738)

SEQ ID NO: 43253 - protein, 245 aa, Debaryomyces hansenii; identical to SEQ ID NO: 3756

SEQ ID NO: 43254 - DNA, 1521 bp, Debaryomyces hansenii; identical to SEQ ID NO: 3757
  CDS (1)..(1521)

SEQ ID NO: 43255 - protein, 506 aa, Debaryomyces hansenii; identical to SEQ ID NO: 3758

SEQ ID NO: 43256 - DNA, 1353 bp, Yarrowia lipolytica; identical to SEQ ID NO: 3759
  CDS (1)..(1353)

SEQ ID NO: 43257 - protein, 450 aa, Yarrowia lipolytica; identical to SEQ ID NO: 3760

SEQ ID NO: 43258 - DNA, 1380 bp, Kluyveromyces lactis; identical to SEQ ID NO: 3761
  CDS (1)..(1380)

SEQ ID NO: 43259 - protein, 459 aa, Kluyveromyces lactis; identical to SEQ ID NO: 3762

SEQ ID NO: 43260 - DNA, 642 bp, Erwinia carotovora subsp; identical to SEQ ID NO: 3763
  CDS (1)..(642)

SEQ ID NO: 43261 - protein, 213 aa, Erwinia carotovora subsp; identical to SEQ ID NO: 3764

SEQ ID NO: 43262 - DNA, 627 bp, Mesoplasma florum L1; identical to SEQ ID NO: 3765
  CDS (1)..(627)

SEQ ID NO: 43263 - protein, 208 aa, Mesoplasma florum L1; identical to SEQ ID NO: 3766

SEQ ID NO: 43264 - DNA, 1431 bp, Candida glabrata; identical to SEQ ID NO: 3767
  CDS (1)..(1431)

SEQ ID NO: 43265 - protein, 476 aa, Candida glabrata; identical to SEQ ID NO: 3768

SEQ ID NO: 43266 - DNA, 639 bp, Bacillus thuringiensis serovar konkukian str; identical to SEQ ID NO: 3769
  CDS (1)..(639)

SEQ ID NO: 43267 - protein, 212 aa, Bacillus thuringiensis serovar konkukian str; identical to SEQ ID NO: 3770

SEQ ID NO: 43268 - DNA, 834 bp, Homo sapiens; identical to SEQ ID NO: 3771
  CDS (1)..(834)

SEQ ID NO: 43269 - protein, 277 aa, Homo sapiens [sequence omitted]

SEQ ID NO: 43270 - DNA, 1965 bp, Oryza sativa; identical to SEQ ID NO: 3773
  CDS (257)..(1726)

SEQ ID NO: 43271 - protein, 489 aa, Oryza sativa; identical to SEQ ID NO: 3774

SEQ ID NO: 43272 - DNA, 747 bp, Photobacterium profundum; identical to SEQ ID NO: 3775
  CDS (1)..(747)

SEQ ID NO: 43273 - protein, 248 aa, Photobacterium profundum; identical to SEQ ID NO: 3776

SEQ ID NO: 43274 - DNA, 621 bp, Bdellovibrio bacteriovorus; identical to SEQ ID NO: 3777
  CDS (1)..(621)

SEQ ID NO: 43275 - protein, 206 aa, Bdellovibrio bacteriovorus; identical to SEQ ID NO: 3778

SEQ ID NO: 43276 - DNA, 624 bp, Bdellovibrio bacteriovorus; identical to SEQ ID NO: 3779
  CDS (1)..(624)

SEQ ID NO: 43277 - protein, 207 aa, Bdellovibrio bacteriovorus; identical to SEQ ID NO: 3780

SEQ ID NO: 43278 - DNA, 618 bp, Mycoplasma mycoides; identical to SEQ ID NO: 3781
  CDS (1)..(618)

SEQ ID NO: 43279 - protein, 205 aa, Mycoplasma mycoides; identical to SEQ ID NO: 3782

SEQ ID NO: 43280 - DNA, 2638 bp, Oryza sativa; identical to SEQ ID NO: 3783
  CDS (248)..(2206)

SEQ ID NO: 43281 - protein, 652 aa, Oryza sativa; identical to SEQ ID NO: 3784

SEQ ID NO: 43282 - DNA, 1494 bp, Oryza sativa; identical to SEQ ID NO: 3785
  CDS (20)..(1231)

SEQ ID NO: 43283 - protein, 403 aa, Oryza sativa; identical to SEQ ID NO: 3786

SEQ ID NO: 43284 - DNA, 1824 bp, Homo sapiens; identical to SEQ ID NO: 3787
  CDS (45)..(1232)

SEQ ID NO: 43285 - protein, 395 aa, Homo sapiens [sequence omitted]

SEQ ID NO: 43286 - DNA, 630 bp, Listeria monocytogenes; identical to SEQ ID NO: 3789
  CDS (1)..(630)

SEQ ID NO: 43287 - protein, 209 aa, Listeria monocytogenes; identical to SEQ ID NO: 3790

SEQ ID NO: 43288 - DNA, 636 bp, Thermus thermophilus; identical to SEQ ID NO: 3791
  CDS (1)..(636)

SEQ ID NO: 43289 - protein, 211 aa, Thermus thermophilus; identical to SEQ ID NO: 3792

SEQ ID NO: 43290 - DNA, 1653 bp, Treponema denticola; identical to SEQ ID NO: 3793
  CDS (1)..(1653)

SEQ ID NO: 43291 - protein, 550 aa, Treponema denticola; identical to SEQ ID NO: 3794

SEQ ID NO: 43292 - DNA, 636 bp, Lactobacillus johnsonii; identical to SEQ ID NO: 3795
  CDS (1)..(636)

SEQ ID NO: 43293 - protein, 211 aa, Lactobacillus johnsonii; identical to SEQ ID NO: 3796

SEQ ID NO: 43294 - DNA, 1497 bp, Ashbya gossypii; identical to SEQ ID NO: 3797
  CDS (1)..(1497)

SEQ ID NO: 43295 - protein, 498 aa, Ashbya gossypii; identical to SEQ ID NO: 3798

SEQ ID NO: 43296 - DNA, 651 bp, Vibrio vulnificus; identical to SEQ ID NO: 3799
  CDS (1)..(651)

SEQ ID NO: 43297 - protein, 216 aa, Vibrio vulnificus; identical to SEQ ID NO: 3800

SEQ ID NO: 43298 - DNA, 630 bp, Porphyromonas gingivalis; identical to SEQ ID NO: 3801
  CDS (1)..(630)

SEQ ID NO: 43299 - protein, 209 aa, Porphyromonas gingivalis; identical to SEQ ID NO: 3802

SEQ ID NO: 43300 - DNA, 642 bp, Photorhabdus luminescens; identical to SEQ ID NO: 3803
  CDS (1)..(642)

SEQ ID NO: 43301 - protein, 213 aa, Photorhabdus luminescens; identical to SEQ ID NO: 3804

SEQ ID NO: 43302 - DNA, 645 bp, Mycoplasma gallisepticum; identical to SEQ ID NO: 3805
  CDS (1)..(645): transl_table=4

SEQ ID NO: 43303 - protein, 214 aa, Mycoplasma gallisepticum; identical to SEQ ID NO: 3806

SEQ ID NO: 43304 - DNA, 930 bp, Gloeobacter violaceus; identical to SEQ ID NO: 3807
  CDS (1)..(930)

SEQ ID NO: 43305 - protein, 309 aa, Gloeobacter violaceus; identical to SEQ ID NO: 3808

SEQ ID NO: 43306 - DNA, 996 bp, Gloeobacter violaceus; identical to SEQ ID NO: 3809
  CDS (1)..(996)

SEQ ID NO: 43307 - protein, 331 aa, Gloeobacter violaceus; identical to SEQ ID NO: 3810

SEQ ID NO: 43308 - DNA, 1038 bp, Gloeobacter violaceus; identical to SEQ ID NO: 3811
  CDS (1)..(1038)

SEQ ID NO: 43309 - protein, 345 aa, Gloeobacter violaceus; identical to SEQ ID NO: 3812

SEQ ID NO: 43310 - DNA, 615 bp, Chromobacterium violaceum; identical to SEQ ID NO: 3813
  CDS (1)..(615)

SEQ ID NO: 43311 - protein, 204 aa, Chromobacterium violaceum; identical to SEQ ID NO: 3814

SEQ ID NO: 43312 - DNA, 2049 bp, Giardia lamblia ATCC 50803; identical to SEQ ID NO: 3815
  CDS (1)..(2049)

SEQ ID NO: 43313 - protein, 682 aa, Giardia lamblia ATCC 50803; identical to SEQ ID NO: 3816

SEQ ID NO: 43314 - DNA, 1425 bp, Neurospora crassa; identical to SEQ ID NO: 3817
  CDS (1)..(1425)

SEQ ID NO: 43315 - protein, 474 aa, Neurospora crassa; identical to SEQ ID NO: 3818

SEQ ID NO: 43316 - DNA, 612 bp, Synechococcus sp; identical to SEQ ID NO: 3819
  CDS (1)..(612)

SEQ ID NO: 43317 - protein, 203 aa, Synechococcus sp; identical to SEQ ID NO: 3820

SEQ ID NO: 43318 - DNA, 654 bp, Haemophilus ducreyi; identical to SEQ ID NO: 3821
  CDS (1)..(654)

SEQ ID NO: 43319 - protein, 217 aa, Haemophilus ducreyi; identical to SEQ ID NO: 3822

SEQ ID NO: 43320 - DNA, 1609 bp, Chlorarachnion sp; identical to SEQ ID NO: 3823
  CDS (10)..(1464)

SEQ ID NO: 43321 - protein, 484 aa, Chlorarachnion sp; identical to SEQ ID NO: 3824

SEQ ID NO: 43322 - DNA, 630 bp, Enterococcus faecalis; identical to SEQ ID NO: 3825
  CDS (1)..(630)

SEQ ID NO: 43323 - protein, 209 aa, Enterococcus faecalis; identical to SEQ ID NO: 3826

SEQ ID NO: 43324 - DNA, 648 bp, Coxiella burnetii; identical to SEQ ID NO: 3827
  CDS (1)..(648)

SEQ ID NO: 43325 - protein, 215 aa, Coxiella burnetii; identical to SEQ ID NO: 3828

SEQ ID NO: 43326 - DNA, 1659 bp, Clostridium tetani; identical to SEQ ID NO: 3829
  CDS (1)..(1659)

SEQ ID NO: 43327 - protein, 552 aa, Clostridium tetani; identical to SEQ ID NO: 3830

SEQ ID NO: 43328 - DNA, 1674 bp, Bacteroides thetaiotaomicron; identical to SEQ ID NO: 3831
  CDS (1)..(1674)

SEQ ID NO: 43329 - protein, 557 aa, Bacteroides thetaiotaomicron; identical to SEQ ID NO: 3832

SEQ ID NO: 43330 - DNA, 618 bp, Bacteroides thetaiotaomicron; identical to SEQ ID NO: 3833
  CDS (1)..(618)

SEQ ID NO: 43331 - protein, 205 aa, Bacteroides thetaiotaomicron; identical to SEQ ID NO: 3834

SEQ ID NO: 43332 - DNA, 630 bp, Streptococcus agalactiae; identical to SEQ ID NO: 3835
  CDS (1)..(630)

SEQ ID NO: 43333 - protein, 209 aa, Streptococcus agalactiae; identical to SEQ ID NO: 3836

SEQ ID NO: 43334 - DNA, 1524 bp, Galdieria sulphuraria; identical to SEQ ID NO: 3837
  CDS (77)..(1423)

SEQ ID NO: 43335 - protein, 448 aa, Galdieria sulphuraria; identical to SEQ ID NO: 3838

SEQ ID NO: 43336 - DNA, 1005 bp, Synechococcus vulcanus; identical to SEQ ID NO: 3839
  CDS (1)..(1005)

SEQ ID NO: 43337 - protein, 334 aa, Synechococcus vulcanus; identical to SEQ ID NO: 3840

SEQ ID NO: 43338 - DNA, 1831 bp, Arabidopsis thaliana; identical to SEQ ID NO: 3841
  CDS (116)..(1525)

SEQ ID NO: 43339 - protein, 469 aa, Arabidopsis thaliana; identical to SEQ ID NO: 3842

SEQ ID NO: 43340 - DNA, 1875 bp, Homo sapiens; identical to SEQ ID NO: 3843
  CDS (14)..(1273)

SEQ ID NO: 43341 - protein, 419 aa, Homo sapiens; identical to SEQ ID NO: 3844

SEQ ID NO: 43342 - DNA, 1644 bp, Thermoanaerobacter tengcongensis; identical to SEQ ID NO: 3845
  CDS (1)..(1644)

SEQ ID NO: 43343 - protein, 547 aa, Thermoanaerobacter tengcongensis; identical to SEQ ID NO: 3846

SEQ ID NO: 43344 - DNA, 1665 bp, Clostridium perfringens; identical to SEQ ID NO: 3847
  CDS (1)..(1665)

SEQ ID NO: 43345 - protein, 554 aa, Clostridium perfringens; identical to SEQ ID NO: 3848

SEQ ID NO: 43346 - DNA, 1258 bp, Odontella sinensis; identical to SEQ ID NO: 3849
  CDS (23)..(1213)

SEQ ID NO: 43347 - protein, 396 aa, Odontella sinensis; identical to SEQ ID NO: 3850

SEQ ID NO: 43348 - DNA, 606 bp, Homo sapiens; identical to SEQ ID NO: 3851
  CDS (1)..(606)

SEQ ID NO: 43349 - protein, 201 aa, Homo sapiens [sequence omitted]

SEQ ID NO: 43350 - DNA, 1299 bp, Vaucheria litorea; identical to SEQ ID NO: 3853
  CDS (8)..(1225)

SEQ ID NO: 43351 - protein, 405 aa, Vaucheria litorea; identical to SEQ ID NO: 3854

SEQ ID NO: 43352 - DNA, 1711 bp, Cryptosporidium parvum; identical to SEQ ID NO: 3855
  CDS (290)..(1549)

SEQ ID NO: 43353 - protein, 419 aa, Cryptosporidium parvum; identical to SEQ ID NO: 3856

SEQ ID NO: 43354 - DNA, 1492 bp, Arabidopsis thaliana; identical to SEQ ID NO: 3857
  CDS (1)..(1461)

SEQ ID NO: 43355 - protein, 486 aa, Arabidopsis thaliana; identical to SEQ ID NO: 3858

SEQ ID NO: 43356 - DNA, 1480 bp, Dictyostelium discoideum; identical to SEQ ID NO: 3859
  CDS (1)..(1479)

SEQ ID NO: 43357 - protein, 492 aa, Dictyostelium discoideum; identical to SEQ ID NO: 3860

SEQ ID NO: 43358 - DNA, 1545 bp, Synechococcus sp; identical to SEQ ID NO: 3861
  CDS (267)..(1268)

SEQ ID NO: 43359 - protein, 333 aa, Synechococcus sp; identical to SEQ ID NO: 3862

SEQ ID NO: 43360 - DNA, 1452 bp, Arabidopsis thaliana; identical to SEQ ID NO: 3863
  CDS (1)..(1452)

SEQ ID NO: 43361 - protein, 483 aa, Arabidopsis thaliana; identical to SEQ ID NO: 3864

SEQ ID NO: 43362 - DNA, 1398 bp, Arabidopsis thaliana; identical to SEQ ID NO: 3865
  CDS (1)..(1398)

SEQ ID NO: 43363 - protein, 465 aa, Arabidopsis thaliana; identical to SEQ ID NO: 3866

SEQ ID NO: 43364 - DNA, 1856 bp, Drosophila melanogaster; identical to SEQ ID NO: 3867
  CDS (77)..(1762)

SEQ ID NO: 43365 - protein, 561 aa, Drosophila melanogaster; identical to SEQ ID NO: 3868

SEQ ID NO: 43366 - DNA, 1869 bp, Synechocystis sp; identical to SEQ ID NO: 3869
  CDS (233)..(1231)

SEQ ID NO: 43367 - protein, 332 aa, Synechocystis sp; identical to SEQ ID NO: 3870

SEQ ID NO: 43368 - DNA, 834 bp, Mus musculus; identical to SEQ ID NO: 3871
  CDS (1)..(834)

SEQ ID NO: 43369 - protein, 277 aa, Mus musculus; identical to SEQ ID NO: 3872

SEQ ID NO: 43370 - DNA, 1200 bp, Homo sapiens; identical to SEQ ID NO: 3873
  CDS (180)..(965)

SEQ ID NO: 43371 - protein, 261 aa, Homo sapiens; identical to SEQ ID NO: 3874

SEQ ID NO: 43372 - DNA, 822 bp, Drosophila melanogaster; identical to SEQ ID NO: 3875
  CDS (40)..(822)

SEQ ID NO: 43373 - protein, 260 aa, Drosophila melanogaster; identical to SEQ ID NO: 3876

SEQ ID NO: 43374 - DNA, 1823 bp, Mus musculus; identical to SEQ ID NO: 3877
  CDS (6)..(1652)

SEQ ID NO: 43375 - protein, 548 aa, Mus musculus; identical to SEQ ID NO: 3878

SEQ ID NO: 43376 - DNA, 627 bp, Clostridium perfringens; identical to SEQ ID NO: 3879
  CDS (1)..(627)

SEQ ID NO: 43377 - protein, 208 aa, Clostridium perfringens; identical to SEQ ID NO: 3880

SEQ ID NO: 43378 - DNA, 630 bp, Clostridium tetani; identical to SEQ ID NO: 3881
  CDS (1)..(630)

SEQ ID NO: 43379 - protein, 209 aa, Clostridium tetani; identical to SEQ ID NO: 3882

SEQ ID NO: 43380 - DNA, 678 bp, Halobacterium sp; identical to SEQ ID NO: 3883
  CDS (1)..(678)

SEQ ID NO: 43381 - protein, 225 aa, Halobacterium sp; identical to SEQ ID NO: 3884

SEQ ID NO: 43382 - DNA, 630 bp, Lactobacillus plantarum; identical to SEQ ID NO: 3885
  CDS (1)..(630)

SEQ ID NO: 43383 - protein, 209 aa, Lactobacillus plantarum; identical to SEQ ID NO: 3886

SEQ ID NO: 43384 - DNA, 633 bp, Oceanobacillus iheyensis; identical to SEQ ID NO: 3887
  CDS (1)..(633)

SEQ ID NO: 43385 - protein, 210 aa, Oceanobacillus iheyensis; identical to SEQ ID NO: 3888

SEQ ID NO: 43386 - DNA, 651 bp, Pasteurella multocida; identical to SEQ ID NO: 3889
  CDS (1)..(651)

SEQ ID NO: 43387 - protein, 216 aa, Pasteurella multocida; identical to SEQ ID NO: 3890

SEQ ID NO: 43388 - DNA, 639 bp, Shewanella oneidensis; identical to SEQ ID NO: 3891
  CDS (1)..(639)

SEQ ID NO: 43389 - protein, 212 aa, Shewanella oneidensis; identical to SEQ ID NO: 3892

SEQ ID NO: 43390 - DNA, 624 bp, Staphylococcus epidermidis; identical to SEQ ID NO: 3893
  CDS (1)..(624)

SEQ ID NO: 43391 - protein, 207 aa, Staphylococcus epidermidis; identical to SEQ ID NO: 3894

SEQ ID NO: 43392 - DNA, 627 bp, Streptococcus pyogenes; identical to SEQ ID NO: 3895
  CDS (1)..(627)

SEQ ID NO: 43393 - protein, 208 aa, Streptococcus pyogenes; identical to SEQ ID NO: 3896

SEQ ID NO: 43394 - DNA, 642 bp, Vibrio cholerae; identical to SEQ ID NO: 3897
  CDS (1)..(642)

SEQ ID NO: 43395 - protein, 213 aa, Vibrio cholerae; identical to SEQ ID NO: 3898

SEQ ID NO: 43396 - DNA, 642 bp, Vibrio parahaemolyticus; identical to SEQ ID NO: 3899
  CDS (1)..(642)

SEQ ID NO: 43397 - protein, 213 aa, Vibrio parahaemolyticus; identical to SEQ ID NO: 3900

SEQ ID NO: 43398 - DNA, 816 bp, Xenopus laevis; identical to SEQ ID NO: 3901
  CDS (1)..(816)

SEQ ID NO: 43399 - protein, 271 aa, Xenopus laevis; identical to SEQ ID NO: 3902

SEQ ID NO: 43400 - DNA, 21 bp, Artificial sequence
  Primer sequence
atggcgcttcgtcgccccctt

SEQ ID NO: 43401 - DNA, 27 bp, Artificial sequence
  Primer sequence
ttattcaaagaactgacttattttcgc

SEQ ID NO: 43402 - protein, 242 aa, Artificial sequence; identical to SEQ ID NO: 20857
  Consensus
  Variant (5)..(5): Xaa in position 5 is any amino acid
  Variant (7)..(7): Xaa in position 7 is any amino acid
  Variant (15)..(18): Xaa in position 15 to 18 is any amino acid
  Variant (20)..(26): Xaa in position 20 to 26 is any amino acid
  Variant (27)..(51): Xaa in position 27 to 51 is any or no amino acid
  Variant (54)..(55): Xaa in position 54 to 55 is any amino acid
  Variant (57)..(57): Xaa in position 57 is any amino acid
  Variant (60)..(68): Xaa in position 60 to 68 is any amino acid
  Variant (69)..(76): Xaa in position 69 to 76 is any or no amino acid
  Variant (79)..(79): Xaa in position 79 is any amino acid
  Variant (81)..(81): Xaa in position 81 is any amino acid
  Variant (83)..(83): Xaa in position 83 is any amino acid
  Variant (85)..(86): Xaa in position 85 to 86 is any amino acid
  Variant (89)..(91): Xaa in position 89 to 91 is any amino acid
  Variant (93)..(94): Xaa in position 93 to 94 is any amino acid
  Variant (96)..(97): Xaa in position 96 to 97 is any amino acid
  Variant (99)..(100): Xaa in position 99 to 100 is any amino acid
  Variant (102)..(103): Xaa in position 102 to 103 is any amino acid
  Variant (105)..(105): Xaa in position 105 is any amino acid
  Variant (107)..(114): Xaa in position 107 to 114 is any amino acid
  Variant (115)..(121): Xaa in position 115 to 121 is any or no amino acid
  Variant (123)..(123): Xaa in position 123 is any amino acid
  Variant (124)..(126): Xaa in position 124 to 126 is any or no amino acid
  Variant (134)..(140): Xaa in position 134 to 140 is any amino acid
  Variant (141)..(143): Xaa in position 141 to 143 is any or no amino acid
  Variant (145)..(151): Xaa in position 145 to 151 is any amino acid
  Variant (155)..(167): Xaa in position 155 to 167 is any or no amino acid
  Variant (169)..(171): Xaa in position 169 to 171 is any amino acid
  Variant (173)..(176): Xaa in position 173 to 176 is any amino acid
  Variant (180)..(180): Xaa in position 180 is any amino acid
  Variant (183)..(192): Xaa in position 183 to 192 is any amino acid
  Variant (193)..(195): Xaa in position 193 to 195 is any or no amino acid
  Variant (197)..(202): Xaa in position 197 to 202 is any amino acid
  Variant (206)..(209): Xaa in position 206 to 209 is any amino acid
  Variant (212)..(212): Xaa in position 212 is any amino acid
  Variant (214)..(217): Xaa in position 214 to 217 is any amino acid
  Variant (223)..(226): Xaa in position 223 to 226 is any amino acid
  Variant (227)..(232): Xaa in position 227 to 232 is any or no amino acid
  Variant (234)..(241): Xaa in position 234 to 241 is any amino acid

SEQ ID NO: 43403 - protein, 58 aa, Artificial sequence; identical to SEQ ID NO: 6166
  Consensus
  Variant (1)..(1): Xaa in position 1 is Ile, Val, Leu or Ala
  Variant (2)..(2): Xaa in position 2 is Ile, Val or Leu
  Variant (3)..(3): Xaa in position 3 is any amino acid
  Variant (4)..(4): Xaa in position 4 is Ile, Val or Leu
  Variant (5)..(5): Xaa in position 5 is any amino acid
  Variant (6)..(6): Xaa in position 6 is Gly or Ala
  Variant (7)..(7): Xaa in position 7 is any amino acid
  Variant (8)..(8): Xaa in position 8 is Ser, Thr or Ala
  Variant (9)..(9): Xaa in position 9 is Gly, Ala or Ser
  Variant (10)..(10): Xaa in position 10 is Ser, Cys, Ala or Gly
  Variant (13)..(13): Xaa in position 13 is Thr or Ser
  Variant (14)..(18): Xaa in position 14 to 18 is any amino acid
  Variant (19)..(19): Xaa in position 19 is Ile, Leu, Val or Met
  Variant (20)..(27): Xaa in position 20 to 27 is any amino acid
  Variant (28)..(52): Xaa in position 28 to 52 is any or no amino acid
  Variant (53)..(53): Xaa in position 53 is Ile, Leu or Val
  Variant (54)..(55): Xaa in position 54 to 55 is any amino acid
  Variant (57)..(57): Xaa in position 57 is any amino acid
  Variant (58)..(58): Xaa in position 58 is Tyr or Phe

SEQ ID NO: 43404 - protein, 74 aa, Artificial sequence; identical to SEQ ID NO: 6167
  Consensus
  Variant (1)..(1): Xaa in position 1 is Ala, Ser, Val, Glu or Cys
  Variant (2)..(10): Xaa in position 2 to 10 is any amino acid
  Variant (11)..(11): Xaa in position 11 is Leu, Ile, Val or Met
  Variant (12)..(13): Xaa in position 12 to 13 is any amino acid
  Variant (14)..(14): Xaa in position 14 is Leu or Ile
  Variant (15)..(19): Xaa in position 15 to 19 is any amino acid
  Variant (20)..(20): Xaa in position 20 is Val, Ile, Leu, Thr or Tyr
  Variant (21)..(22): Xaa in position 21 to 22 is any amino acid
  Variant (24)..(24): Xaa in position 24 is any amino acid
  Variant (26)..(34): Xaa in position 26 to 34 is any amino acid
  Variant (35)..(46): Xaa in position 35 to 46 is any or no amino acid
  Variant (47)..(47): Xaa in position 47 is Val, Ile or Phe
  Variant (48)..(48): Xaa in position 48 is Ile, Val, Leu or Phe
  Variant (49)..(49): Xaa in position 49 is Ile, Val or Leu
  Variant (50)..(50): Xaa in position 50 is any amino acid
  Variant (51)..(51): Xaa in position 51 is Glu or Asp
  Variant (53)..(53): Xaa in position 53 is Ile or Leu
  Variant (54)..(54): Xaa in position 54 is Leu, His, Tyr, Phe or Met
  Variant (55)..(59): Xaa in position 55 to 59 is any amino acid
  Variant (60)..(63): Xaa in position 60 to 63 is any or no amino acid
  Variant (64)..(64): Xaa in position 64 is Leu, Ile, Val or Met
  Variant (65)..(71): Xaa in position 65 to 71 is any amino acid
  Variant (72)..(72): Xaa in position 72 is Ile, Val or Leu
  Variant (73)..(73): Xaa in position 73 is Phe, Tyr or Ser
  Variant (74)..(74): Xaa in position 74 is Val, Met, Leu, Ile or Phe

SEQ ID NO: 43405 - protein, 44 aa, Artificial sequence; identical to SEQ ID NO: 6168
  Consensus
  Variant (1)..(1): Xaa in position 1 is Arg or Lys
  Variant (2)..(2): Xaa in position 2 is Ile, Val, Leu or Met
  Variant (3)..(3): Xaa in position 3 is any amino acid
  Variant (6)..(29): Xaa in position 6 to 29 is any amino acid
  Variant (30)..(32): Xaa in position 30 to 32 is any or no amino acid
  Variant (33)..(33): Xaa in position 33 is Phe, Tyr, Trp or Asn
  Variant (34)..(34): Xaa in position 34 is Ile, Val or Cys
  Variant (35)..(35): Xaa in position 35 is any amino acid
  Variant (36)..(36): Xaa in position 36 is Pro or Lys
  Variant (37)..(40): Xaa in position 37 to 40 is any amino acid
  Variant (42)..(43): Xaa in position 42 to 43 is any amino acid
  Variant (44)..(44): Xaa in position 44 is Ile, Val, Leu, Met or Lys

SEQ ID NO: 43406 - DNA, 1518 bp, Escherichia coli; identical to SEQ ID NO: 30163
  CDS (1)..(1518)

SEQ ID NO: 43407 - protein, 505 aa, Escherichia coli; identical to SEQ ID NO: 30164

SEQ ID NO: 43408 - DNA, 1374 bp, Archaeoglobus fulgidus DSM 4304; identical to SEQ ID NO: 30165
  CDS (1)..(1374): transl_table=11

SEQ ID NO: 43409 - protein, 457 aa, Archaeoglobus fulgidus DSM 4304; identical to SEQ ID NO: 30166

SEQ ID NO: 43410 - DNA, 1452 bp, Mesorhizobium loti MAFF303099; identical to SEQ ID NO: 30167
  CDS (1)..(1452): transl_table=11

SEQ ID NO: 43411 - protein, 483 aa, Mesorhizobium loti MAFF303099; identical to SEQ ID NO: 30168

SEQ ID NO: 43412 - DNA, 1425 bp, Thermoplasma volcanium GSS1; identical to SEQ ID NO: 30169
  CDS (1)..(1425): transl_table=11

SEQ ID NO: 43413 - protein, 474 aa, Thermoplasma volcanium GSS1; identical to SEQ ID NO: 30170

SEQ ID NO: 43414 - DNA, 1701 bp, Arabidopsis thaliana; identical to SEQ ID NO: 30171
  CDS (1)..(1701)

SEQ ID NO: 43415 - protein, 566 aa, Arabidopsis thaliana; identical to SEQ ID NO: 30172

SEQ ID NO: 43416 - DNA, 1686 bp, Arabidopsis thaliana; identical to SEQ ID NO: 30173
  CDS (1)..(1686)

SEQ ID NO: 43417 - protein, 561 aa, Arabidopsis thaliana; identical to SEQ ID NO: 30174

SEQ ID NO: 43418 - DNA, 1599 bp, Arabidopsis thaliana; identical to SEQ ID NO: 30175
  CDS (1)..(1599)

SEQ ID NO: 43419 - protein, 532 aa, Arabidopsis thaliana; identical to SEQ ID NO: 30176

SEQ ID NO: 43420 - DNA, 1398 bp, Aquifex aeolicus VF5; identical to SEQ ID NO: 30177
  CDS (1)..(1398): transl_table=11

SEQ ID NO: 43421 - protein, 465 aa, Aquifex aeolicus VF5; identical to SEQ ID NO: 30178

SEQ ID NO: 43422 - DNA, 1296 bp, Thermotoga maritima MSB8; identical to SEQ ID NO: 30179
  CDS (1)..(1296): transl_table=11

SEQ ID NO: 43423 - protein, 431 aa, Thermotoga maritima MSB8; identical to SEQ ID NO: 30180

SEQ ID NO: 43424 - DNA, 1422 bp, Bacillus halodurans C-125; identical to SEQ ID NO: 30181
  CDS (1)..(1422): transl_table=11

SEQ ID NO: 43425 - protein, 473 aa, Bacillus halodurans C-125; identical to SEQ ID NO: 30182

SEQ ID NO: 43426 - DNA, 1515 bp, Pasteurella multocida subsp. multocida str. Pm70; identical to SEQ ID NO: 30183
  CDS (1)..(1515): transl_table=11

SEQ ID NO: 43427 - protein, 504 aa, Pasteurella multocida subsp. multocida str. Pm70; identical to SEQ ID NO: 30184

SEQ ID NO: 43428 - DNA, 1416 bp, Methanocaldococcus jannaschii DSM 2661; identical to SEQ ID NO: 30185
  CDS (1)..(1416): transl_table=11

SEQ ID NO: 43429 - protein, 471 aa, Methanocaldococcus jannaschii DSM 2661; identical to SEQ ID NO: 30186

SEQ ID NO: 43430 - DNA, 1506 bp, Pseudomonas aeruginosa PAO1; identical to SEQ ID NO: 30187
  CDS (1)..(1506): transl_table=11

SEQ ID NO: 43431 - protein, 501 aa, Pseudomonas aeruginosa PAO1; identical to SEQ ID NO: 30188

SEQ ID NO: 43432 - DNA, 1500 bp, Lactococcus lactis subsp. lactis Il1403; identical to SEQ ID NO: 30189
  CDS (1)..(1500): transl_table=11

SEQ ID NO: 43433 - protein, 499 aa, Lactococcus lactis subsp. lactis Il1403; identical to SEQ ID NO: 30190

SEQ ID NO: 43434 - DNA, 1545 bp, Neisseria meningitidis MC58; identical to SEQ ID NO: 30191
  CDS (1)..(1545): transl_table=11

SEQ ID NO: 43435 - protein, 514 aa, Neisseria meningitidis MC58; identical to SEQ ID NO: 30192

SEQ ID NO: 43436 - DNA, 1473 bp, Halobacterium sp. NRC-1; identical to SEQ ID NO: 30193
  CDS (1)..(1473): transl_table=11

SEQ ID NO: 43437 - protein, 490 aa, Halobacterium sp. NRC-1; identical to SEQ ID NO: 30194

SEQ ID NO: 43438 - DNA, 1338 bp, Campylobacter jejuni subsp. jejuni NCTC 11168; identical to SEQ ID NO: 30195
  CDS (1)..(1338): transl_table=11

SEQ ID NO: 43439 - protein, 445 aa, Campylobacter jejuni subsp. jejuni NCTC 11168; identical to SEQ ID NO: 30196

SEQ ID NO: 43440 - DNA, 1545 bp, Neisseria meningitidis Z2491; identical to SEQ ID NO: 30197
  CDS (1)..(1545): transl_table=11

SEQ ID NO: 43441 - protein, 514 aa, Neisseria meningitidis Z2491; identical to SEQ ID NO: 30198

SEQ ID NO: 43442 - DNA, 1434 bp, Deinococcus radiodurans R1; identical to SEQ ID NO: 30199
  CDS (1)..(1434): transl_table=11

SEQ ID NO: 43443 - protein, 477 aa, Deinococcus radiodurans R1; identical to SEQ ID NO: 30200

SEQ ID NO: 43444 - DNA, 1458 bp, Xylella fastidiosa 9a5c; identical to SEQ ID NO: 30201
  CDS (1)..(1458): transl_table=11

SEQ ID NO: 43445 - protein, 485 aa, Xylella fastidiosa 9a5c; identical to SEQ ID NO: 30202

SEQ ID NO: 43446 - DNA, 1353 bp, Sulfolobus solfataricus P2; identical to SEQ ID NO: 30203
  CDS (1)..(1353): transl_table=11

SEQ ID NO: 43447 - protein, 450 aa, Sulfolobus solfataricus P2; identical to SEQ ID NO: 30204

SEQ ID NO: 43448 - DNA, 1215 bp, Sulfolobus solfataricus P2; identical to SEQ ID NO: 30205
  CDS (1)..(1215): transl_table=11

SEQ ID NO: 43449 - protein, 404 aa, Sulfolobus solfataricus P2; identical to SEQ ID NO: 30206

SEQ ID NO: 43450 - DNA, 1428 bp, Clostridium acetobutylicum ATCC 824; identical to SEQ ID NO: 30207
  CDS (1)..(1428): transl_table=11

SEQ ID NO: 43451 - protein, 475 aa, Clostridium acetobutylicum ATCC 824; identical to SEQ ID NO: 30208

SEQ ID NO: 43452 - DNA, 1443 bp, Streptococcus pneumoniae R6; identical to SEQ ID NO: 30209
  CDS (1)..(1443): transl_table=11

SEQ ID NO: 43453 - protein, 480 aa, Streptococcus pneumoniae R6; identical to SEQ ID NO: 30210

SEQ ID NO: 43454 - DNA, 1332 bp, Sulfolobus tokodaii str. 7; identical to SEQ ID NO: 30211
  CDS (1)..(1332): transl_table=11

SEQ ID NO: 43455 - protein, 443 aa, Sulfolobus tokodaii str. 7; identical to SEQ ID NO: 30212

SEQ ID NO: 43456 - DNA, 1491 bp, Sinorhizobium meliloti 1021; identical to SEQ ID NO: 30213
  CDS (1)..(1491): transl_table=11

SEQ ID NO: 43457 - protein, 496 aa, Sinorhizobium meliloti 1021; identical to SEQ ID NO: 30214

SEQ ID NO: 43458 - DNA, 1425 bp, Thermoplasma acidophilum DSM 1728; identical to SEQ ID NO: 30215
  CDS (1)..(1425): transl_table=11

SEQ ID NO: 43459 - protein, 474 aa, Thermoplasma acidophilum DSM 1728; identical to SEQ ID NO: 30216

SEQ ID NO: 43460 - DNA, 1503 bp, Caulobacter crescentus CB15; identical to SEQ ID NO: 30217
  CDS (1)..(1503): transl_table=11

SEQ ID NO: 43461 - protein, 500 aa, Caulobacter crescentus CB15; identical to SEQ ID NO: 30218

SEQ ID NO: 43462 - DNA, 1518 bp, Haemophilus influenzae Rd KW20; identical to SEQ ID NO: 30219
  CDS (1)..(1518): transl_table=11

SEQ ID NO: 43463 - protein, 505 aa, Haemophilus influenzae Rd KW20; identical to SEQ ID NO: 30220

SEQ ID NO: 43464 - DNA, 1428 bp, Listeria monocytogenes EGD-e; identical to SEQ ID NO: 30221
  CDS (1)..(1428): transl_table=11

SEQ ID NO: 43465 - protein, 475 aa, Listeria monocytogenes EGD-e; identical to SEQ ID NO: 30222

SEQ ID NO: 43466 - DNA, 1428 bp, Listeria innocua Clip11262; identical to SEQ ID NO: 30223
  CDS (1)..(1428): transl_table=11

SEQ ID NO: 43467 - protein, 475 aa, Listeria innocua Clip11262; identical to SEQ ID NO: 30224

SEQ ID NO: 43468 - DNA, 1500 bp, Nostoc sp. PCC 7120; identical to SEQ ID NO: 30225
  CDS (1)..(1500): transl_table=11

SEQ ID NO: 43469 - protein, 499 aa, Nostoc sp. PCC 7120; identical to SEQ ID NO: 30226

SEQ ID NO: 43470 - DNA, 1443 bp, Caenorhabditis elegans; identical to SEQ ID NO: 30227
  CDS (1)..(1443)

SEQ ID NO: 43471 - protein, 480 aa, Caenorhabditis elegans; identical to SEQ ID NO: 30228

SEQ ID NO: 43472 - DNA, 1536 bp, Ralstonia solanacearum GMI1000; identical to SEQ ID NO: 30229
  CDS (1)..(1536): transl_table=11

SEQ ID NO: 43473 - protein, 511 aa, Ralstonia solanacearum GMI1000; identical to SEQ ID NO: 30230

SEQ ID NO: 43474 - DNA, 1644 bp, Drosophila melanogaster; identical to SEQ ID NO: 30231
  CDS (1)..(1644)

SEQ ID NO: 43475 - protein, 547 aa, Drosophila melanogaster; identical to SEQ ID NO: 30232

SEQ ID NO: 43476 - DNA, 1509 bp, Agrobacterium tumefaciens str. C58; identical to SEQ ID NO: 30233
  CDS (1)..(1509): transl_table=11

SEQ ID NO: 43477 - protein, 502 aa, Agrobacterium tumefaciens str. C58; identical to SEQ ID NO: 30234

SEQ ID NO: 43478 - DNA, 1551 bp, Brucella melitensis 16M; identical to SEQ ID NO: 30235
  CDS (1)..(1551): transl_table=11

SEQ ID NO: 43479 - protein, 516 aa, Brucella melitensis 16M; identical to SEQ ID NO: 30236

SEQ ID NO: 43480 - DNA, 1263 bp, Pyrobaculum aerophilum str. IM2; identical to SEQ ID NO: 30237
  CDS (1)..(1263): transl_table=11

SEQ ID NO: 43481 - protein, 420 aa, Pyrobaculum aerophilum str. IM2; identical to SEQ ID NO: 30238

SEQ ID NO: 43482 - DNA, 1446 bp, Clostridium perfringens str. 13; identical to SEQ ID NO: 30239
  CDS (1)..(1446): transl_table=11

SEQ ID NO: 43483 - protein, 481 aa, Clostridium perfringens str. 13; identical to SEQ ID NO: 30240

SEQ ID NO: 43484 - DNA, 1350 bp, Pyrococcus furiosus DSM 3638; identical to SEQ ID NO: 30241
  CDS (1)..(1350): transl_table=11

SEQ ID NO: 43485 - protein, 449 aa, Pyrococcus furiosus DSM 3638; identical to SEQ ID NO: 30242

SEQ ID NO: 43486 - DNA, 1347 bp, Fusobacterium nucleatum subsp. nucleatum ATCC 25586; identical to SEQ ID NO: 30243
  CDS (1)..(1347): transl_table=11

SEQ ID NO: 43487 - protein, 448 aa, Fusobacterium nucleatum subsp. nucleatum ATCC 25586; identical to SEQ ID NO: 30244

SEQ ID NO: 43488 - DNA, 1455 bp, Streptococcus pyogenes MGAS8232; identical to SEQ ID NO: 30245
  CDS (1)..(1455): transl_table=11

SEQ ID NO: 43489 - protein, 484 aa, Streptococcus pyogenes MGAS8232; identical to SEQ ID NO: 30246

SEQ ID NO: 43490 - DNA, 1356 bp, Methanopyrus kandleri AV19; identical to SEQ ID NO: 30247
  CDS (1)..(1356): transl_table=11

SEQ ID NO: 43491 - protein, 451 aa, Methanopyrus kandleri AV19; identical to SEQ ID NO: 30248

SEQ ID NO: 43492 - DNA, 1455 bp, Methanosarcina acetivorans C2A; identical to SEQ ID NO: 30249
  CDS (1)..(1455): transl_table=11

SEQ ID NO: 43493 - protein, 484 aa, Methanosarcina acetivorans C2A; identical to SEQ ID NO: 30250

SEQ ID NO: 43494 - DNA, 1398 bp, Thermoanaerobacter tengcongensis MB4; identical to SEQ ID NO: 30251
  CDS (1)..(1398): transl_table=11

SEQ ID NO: 43495 - protein, 465 aa, Thermoanaerobacter tengcongensis MB4; identical to SEQ ID NO: 30252

SEQ ID NO: 43496 - DNA, 1593 bp, Streptomyces coelicolor A3(2); identical to SEQ ID NO: 30253
  CDS (1)..(1593): transl_table=11

SEQ ID NO: 43497 - protein, 530 aa, Streptomyces coelicolor A3(2); identical to SEQ ID NO: 30254

SEQ ID NO: 43498 - DNA, 1458 bp, Methanosarcina mazei Go1; identical to SEQ ID NO: 30255
  CDS (1)..(1458): transl_table=11

SEQ ID NO: 43499 - protein, 485 aa, Methanosarcina mazei Go1; identical to SEQ ID NO: 30256

SEQ ID NO: 43500 - DNA, 1467 bp, Xanthomonas axonopodis pv. citri str. 306; identical to SEQ ID NO: 30257
  CDS (1)..(1467): transl_table=11

SEQ ID NO: 43501 - protein, 488 aa, Xanthomonas axonopodis pv. citri str. 306; identical to SEQ ID NO: 30258

SEQ ID NO: 43502 - DNA, 1494 bp, Chlorobium tepidum TLS; identical to SEQ ID NO: 30259
  CDS (1)..(1494): transl_table=11

SEQ ID NO: 43503 - protein, 497 aa, Chlorobium tepidum TLS; identical to SEQ ID NO: 30260

SEQ ID NO: 43504 - DNA, 1449 bp, Thermosynechococcus elongatus BP-1; identical to SEQ ID NO: 30261
  CDS (1)..(1449): transl_table=11

SEQ ID NO: 43505 - protein, 482 aa, Thermosynechococcus elongatus BP-1; identical to SEQ ID NO: 30262

SEQ ID NO: 43506 - DNA, 1455 bp, Streptococcus agalactiae 2603V/R; identical to SEQ ID NO: 30263
  CDS (1)..(1455): transl_table=11

SEQ ID NO: 43507 - protein, 484 aa, Streptococcus agalactiae 2603V/R; identical to SEQ ID NO: 30264

SEQ ID NO: 43508 - DNA, 1407 bp, Oceanobacillus iheyensis HTE831; identical to SEQ ID NO: 30265
  CDS (1)..(1407): transl_table=11

SEQ ID NO: 43509 - protein, 468 aa, Oceanobacillus iheyensis HTE831; identical to SEQ ID NO: 30266

SEQ ID NO: 43510 - DNA, 1512 bp, Bifidobacterium longum NCC2705; identical to SEQ ID NO: 30267
  CDS (1)..(1512): transl_table=11

SEQ ID NO: 43511 - protein, 503 aa, Bifidobacterium longum NCC2705; identical to SEQ ID NO: 30268

SEQ ID NO: 43512 - DNA, 1515 bp, Shewanella oneidensis MR-1; identical to SEQ ID NO: 30269
  CDS (1)..(1515): transl_table=11

SEQ ID NO: 43513 - protein, 504 aa, Shewanella oneidensis MR-1; identical to SEQ ID NO: 30270

SEQ ID NO: 43514 - DNA, 1440 bp, Streptococcus mutans UA159; identical to SEQ ID NO: 30271
  CDS (1)..(1440): transl_table=11

SEQ ID NO: 43515 - protein, 479 aa, Streptococcus mutans UA159; identical to SEQ ID NO: 30272

SEQ ID NO: 43516 - DNA, 1413 bp, Drosophila melanogaster; identical to SEQ ID NO: 30273
  CDS (1)..(1413)

SEQ ID NO: 43517 - protein, 470 aa, Drosophila melanogaster; identical to SEQ ID NO: 30274

SEQ ID NO: 43518 - DNA, 1455 bp, Streptococcus agalactiae NEM316; identical to SEQ ID NO: 30275
  CDS (1)..(1455): transl_table=11

SEQ ID NO: 43519 - protein, 484 aa, Streptococcus agalactiae NEM316; identical to SEQ ID NO: 30276

SEQ ID NO: 43520 - DNA, 1533 bp, Corynebacterium efficiens YS-314; identical to SEQ ID NO: 30277
  CDS (1)..(1533): transl_table=11

SEQ ID NO: 43521 - protein, 510 aa, Corynebacterium efficiens YS-314; identical to SEQ ID NO: 30278

SEQ ID NO: 43522 - DNA, 1506 bp, Pseudomonas putida KT2440; identical to SEQ ID NO: 30279
  CDS (1)..(1506): transl_table=11

SEQ ID NO: 43523 - protein, 501 aa, Pseudomonas putida KT2440; identical to SEQ ID NO: 30280

SEQ ID NO: 43524 - DNA, 1524 bp, Bradyrhizobium japonicum USDA 110; identical to SEQ ID NO: 30281
  CDS (1)..(1524): transl_table=11

SEQ ID NO: 43525 - protein, 507 aa, Bradyrhizobium japonicum USDA 110; identical to SEQ ID NO: 30282

SEQ ID NO: 43526 - DNA, 1458 bp, Xylella fastidiosa Temecula1; identical to SEQ ID NO: 30283
  CDS (1)..(1458): transl_table=11

SEQ ID NO: 43527 - protein, 485 aa, Xylella fastidiosa Temecula1; identical to SEQ ID NO: 30284

SEQ ID NO: 43528 - DNA, 1398 bp, Clostridium tetani E88; identical to SEQ ID NO: 30285
  CDS (1)..(1398): transl_table=11

SEQ ID NO: 43529 - protein, 465 aa, Clostridium tetani E88; identical to SEQ ID NO: 30286

SEQ ID NO: 43530 - DNA, 1455 bp, Lactobacillus plantarum WCFS1; identical to SEQ ID NO: 30287
  CDS (1)..(1455): transl_table=11

SEQ ID NO: 43531 - protein, 484 aa, Lactobacillus plantarum WCFS1; identical to SEQ ID NO: 30288

SEQ ID NO: 43532 - DNA, 1515 bp, Tropheryma whipplei str. Twist; identical to SEQ ID NO: 30289
  CDS (1)..(1515): transl_table=11

SEQ ID NO: 43533 - protein, 504 aa, Tropheryma whipplei str. Twist; identical to SEQ ID NO: 30290

SEQ ID NO: 43534 - DNA, 1461 bp, Tropheryma whipplei TW08/27; identical to SEQ ID NO: 30291
  CDS (1)..(1461): transl_table=11

SEQ ID NO: 43535 - protein, 486 aa, Tropheryma whipplei TW08/27; identical to SEQ ID NO: 30292

SEQ ID NO: 43536 - DNA, 1509 bp, Pseudomonas syringae pv. tomato str. DC3000; identical to SEQ ID NO: 30293
  CDS (1)..(1509): transl_table=11

SEQ ID NO: 43537 - protein, 502 aa, Pseudomonas syringae pv. tomato str. DC3000; identical to SEQ ID NO: 30294

SEQ ID NO: 43538 - DNA, 1410 bp, Bacteroides thetaiotaomicron VPI-5482; identical to SEQ ID NO: 30295
  CDS (1)..(1410): transl_table=11

SEQ ID NO: 43539 - protein, 469 aa, Bacteroides thetaiotaomicron VPI-5482; identical to SEQ ID NO: 30296

SEQ ID NO: 43540 - DNA, 1440 bp, Enterococcus faecalis V583; identical to SEQ ID NO: 30297
  CDS (1)..(1440): transl_table=11

SEQ ID NO: 43541 - protein, 479 aa, Enterococcus faecalis V583; identical to SEQ ID NO: 30298

SEQ ID NO: 43542 - DNA, 1521 bp, Coxiella burnetii RSA 493; identical to SEQ ID NO: 30299
  CDS (1)..(1521): transl_table=11

SEQ ID NO: 43543 - protein, 506 aa, Coxiella burnetii RSA 493; identical to SEQ ID NO: 30300

SEQ ID NO: 43544 - DNA, 1581 bp, Streptomyces avermitilis MA-4680; identical to SEQ ID NO: 30301
  CDS (1)..(1581): transl_table=11

SEQ ID NO: 43545 - protein, 526 aa, Streptomyces avermitilis MA-4680; identical to SEQ ID NO: 30302

SEQ ID NO: 43546 - DNA, 1416 bp, Bacillus cereus ATCC 14579; identical to SEQ ID NO: 30303
  CDS (1)..(1416): transl_table=11

SEQ ID NO: 43547 - protein, 471 aa, Bacillus cereus ATCC 14579; identical to SEQ ID NO: 30304

SEQ ID NO: 43548 - DNA, 1518 bp, Nitrosomonas europaea ATCC 19718; identical to SEQ ID NO: 30305
  CDS (1)..(1518): transl_table=11

SEQ ID NO: 43549 - protein, 505 aa, Nitrosomonas europaea ATCC 19718; identical to SEQ ID NO: 30306

SEQ ID NO: 43550 - DNA, 1425 bp, Helicobacter hepaticus ATCC 51449; identical to SEQ ID NO: 30307
  CDS (1)..(1425): transl_table=11

SEQ ID NO: 43551 - protein, 474 aa, Helicobacter hepaticus ATCC 51449; identical to SEQ ID NO: 30308

SEQ ID NO: 43552 - DNA, 1614 bp, Rhodopirellula baltica SH 1; identical to SEQ ID NO: 30309
  CDS (1)..(1614): transl_table=11

SEQ ID NO: 43553 - protein, 537 aa, Rhodopirellula baltica SH 1; identical to SEQ ID NO: 30310

SEQ ID NO: 43554 - DNA, 1413 bp, Wigglesworthia glossinidia endosymbiont of Glossina brevipalpis; identical to SEQ ID NO: 30311
  CDS (1)..(1413): transl_table=11

SEQ ID NO: 43555 - protein, 470 aa, Wigglesworthia glossinidia endosymbiont of Glossina brevipalpis; identical to SEQ ID NO: 30312

SEQ ID NO: 43556 - DNA, 1458 bp, Prochlorococcus marinus subsp. marinus str. CCMP1375; identical to SEQ ID NO: 30313
  CDS (1)..(1458): transl_table=11

SEQ ID NO: 43557 - protein, 485 aa, Prochlorococcus marinus subsp. marinus str. CCMP1375; identical to SEQ ID NO: 30314

SEQ ID NO: 43558 - DNA, 1521 bp, Bordetella parapertussis 12822; identical to SEQ ID NO: 30315
  CDS (1)..(1521): transl_table=11

SEQ ID NO: 43559 - protein, 506 aa, Bordetella parapertussis 12822; identical to SEQ ID NO: 30316

SEQ ID NO: 43560 - DNA, 1521 bp, Bordetella bronchiseptica RB50; identical to SEQ ID NO: 30317
  CDS (1)..(1521): transl_table=11

SEQ ID NO: 43561 - protein, 506 aa, Bordetella bronchiseptica RB50; identical to SEQ ID NO: 30318

SEQ ID NO: 43562 - DNA, 1461 bp, Prochlorococcus marinus subsp. pastoris str. CCMP1986; identical to SEQ ID NO: 30319
  CDS (1)..(1461): transl_table=11

SEQ ID NO: 43563 - protein, 486 aa, Prochlorococcus marinus subsp. pastoris str. CCMP1986; identical to SEQ ID NO: 30320

SEQ ID NO: 43564 - DNA, 1458 bp, Prochlorococcus marinus str. MIT 9313; identical to SEQ ID NO: 30321
  CDS (1)..(1458): transl_table=11

SEQ ID NO: 43565 - protein, 485 aa, Prochlorococcus marinus str. MIT 9313; identical to SEQ ID NO: 30322

SEQ ID NO: 43566 - DNA, 1506 bp, Synechococcus sp. WH 8102; identical to SEQ ID NO: 30323
  CDS (1)..(1506): transl_table=11

SEQ ID NO: 43567 - protein, 501 aa, Synechococcus sp. WH 8102; identical to SEQ ID NO: 30324

SEQ ID NO: 43568 - DNA, 1377 bp, Wolinella succinogenes DSM 1740; identical to SEQ ID NO: 30325
  CDS (1)..(1377): transl_table=11

SEQ ID NO: 43569 - protein, 458 aa, Wolinella succinogenes DSM 1740; identical to SEQ ID NO: 30326

SEQ ID NO: 43570 - DNA, 1437 bp, Gloeobacter violaceus PCC 7421; identical to SEQ ID NO: 30327
  CDS (1)..(1437): transl_table=11

SEQ ID NO: 43571 - protein, 478 aa, Gloeobacter violaceus PCC 7421; identical to SEQ ID NO: 30328

SEQ ID NO: 43572 - DNA, 1518 bp, Photorhabdus luminescens subsp. laumondii TTO1; identical to SEQ ID NO: 30329
  CDS (1)..(1518): transl_table=11

SEQ ID NO: 43573 - protein, 505 aa, Photorhabdus luminescens subsp. laumondii TTO1; identical to SEQ ID NO: 30330

SEQ ID NO: 43574 - DNA, 1515 bp, Vibrio vulnificus YJ016; identical to SEQ ID NO: 30331
  CDS (1)..(1515): transl_table=11

SEQ ID NO: 43575 - protein, 504 aa, Vibrio vulnificus YJ016; identical to SEQ ID NO: 30332

SEQ ID NO: 43576 - DNA, 1482 bp, Corynebacterium diphtheriae NCTC 13129; identical to SEQ ID NO: 30333
  CDS (1)..(1482): transl_table=11

SEQ ID NO: 43577 - protein, 493 aa, Corynebacterium diphtheriae NCTC 13129; identical to SEQ ID NO: 30334

SEQ ID NO: 43578 - DNA, 1530 bp, Rhodopseudomonas palustris CGA009; identical to SEQ ID NO: 30335
  CDS (1)..(1530): transl_table=11

SEQ ID NO: 43579 - protein, 509 aa, Rhodopseudomonas palustris CGA009; identical to SEQ ID NO: 30336

SEQ ID NO: 43580 - DNA, 1404 bp, Geobacter sulfurreducens PCA; identical to SEQ ID NO: 30337
  CDS (1)..(1404): transl_table=11

SEQ ID NO: 43581 - protein, 467 aa, Geobacter sulfurreducens PCA; identical to SEQ ID NO: 30338

SEQ ID NO: 43582 - DNA, 1656 bp, Mycobacterium avium subsp. paratuberculosis K-10; identical to SEQ ID NO: 30339
  CDS (1)..(1656): transl_table=11

SEQ ID NO: 43583 - protein, 551 aa, Mycobacterium avium subsp. paratuberculosis K-10; identical to SEQ ID NO: 30340

SEQ ID NO: 43584 - DNA, 1386 bp, Wolbachia endosymbiont of Drosophila melanogaster; identical to SEQ ID NO: 30341
  CDS (1)..(1386): transl_table=11

SEQ ID NO: 43585 - protein, 461 aa, Wolbachia endosymbiont of Drosophila melanogaster; identical to SEQ ID NO: 30342

SEQ ID NO: 43586 - DNA, 1464 bp, Treponema denticola ATCC 35405; identical to SEQ ID NO: 30343
  CDS (1)..(1464): transl_table=11

SEQ ID NO: 43587 - protein, 487 aa, Treponema denticola ATCC 35405; identical to SEQ ID NO: 30344

SEQ ID NO: 43588 - DNA, 1416 bp, Bacillus cereus ATCC 10987; identical to SEQ ID NO: 30345
  CDS (1)..(1416): transl_table=11

SEQ ID NO: 43589 - protein, 471 aa, Bacillus cereus ATCC 10987; identical to SEQ ID NO: 30346

SEQ ID NO: 43590 - DNA, 1533 bp, Eremothecium gossypii; identical to SEQ ID NO: 30347
  CDS (1)..(1533)

SEQ ID NO: 43591 - protein, 510 aa, Eremothecium gossypii; identical to SEQ ID NO: 30348

SEQ ID NO: 43592 - DNA, 1380 bp, Methanococcus maripaludis S2; identical to SEQ ID NO: 30349
  CDS (1)..(1380): transl_table=11

SEQ ID NO: 43593 - protein, 459 aa, Methanococcus maripaludis S2; identical to SEQ ID NO: 30350

SEQ ID NO: 43594 - DNA, 1527 bp, Xenopus tropicalis; identical to SEQ ID NO: 30351
  CDS (1)..(1527)

SEQ ID NO: 43595 - protein, 508 aa, Xenopus tropicalis; identical to SEQ ID NO: 30352

SEQ ID NO: 43596 - DNA, 1641 bp, Neurospora crassa; identical to SEQ ID NO: 30353
  CDS (1)..(1641)

SEQ ID NO: 43597 - protein, 546 aa, Neurospora crassa; identical to SEQ ID NO: 30354

SEQ ID NO: 43598 - DNA, 1578 bp, Apis mellifera; identical to SEQ ID NO: 30355
  CDS (1)..(1578)

SEQ ID NO: 43599 - protein, 525 aa, Apis mellifera; identical to SEQ ID NO: 30356

SEQ ID NO: 43600 - DNA, 1473 bp, Leptospira interrogans serovar Copenhageni str. Fiocruz L1-130; identical to SEQ ID NO: 30357
  CDS (1)..(1473): transl_table=11

SEQ ID NO: 43601 - protein, 490 aa, Leptospira interrogans serovar Copenhageni str. Fiocruz L1-130; identical to SEQ ID NO: 30358

SEQ ID NO: 43602 - DNA, 1392 bp, Thermus thermophilus HB27; identical to SEQ ID NO: 30359
  CDS (1)..(1392): transl_table=11

SEQ ID NO: 43603 - protein, 463 aa, Thermus thermophilus HB27; identical to SEQ ID NO: 30360

SEQ ID NO: 43604 - DNA, 1389 bp, Desulfovibrio vulgaris subsp. vulgaris str. Hildenborough; identical to SEQ ID NO: 30361
  CDS (1)..(1389): transl_table=11

SEQ ID NO: 43605 - protein, 462 aa, Desulfovibrio vulgaris subsp. vulgaris str. Hildenborough; identical to SEQ ID NO: 30362

SEQ ID NO: 43606 - DNA, 1428 bp, Listeria monocytogenes str. 4b F2365; identical to SEQ ID NO: 30363
  CDS (1)..(1428): transl_table=11

SEQ ID NO: 43607 - protein, 475 aa, Listeria monocytogenes str. 4b F2365; identical to SEQ ID NO: 30364

SEQ ID NO: 43608 - DNA, 1383 bp, Picrophilus torridus DSM 9790; identical to SEQ ID NO: 30365
  CDS (1)..(1383): transl_table=11

SEQ ID NO: 43609 - protein, 460 aa, Picrophilus torridus DSM 9790; identical to SEQ ID NO: 30366

SEQ ID NO: 43610 - DNA, 1416 bp, Bacillus anthracis str. Sterne; identical to SEQ ID NO: 30367
  CDS (1)..(1416): transl_table=11

SEQ ID NO: 43611 - protein, 471 aa, Bacillus anthracis str. Sterne; identical to SEQ ID NO: 30368

SEQ ID NO: 43612 - DNA, 1533 bp, Bartonella quintana str. Toulouse; identical to SEQ ID NO: 30369
  CDS (1)..(1533): transl_table=11

SEQ ID NO: 43613 - protein, 510 aa, Bartonella quintana str. Toulouse; identical to SEQ ID NO: 30370

SEQ ID NO: 43614 - DNA, 1527 bp, Bartonella henselae str. Houston-1; identical to SEQ ID NO: 30371
  CDS (1)..(1527): transl_table=11

SEQ ID NO: 43615 - protein, 508 aa, Bartonella henselae str. Houston-1; identical to SEQ ID NO: 30372

SEQ ID NO: 43616 - DNA, 1485 bp, Staphylococcus aureus subsp. aureus MRSA252; identical to SEQ ID NO: 30373
  CDS (1)..(1485): transl_table=11

SEQ ID NO: 43617 - protein, 494 aa, Staphylococcus aureus subsp. aureus MRSA252; identical to SEQ ID NO: 30374

SEQ ID NO: 43618 - DNA, 1539 bp, Acinetobacter sp. ADP1; identical to SEQ ID NO: 30375
  CDS (1)..(1539): transl_table=11

SEQ ID NO: 43619 - protein, 512 aa, Acinetobacter sp. ADP1; identical to SEQ ID NO: 30376

SEQ ID NO: 43620 - DNA, 1518 bp, Erwinia carotovora subsp. atroseptica SCRI1043; identical to SEQ ID NO: 30377
  CDS (1)..(1518): transl_table=11

SEQ ID NO: 43621 - protein, 505 aa, Erwinia carotovora subsp. atroseptica SCRI1043; identical to SEQ ID NO: 30378

SEQ ID NO: 43622 - DNA, 1488 bp, Propionibacterium acnes KPA171202; identical to SEQ ID NO: 30379
  CDS (1)..(1488): transl_table=11

SEQ ID NO: 43623 - protein, 495 aa, Propionibacterium acnes KPA171202; identical to SEQ ID NO: 30380

SEQ ID NO: 43624 - DNA, 1455 bp, Streptococcus pyogenes MGAS10394; identical to SEQ ID NO: 30381
  CDS (1)..(1455): transl_table=11

SEQ ID NO: 43625 - protein, 484 aa, Streptococcus pyogenes MGAS10394; identical to SEQ ID NO: 30382

SEQ ID NO: 43626 - DNA, 1560 bp, Leifsonia xyli subsp. xyli str. CTCB07; identical to SEQ ID NO: 30383
  CDS (1)..(1560): transl_table=11

SEQ ID NO: 43627 - protein, 519 aa, Leifsonia xyli subsp. xyli str. CTCB07; identical to SEQ ID NO: 30384

SEQ ID NO: 43628 - DNA, 1440 bp, Desulfotalea psychrophila LSv54; identical to SEQ ID NO: 30385
  CDS (1)..(1440): transl_table=11

SEQ ID NO: 43629 - protein, 479 aa, Desulfotalea psychrophila LSv54; identical to SEQ ID NO: 30386

SEQ ID NO: 43630 - DNA, 1518 bp, Yersinia pseudotuberculosis IP 32953; identical to SEQ ID NO: 30387
  CDS (1)..(1518): transl_table=11

SEQ ID NO: 43631 - protein, 505 aa, Yersinia pseudotuberculosis IP 32953; identical to SEQ ID NO: 30388

SEQ ID NO: 43632 - DNA, 1488 bp, Symbiobacterium thermophilum IAM 14863; identical to SEQ ID NO: 30389
  CDS (1)..(1488): transl_table=11

SEQ ID NO: 43633 - protein, 495 aa, Symbiobacterium thermophilum IAM 14863; identical to SEQ ID NO: 30390

SEQ ID NO: 43634 - DNA, 1431 bp, Bacillus licheniformis ATCC 14580; identical to SEQ ID NO: 30391
  CDS (1)..(1431): transl_table=11

SEQ ID NO: 43635 - protein, 476 aa, Bacillus licheniformis ATCC 14580; identical to SEQ ID NO: 30392

SEQ ID NO: 43636 - DNA, 1512 bp, Mannheimia succiniciproducens MBEL55E; identical to SEQ ID NO: 30393
  CDS (1)..(1512): transl_table=11

SEQ ID NO: 43637 - protein, 503 aa, Mannheimia succiniciproducens MBEL55E; identical to SEQ ID NO: 30394

SEQ ID NO: 43638 - DNA, 1485 bp, Bacillus licheniformis ATCC 14580; identical to SEQ ID NO: 30395
  CDS (1)..(1485): transl_table=11

SEQ ID NO: 43639 - protein, 494 aa, Bacillus licheniformis ATCC 14580; identical to SEQ ID NO: 30396

SEQ ID NO: 43640 - DNA, 1500 bp, Legionella pneumophila subsp. pneumophila str. Philadelphia 1; identical to SEQ ID NO: 30397
  CDS (1)..(1500): transl_table=11

SEQ ID NO: 43641 - protein, 499 aa, Legionella pneumophila subsp. pneumophila str. Philadelphia 1; identical to SEQ ID NO: 30398

SEQ ID NO: 43642 - DNA, 1407 bp, Bacteroides fragilis YCH46; identical to SEQ ID NO: 30399
  CDS (1)..(1407): transl_table=11

SEQ ID NO: 43643 - protein, 468 aa, Bacteroides fragilis YCH46; identical to SEQ ID NO: 30400

SEQ ID NO: 43644 - DNA, 1884 bp, Bacteroides fragilis YCH46; identical to SEQ ID NO: 30401
  CDS (1)..(1884): transl_table=11

SEQ ID NO: 43645 - protein, 627 aa, Bacteroides fragilis YCH46; identical to SEQ ID NO: 30402

SEQ ID NO: 43646 - DNA, 1536 bp, Burkholderia mallei ATCC 23344; identical to SEQ ID NO: 30403
  CDS (1)..(1536): transl_table=11

SEQ ID NO: 43647 - protein, 511 aa, Burkholderia mallei ATCC 23344; identical to SEQ ID NO: 30404

SEQ ID NO: 43648 - DNA, 1536 bp, Burkholderia pseudomallei K96243; identical to SEQ ID NO: 30405
  CDS (1)..(1536): transl_table=11

SEQ ID NO: 43649 - protein, 511 aa, Burkholderia pseudomallei K96243; identical to SEQ ID NO: 30406

SEQ ID NO: 43650 - DNA, 1509 bp, Methylococcus capsulatus str. Bath; identical to SEQ ID NO: 30407
  CDS (1)..(1509): transl_table=11

SEQ ID NO: 43651 - protein, 502 aa, Methylococcus capsulatus str. Bath; identical to SEQ ID NO: 30408

SEQ ID NO: 43652 - DNA, 1500 bp, Nocardia farcinica IFM 10152; identical to SEQ ID NO: 30409
  CDS (1)..(1500): transl_table=11

SEQ ID NO: 43653 - protein, 499 aa, Nocardia farcinica IFM 10152; identical to SEQ ID NO: 30410

SEQ ID NO: 43654 - DNA, 1500 bp, Legionella pneumophila str. Paris; identical to SEQ ID NO: 30411
  CDS (1)..(1500): transl_table=11

SEQ ID NO: 43655 - protein, 499 aa, Legionella pneumophila str. Paris; identical to SEQ ID NO: 30412

SEQ ID NO: 43656 - DNA, 1500 bp, Legionella pneumophila str. Lens; identical to SEQ ID NO: 30413
  CDS (1)..(1500): transl_table=11

SEQ ID NO: 43657 - protein, 499 aa, Legionella pneumophila str. Lens; identical to SEQ ID NO: 30414

SEQ ID NO: 43658 - DNA, 1518 bp, Photobacterium profundum SS9; identical to SEQ ID NO: 30415
  CDS (1)..(1518): transl_table=11

SEQ ID NO: 43659 - protein, 505 aa, Photobacterium profundum SS9; identical to SEQ ID NO: 30416

SEQ ID NO: 43660 - DNA, 1443 bp, Haloarcula marismortui ATCC 43049; identical to SEQ ID NO: 30417
  CDS (1)..(1443): transl_table=11

SEQ ID NO: 43661 - protein, 480 aa, Haloarcula marismortui ATCC 43049; identical to SEQ ID NO: 30418

SEQ ID NO: 43662 - DNA, 1440 bp, Streptococcus thermophilus LMG 18311; identical to SEQ ID NO: 30419
  CDS (1)..(1440): transl_table=11

SEQ ID NO: 43663 - protein, 479 aa, Streptococcus thermophilus LMG 18311; identical to SEQ ID NO: 30420

SEQ ID NO: 43664 - DNA, 1413 bp, Geobacillus kaustophilus HTA426; identical to SEQ ID NO: 30421
  CDS (1)..(1413): transl_table=11

SEQ ID NO: 43665 - protein, 470 aa, Geobacillus kaustophilus HTA426; identical to SEQ ID NO: 30422

SEQ ID NO: 43666 - DNA, 1410 bp, Anaplasma marginale str. St. Maries; identical to SEQ ID NO: 30423
  CDS (1)..(1410): transl_table=11

SEQ ID NO: 43667 - protein, 469 aa, Anaplasma marginale str. St. Maries; identical to SEQ ID NO: 30424

SEQ ID NO: 43668 - DNA, 1518 bp, Idiomarina loihiensis L2TR; identical to SEQ ID NO: 30425
  CDS (1)..(1518): transl_table=11

SEQ ID NO: 43669 - protein, 505 aa, Idiomarina loihiensis L2TR; identical to SEQ ID NO: 30426

SEQ ID NO: 43670 - DNA, 1527 bp, Azoarcus sp. EbN1; identical to SEQ ID NO: 30427
  CDS (1)..(1527): transl_table=11

SEQ ID NO: 43671 - protein, 508 aa, Azoarcus sp. EbN1; identical to SEQ ID NO: 30428

SEQ ID NO: 43672 - DNA, 1527 bp, Zymomonas mobilis subsp. mobilis ZM4; identical to SEQ ID NO: 30429
  CDS (1)..(1527): transl_table=11

SEQ ID NO: 43673 - protein, 508 aa, Zymomonas mobilis subsp. mobilis ZM4; identical to SEQ ID NO: 30430

SEQ ID NO: 43674 - DNA, 1473 bp, Silicibacter pomeroyi DSS-3; identical to SEQ ID NO: 30431
  CDS (1)..(1473): transl_table=11

SEQ ID NO: 43675 - protein, 490 aa, Silicibacter pomeroyi DSS-3; identical to SEQ ID NO: 30432

SEQ ID NO: 43676 - DNA, 1491 bp, Francisella tularensis subsp. tularensis SCHU S4; identical to SEQ ID NO: 30433
  CDS (1)..(1491): transl_table=11

SEQ ID NO: 43677 - protein, 496 aa, Francisella tularensis subsp. tularensis SCHU S4; identical to SEQ ID NO: 30434

SEQ ID NO: 43678 - DNA, 1413 bp, Bacillus clausii KSM-K16; identical to SEQ ID NO: 30435
  CDS (1)..(1413): transl_table=11

SEQ ID NO: 43679 - protein, 470 aa, Bacillus clausii KSM-K16; identical to SEQ ID NO: 30436

SEQ ID NO: 43680 - DNA, 1338 bp, Campylobacter jejuni RM1221; identical to SEQ ID NO: 30437
  CDS (1)..(1338): transl_table=11

SEQ ID NO: 43681 - protein, 445 aa, Campylobacter jejuni RM1221; identical to SEQ ID NO: 30438

SEQ ID NO: 43682 - DNA, 1401 bp, Ehrlichia ruminantium str. Welgevonden; identical to SEQ ID NO: 30439
  CDS (1)..(1401): transl_table=11

SEQ ID NO: 43683 - protein, 466 aa, Ehrlichia ruminantium str. Welgevonden; identical to SEQ ID NO: 30440

SEQ ID NO: 43684 - DNA, 1419 bp, Dehalococcoides ethenogenes 195; identical to SEQ ID NO: 30441
  CDS (1)..(1419): transl_table=11

SEQ ID NO: 43685 - protein, 472 aa, Dehalococcoides ethenogenes 195; identical to SEQ ID NO: 30442

SEQ ID NO: 43686 - DNA, 1350 bp, Thermococcus kodakarensis KOD1; identical to SEQ ID NO: 30443
  CDS (1)..(1350): transl_table=11

SEQ ID NO: 43687 - protein, 449 aa, Thermococcus kodakarensis KOD1; identical to SEQ ID NO: 30444

SEQ ID NO: 43688 - DNA, 1482 bp, Gluconobacter oxydans 621H; identical to SEQ ID NO: 30445
  CDS (1)..(1482): transl_table=11

SEQ ID NO: 43689 - protein, 493 aa, Gluconobacter oxydans 621H; identical to SEQ ID NO: 30446

SEQ ID NO: 43690 - DNA, 1467 bp, Lactobacillus acidophilus NCFM; identical to SEQ ID NO: 30447
  CDS (1)..(1467): transl_table=11

SEQ ID NO: 43691 - protein, 488 aa, Lactobacillus acidophilus NCFM; identical to SEQ ID NO: 30448

SEQ ID NO: 43692 - DNA, 1401 bp, Ehrlichia ruminantium str. Gardel; identical to SEQ ID NO: 30449
  CDS (1)..(1401): transl_table=11

SEQ ID NO: 43693 - protein, 466 aa, Ehrlichia ruminantium str. Gardel; identical to SEQ ID NO: 30450

SEQ ID NO: 43694 - DNA, 1386 bp, Wolbachia endosymbiont strain TRS of Brugia malayi; identical to SEQ ID NO: 30451
  CDS (1)..(1386): transl_table=11

SEQ ID NO: 43695 - protein, 461 aa, Wolbachia endosymbiont strain TRS of Brugia malayi; identical to SEQ ID NO: 30452

SEQ ID NO: 43696 - DNA, 1467 bp, Xanthomonas oryzae pv. oryzae KACC10331; identical to SEQ ID NO: 30453
  CDS (1)..(1467): transl_table=11

SEQ ID NO: 43697 - protein, 488 aa, Xanthomonas oryzae pv. oryzae KACC10331; identical to SEQ ID NO: 30454

SEQ ID NO: 43698 - DNA, 1515 bp, Vibrio fischeri ES114; identical to SEQ ID NO: 30455
  CDS (1)..(1515): transl_table=11

SEQ ID NO: 43699 - protein, 504 aa, Vibrio fischeri ES114; identical to SEQ ID NO: 30456

SEQ ID NO: 43700 - DNA, 1545 bp, Neisseria gonorrhoeae FA 1090; identical to SEQ ID NO: 30457
  CDS (1)..(1545): transl_table=11

SEQ ID NO: 43701 - protein, 514 aa, Neisseria gonorrhoeae FA 1090; identical to SEQ ID NO: 30458

SEQ ID NO: 43702 - DNA, 1458 bp, Brucella abortus biovar 1 str. 9-941; identical to SEQ ID NO: 30459
  CDS (1)..(1458): transl_table=11

SEQ ID NO: 43703 - protein, 485 aa, Brucella abortus biovar 1 str. 9-941; identical to SEQ ID NO: 30460

SEQ ID NO: 43704 - DNA, 1485 bp, Corynebacterium glutamicum ATCC 13032; identical to SEQ ID NO: 30461
  CDS (1)..(1485): transl_table=11

SEQ ID NO: 43705 - protein, 494 aa, Corynebacterium glutamicum ATCC 13032; identical to SEQ ID NO: 30462

SEQ ID NO: 43706 - DNA, 1509 bp, Pseudomonas syringae pv. syringae B728a; identical to SEQ ID NO: 30463
  CDS (1)..(1509): transl_table=11

SEQ ID NO: 43707 - protein, 502 aa, Pseudomonas syringae pv. syringae B728a; identical to SEQ ID NO: 30464

SEQ ID NO: 43708 - DNA, 1518 bp, Haemophilus influenzae 86-028NP; identical to SEQ ID NO: 30465
  CDS (1)..(1518): transl_table=11

SEQ ID NO: 43709 - protein, 505 aa, Haemophilus influenzae 86-028NP; identical to SEQ ID NO: 30466

SEQ ID NO: 43710 - DNA, 1488 bp, Corynebacterium jeikeium K411; identical to SEQ ID NO: 30467
  CDS (1)..(1488): transl_table=11

SEQ ID NO: 43711 - protein, 495 aa, Corynebacterium jeikeium K411; identical to SEQ ID NO: 30468

SEQ ID NO: 43712 - DNA, 1485 bp, Staphylococcus haemolyticus JCSC1435; identical to SEQ ID NO: 30469
  CDS (1)..(1485): transl_table=11

SEQ ID NO: 43713 - protein, 494 aa, Staphylococcus haemolyticus JCSC1435; identical to SEQ ID NO: 30470

SEQ ID NO: 43714 - DNA, 1335 bp, Sulfolobus acidocaldarius DSM 639; identical to SEQ ID NO: 30471
  CDS (1)..(1335): transl_table=11

SEQ ID NO: 43715 - protein, 444 aa, Sulfolobus acidocaldarius DSM 639; identical to SEQ ID NO: 30472

SEQ ID NO: 43716 - DNA, 1215 bp, Sulfolobus acidocaldarius DSM 639; identical to SEQ ID NO: 30473
  CDS (1)..(1215): transl_table=11

SEQ ID NO: 43717 - protein, 404 aa, Sulfolobus acidocaldarius DSM 639; identical to SEQ ID NO: 30474

SEQ ID NO: 43718 - DNA, 1506 bp, Pseudomonas fluorescens Pf-5; identical to SEQ ID NO: 30475
  CDS (1)..(1506): transl_table=11

SEQ ID NO: 43719 - protein, 501 aa, Pseudomonas fluorescens Pf-5; identical to SEQ ID NO: 30476

SEQ ID NO: 43720 - DNA, 1536 bp, Psychrobacter arcticum 273-4; identical to SEQ ID NO: 30477
  CDS (1)..(1536): transl_table=11

SEQ ID NO: 43721 - protein, 511 aa, Psychrobacter arcticum 273-4; identical to SEQ ID NO: 30478

SEQ ID NO: 43722 - DNA, 1482 bp, Candidatus Pelagibacter ubique HTCC1062; identical to SEQ ID NO: 30479
  CDS (1)..(1482): transl_table=11

SEQ ID NO: 43723 - protein, 493 aa, Candidatus Pelagibacter ubique HTCC1062; identical to SEQ ID NO: 30480

SEQ ID NO: 43724 - DNA, 1518 bp, Colwellia psychrerythraea 34H; identical to SEQ ID NO: 30481
  CDS (1)..(1518): transl_table=11

SEQ ID NO: 43725 - protein, 505 aa, Colwellia psychrerythraea 34H; identical to SEQ ID NO: 30482

SEQ ID NO: 43726 - DNA, 1509 bp, Pseudomonas syringae pv. phaseolicola 1448A; identical to SEQ ID NO: 30483
  CDS (1)..(1509): transl_table=11

SEQ ID NO: 43727 - protein, 502 aa, Pseudomonas syringae pv. phaseolicola 1448A; identical to SEQ ID NO: 30484

SEQ ID NO: 43728 - DNA, 1512 bp, Streptococcus pyogenes MGAS6180; identical to SEQ ID NO: 30485
  CDS (1)..(1512): transl_table=11

SEQ ID NO: 43729 - protein, 503 aa, Streptococcus pyogenes MGAS6180; identical to SEQ ID NO: 30486

SEQ ID NO: 43730 - DNA, 1455 bp, Streptococcus pyogenes MGAS5005; identical to SEQ ID NO: 30487
  CDS (1)..(1455): transl_table=11

SEQ ID NO: 43731 - protein, 484 aa, Streptococcus pyogenes MGAS5005; identical to SEQ ID NO: 30488

SEQ ID NO: 43732 - DNA, 1518 bp, Dechloromonas aromatica RCB; identical to SEQ ID NO: 30489
  CDS (1)..(1518): transl_table=11

SEQ ID NO: 43733 - protein, 505 aa, Dechloromonas aromatica RCB; identical to SEQ ID NO: 30490

SEQ ID NO: 43734 - DNA, 1455 bp, Thermobifida fusca YX; identical to SEQ ID NO: 30491
  CDS (1)..(1455): transl_table=11

SEQ ID NO: 43735 - protein, 484 aa, Thermobifida fusca YX; identical to SEQ ID NO: 30492

SEQ ID NO: 43736 - DNA, 1527 bp, Ralstonia eutropha JMP134; identical to SEQ ID NO: 30493
  CDS (1)..(1527): transl_table=11

SEQ ID NO: 43737 - protein, 508 aa, Ralstonia eutropha JMP134; identical to SEQ ID NO: 30494

SEQ ID NO: 43738 - DNA, 1488 bp, Staphylococcus saprophyticus subsp. saprophyticus ATCC 15305; identical to SEQ ID NO: 30495
  CDS (1)..(1488): transl_table=11

SEQ ID NO: 43739 - protein, 495 aa, Staphylococcus saprophyticus subsp. saprophyticus ATCC 15305; identical to SEQ ID NO: 30496

SEQ ID NO: 43740 - DNA, 1389 bp, Ehrlichia canis str. Jake; identical to SEQ ID NO: 30497
  CDS (1)..(1389): transl_table=11

SEQ ID NO: 43741 - protein, 462 aa, Ehrlichia canis str. Jake; identical to SEQ ID NO: 30498

SEQ ID NO: 43742 - DNA, 1434 bp, Methanosarcina barkeri str. fusaro; identical to SEQ ID NO: 30499
  CDS (1)..(1434): transl_table=11

SEQ ID NO: 43743 - protein, 477 aa, Methanosarcina barkeri str. fusaro; identical to SEQ ID NO: 30500

SEQ ID NO: 43744 - DNA, 1419 bp, Dehalococcoides sp. CBDB1; identical to SEQ ID NO: 30501
  CDS (1)..(1419): transl_table=11

SEQ ID NO: 43745 - protein, 472 aa, Dehalococcoides sp. CBDB1; identical to SEQ ID NO: 30502

SEQ ID NO: 43746 - DNA, 1521 bp, Thiobacillus denitrificans ATCC 25259; identical to SEQ ID NO: 30503
  CDS (1)..(1521): transl_table=11

SEQ ID NO: 43747 - protein, 506 aa, Thiobacillus denitrificans ATCC 25259; identical to SEQ ID NO: 30504

SEQ ID NO: 43748 - DNA, 1518 bp, Haemophilus influenzae R2866; identical to SEQ ID NO: 30505
  CDS (1)..(1518)

SEQ ID NO: 43749 - protein, 505 aa, Haemophilus influenzae R2866; identical to SEQ ID NO: 30506

SEQ ID NO: 43750 - DNA, 1515 bp, Microbulbifer degradans 2-40; identical to SEQ ID NO: 30507
  CDS (1)..(1515)

SEQ ID NO: 43751 - protein, 504 aa, Microbulbifer degradans 2-40; identical to SEQ ID NO: 30508

SEQ ID NO: 43752 - DNA, 1341 bp, Campylobacter upsaliensis RM3195; identical to SEQ ID NO: 30509
  CDS (1)..(1341): transl_table=11

SEQ ID NO: 43753 - protein, 446 aa, Campylobacter upsaliensis RM3195; identical to SEQ ID NO: 30510

SEQ ID NO: 43754 - DNA, 1521 bp, Lactococcus lactis subsp. cremoris SK11; identical to SEQ ID NO: 30511
  CDS (1)..(1521)

SEQ ID NO: 43755 - protein, 506 aa, Lactococcus lactis subsp. cremoris SK11; identical to SEQ ID NO: 30512

SEQ ID NO: 43756 - DNA, 1023 bp, Chromohalobacter salexigens DSM 3043; identical to SEQ ID NO: 30513
  CDS (1)..(1023): transl_table=11

SEQ ID NO: 43757 - protein, 340 aa, Chromohalobacter salexigens DSM 3043; identical to SEQ ID NO: 30514

SEQ ID NO: 43758 - DNA, 1515 bp, Shewanella amazonensis SB2B; identical to SEQ ID NO: 30515
  CDS (1)..(1515): transl_table=11

SEQ ID NO: 43759 - protein, 504 aa, Shewanella amazonensis SB2B; identical to SEQ ID NO: 30516

SEQ ID NO: 43760 - DNA, 1497 bp, Prosthecochloris aestuarii DSM 271; identical to SEQ ID NO: 30517
  CDS (1)..(1497): transl_table=11

SEQ ID NO: 43761 - protein, 498 aa, Prosthecochloris aestuarii DSM 271; identical to SEQ ID NO: 30518

SEQ ID NO: 43762 - DNA, 1515 bp, Shewanella frigidimarina NCIMB 400; identical to SEQ ID NO: 30519
  CDS (1)..(1515): transl_table=11

SEQ ID NO: 43763 - protein, 504 aa, Shewanella frigidimarina NCIMB 400; identical to SEQ ID NO: 30520

SEQ ID NO: 43764 - DNA, 1704 bp, Vigna unguiculata; identical to SEQ ID NO: 30521
  CDS (1)..(1704)

SEQ ID NO: 43765 - protein, 567 aa, Vigna unguiculata; identical to SEQ ID NO: 30522

SEQ ID NO: 43766 - DNA, 1473 bp, Corynebacterium ammoniagenes; identical to SEQ ID NO: 30523
  CDS (1)..(1473): transl_table=11

SEQ ID NO: 43767 - protein, 490 aa, Corynebacterium ammoniagenes; identical to SEQ ID NO: 30524

SEQ ID NO: 43768 - DNA, 1536 bp, Arabidopsis thaliana; identical to SEQ ID NO: 30525
  CDS (1)..(1536)

SEQ ID NO: 43769 - protein, 511 aa, Arabidopsis thaliana; identical to SEQ ID NO: 30526

SEQ ID NO: 43770 - DNA, 1835 bp, Mus musculus; identical to SEQ ID NO: 30527
  CDS (120)..(1673)

SEQ ID NO: 43771 - protein, 517 aa, Mus musculus; identical to SEQ ID NO: 30528

SEQ ID NO: 43772 - DNA, 1677 bp, Mus musculus; identical to SEQ ID NO: 30529
  CDS (1)..(1677)

SEQ ID NO: 43773 - protein, 558 aa, Mus musculus; identical to SEQ ID NO: 30530

SEQ ID NO: 43774 - DNA, 1554 bp, Mus musculus; identical to SEQ ID NO: 30531
  CDS (1)..(1554)

SEQ ID NO: 43775 - protein, 517 aa, Mus musculus; identical to SEQ ID NO: 30532

SEQ ID NO: 43776 - DNA, 1554 bp, Homo sapiens; identical to SEQ ID NO: 30533
  CDS (1)..(1554)

SEQ ID NO: 43777 - protein, 517 aa, Homo sapiens; identical to SEQ ID NO: 30534

SEQ ID NO: 43778 - DNA, 1686 bp, Arabidopsis thaliana; identical to SEQ ID NO: 30535
  CDS (1)..(1686)

SEQ ID NO: 43779 - protein, 561 aa, Arabidopsis thaliana; identical to SEQ ID NO: 30536

SEQ ID NO: 43780 - DNA, 1527 bp, Brachydanio rerio; identical to SEQ ID NO: 30537
  CDS (1)..(1527)

SEQ ID NO: 43781 - protein, 508 aa, Brachydanio rerio; identical to SEQ ID NO: 30538

SEQ ID NO: 43782 - DNA, 1722 bp, Nicotiana tabacum; identical to SEQ ID NO: 30539
  CDS (1)..(1722)

SEQ ID NO: 43783 - protein, 573 aa, Nicotiana tabacum; identical to SEQ ID NO: 30540

SEQ ID NO: 43784 - DNA, 1641 bp, Neurospora crassa; identical to SEQ ID NO: 30541
  CDS (1)..(1641)

SEQ ID NO: 43785 - protein, 546 aa, Neurospora crassa; identical to SEQ ID NO: 30542

SEQ ID NO: 43786 - DNA, 1620 bp, Drosophila virilis; identical to SEQ ID NO: 30543
  CDS (1)..(1620)

SEQ ID NO: 43787 - protein, 539 aa, Drosophila virilis; identical to SEQ ID NO: 30544

SEQ ID NO: 43788 - DNA, 1635 bp, Drosophila virilis; identical to SEQ ID NO: 30545
  CDS (1)..(1635)

SEQ ID NO: 43789 - protein, 544 aa, Drosophila virilis; identical to SEQ ID NO: 30546

SEQ ID NO: 43790 - DNA, 1470 bp, Thermoplasma volcanium; identical to SEQ ID NO: 30547
  CDS (1)..(1470): transl_table=11

SEQ ID NO: 43791 - protein, 489 aa, Thermoplasma volcanium; identical to SEQ ID NO: 30548

SEQ ID NO: 43792 - DNA, 1536 bp, Mycobacterium smegmatis; identical to SEQ ID NO: 30549
  CDS (1)..(1536): transl_table=11

SEQ ID NO: 43793 - protein, 511 aa, Mycobacterium smegmatis; identical to SEQ ID NO: 30550

SEQ ID NO: 43794 - DNA, 1527 bp, Zymomonas mobilis; identical to SEQ ID NO: 30551
  CDS (1)..(1527): transl_table=11

SEQ ID NO: 43795 - protein, 508 aa, Zymomonas mobilis; identical to SEQ ID NO: 30552

SEQ ID NO: 43796 - DNA, 1473 bp, Corynebacterium ammoniagenes; identical to SEQ ID NO: 30553
  CDS (1)..(1473): transl_table=11

SEQ ID NO: 43797 - protein, 490 aa, Corynebacterium ammoniagenes; identical to SEQ ID NO: 30554

SEQ ID NO: 43798 - DNA, 1521 bp, Lactococcus lactis; identical to SEQ ID NO: 30555
  CDS (1)..(1521): transl_table=11

SEQ ID NO: 43799 - protein, 506 aa, Lactococcus lactis; identical to SEQ ID NO: 30556

SEQ ID NO: 43800 - DNA, 1374 bp, Archaeoglobus fulgidus; identical to SEQ ID NO: 30165
  CDS (1)..(1374)

SEQ ID NO: 43801 - protein, 457 aa, Archaeoglobus fulgidus; identical to SEQ ID NO: 30166

SEQ ID NO: 43802 - DNA, 1431 bp, Bacillus subtilis; identical to SEQ ID NO: 30559
  CDS (1)..(1431): transl_table=11

SEQ ID NO: 43803 - protein, 476 aa, Bacillus subtilis; identical to SEQ ID NO: 30560

SEQ ID NO: 43804 - DNA, 1533 bp, Gallus gallus; identical to SEQ ID NO: 30561
  CDS (1)..(1533)

SEQ ID NO: 43805 - protein, 510 aa, Gallus gallus; identical to SEQ ID NO: 30562

SEQ ID NO: 43806 - DNA, 1641 bp, Drosophila melanogaster; identical to SEQ ID NO: 30563
  CDS (1)..(1641)

SEQ ID NO: 43807 - protein, 546 aa, Drosophila melanogaster; identical to SEQ ID NO: 30564

SEQ ID NO: 43808 - DNA, 1518 bp, Haemophilus influenzae; identical to SEQ ID NO: 30219
  CDS (1)..(1518)

SEQ ID NO: 43809 - protein, 505 aa, Haemophilus influenzae; identical to SEQ ID NO: 30220

SEQ ID NO: 43810 - DNA, 1554 bp, Homo sapiens; identical to SEQ ID NO: 30567
  CDS (1)..(1554)

SEQ ID NO: 43811 - protein, 517 aa, Homo sapiens; identical to SEQ ID NO: 30568

SEQ ID NO: 43812 - DNA, 1416 bp, Methanococcus jannaschii; identical to SEQ ID NO: 30185
  CDS (1)..(1416)

SEQ ID NO: 43813 - protein, 471 aa, Methanococcus jannaschii; identical to SEQ ID NO: 30186

SEQ ID NO: 43814 - DNA, 1425 bp, Methanobacterium thermoautotrophicum; identical to SEQ ID NO: 30571
  CDS (1)..(1425): transl_table=11

SEQ ID NO: 43815 - protein, 474 aa, Methanobacterium thermoautotrophicum; identical to SEQ ID NO: 30572

SEQ ID NO: 43816 - DNA, 1584 bp, Mycobacterium bovis; identical to SEQ ID NO: 30573
  CDS (1)..(1584): transl_table=11

SEQ ID NO: 43817 - protein, 527 aa, Mycobacterium bovis; identical to SEQ ID NO: 30574

SEQ ID NO: 43818 - DNA, 1671 bp, Mycobacterium leprae; identical to SEQ ID NO: 30575
  CDS (1)..(1671): transl_table=11

SEQ ID NO: 43819 - protein, 556 aa, Mycobacterium leprae; identical to SEQ ID NO: 30576

SEQ ID NO: 43820 - DNA, 1344 bp, Pyrococcus abyssi; identical to SEQ ID NO: 30577
  CDS (1)..(1344): transl_table=11

SEQ ID NO: 43821 - protein, 447 aa, Pyrococcus abyssi; identical to SEQ ID NO: 30578

SEQ ID NO: 43822 - DNA, 1350 bp, Pyrococcus horikoshii; identical to SEQ ID NO: 30579
  CDS (1)..(1350): transl_table=11

SEQ ID NO: 43823 - protein, 449 aa, Pyrococcus horikoshii; identical to SEQ ID NO: 30580

SEQ ID NO: 43824 - DNA, 1554 bp, Rattus norvegicus; identical to SEQ ID NO: 30581
  CDS (1)..(1554)

SEQ ID NO: 43825 - protein, 517 aa, Rattus norvegicus; identical to SEQ ID NO: 30582

SEQ ID NO: 43826 - DNA, 1497 bp, Rhizobium etli; identical to SEQ ID NO: 30583
  CDS (1)..(1497): transl_table=11

SEQ ID NO: 43827 - protein, 498 aa, Rhizobium etli; identical to SEQ ID NO: 30584

SEQ ID NO: 43828 - DNA, 1533 bp, Saccharomyces kluyveri; identical to SEQ ID NO: 30585
  CDS (1)..(1533)

SEQ ID NO: 43829 - protein, 510 aa, Saccharomyces kluyveri; identical to SEQ ID NO: 30586

SEQ ID NO: 43830 - DNA, 1602 bp, Schizosaccharomyces pombe; identical to SEQ ID NO: 30587
  CDS (1)..(1602)

SEQ ID NO: 43831 - protein, 533 aa, Schizosaccharomyces pombe; identical to SEQ ID NO: 30588

SEQ ID NO: 43832 - DNA, 1710 bp, Glycine max; identical to SEQ ID NO: 30589
  CDS (1)..(1710)

SEQ ID NO: 43833 - protein, 569 aa, Glycine max; identical to SEQ ID NO: 30590

SEQ ID NO: 43834 - DNA, 1485 bp, Staphylococcus aureus; identical to SEQ ID NO: 30591
  CDS (1)..(1485): transl_table=11

SEQ ID NO: 43835 - protein, 494 aa, Staphylococcus aureus; identical to SEQ ID NO: 30592

SEQ ID NO: 43836 - DNA, 1482 bp, Synechococcus sp; identical to SEQ ID NO: 30593
  CDS (1)..(1482): transl_table=11

SEQ ID NO: 43837 - protein, 493 aa, Synechococcus sp; identical to SEQ ID NO: 30594

SEQ ID NO: 43838 - DNA, 1488 bp, Synechocystis sp; identical to SEQ ID NO: 30595
  CDS (1)..(1488): transl_table=11

SEQ ID NO: 43839 - protein, 495 aa, Synechocystis sp; identical to SEQ ID NO: 30596

SEQ ID NO: 43840 - DNA, 1533 bp, Saccharomyces cerevisiae; identical to SEQ ID NO: 30597
  CDS (1)..(1533)

SEQ ID NO: 43841 - protein, 510 aa, Saccharomyces cerevisiae; identical to SEQ ID NO: 30598

SEQ ID NO: 43842 - DNA, 23 bp, Artificial sequence
  Primer sequence
atgtgcggtattgtcggtatcgc

SEQ ID NO: 43843 - DNA, 27 bp, Artificial sequence
  Primer sequence
ttatccttcgttatgcatttcgagatt

SEQ ID NO: 43844 - protein, 641 aa, Artificial sequence; identical to SEQ ID NO: 30601
  Consensus
  Variant (4)..(4): Xaa in position 4 is any amino acid
  Variant (7)..(17): Xaa in position 7 to 17 is any amino acid
  Variant (18)..(33): Xaa in position 18 to 33 is any or no amino acid
  Variant (36)..(37): Xaa in position 36 to 37 is any amino acid
  Variant (45)..(45): Xaa in position 45 is any amino acid
  Variant (49)..(55): Xaa in position 49 to 55 is any amino acid
  Variant (56)..(67): Xaa in position 56 to 67 is any or no amino acid
  Variant (69)..(70): Xaa in position 69 to 70 is any amino acid
  Variant (74)..(75): Xaa in position 74 to 75 is any amino acid
  Variant (78)..(79): Xaa in position 78 to 79 is any amino acid
  Variant (80)..(88): Xaa in position 80 to 88 is any or no amino acid
  Variant (90)..(103): Xaa in position 90 to 103 is any or no amino acid
  Variant (105)..(105): Xaa in position 105 is any or no amino acid
  Variant (107)..(108): Xaa in position 107 to 108 is any or no amino acid
  Variant (113)..(113): Xaa in position 113 is any amino acid
  Variant (116)..(116): Xaa in position 116 is any amino acid
  Variant (118)..(118): Xaa in position 118 is any amino acid
  Variant (120)..(123): Xaa in position 120 to 123 is any amino acid
  Variant (124)..(129): Xaa in position 124 to 129 is any or no amino acid
  Variant (132)..(139): Xaa in position 132 to 139 is any or no amino acid
  Variant (141)..(142): Xaa in position 141 to 142 is any or no amino acid
  Variant (144)..(144): Xaa in position 144 is any or no amino acid
  Variant (146)..(146): Xaa in position 146 is any or no amino acid
  Variant (152)..(152): Xaa in position 152 is any or no amino acid
  Variant (154)..(155): Xaa in position 154 to 155 is any amino acid
  Variant (156)..(156): Xaa in position 156 is any or no amino acid
  Variant (158)..(163): Xaa in position 158 to 163 is any or no amino acid
  Variant (165)..(180): Xaa in position 165 to 180 is any or no amino acid
  Variant (182)..(184): Xaa in position 182 to 184 is any or no amino acid
  Variant (191)..(192): Xaa in position 191 to 192 is any amino acid
  Variant (194)..(205): Xaa in position 194 to 205 is any amino acid
  Variant (206)..(228): Xaa in position 206 to 228 is any or no amino acid
  Variant (233)..(235): Xaa in position 233 to 235 is any amino acid
  Variant (236)..(236): Xaa in position 236 is any or no amino acid
  Variant (238)..(241): Xaa in position 238 to 241 is any amino acid
  Variant (243)..(243): Xaa in position 243 is any amino acid
  Variant (245)..(245): Xaa in position 245 is any amino acid
  Variant (249)..(249): Xaa in position 249 is any amino acid
  Variant (251)..(251): Xaa in position 251 is any amino acid
  Variant (255)..(255): Xaa in position 255 is any amino acid
  Variant (258)..(261): Xaa in position 258 to 261 is any amino acid
  Variant (262)..(277): Xaa in position 262 to 277 is any or no amino acid
  Variant (285)..(285): Xaa in position 285 is any amino acid
  Variant (287)..(288): Xaa in position 287 to 288 is any amino acid
  Variant (289)..(289): Xaa in position 289 is any or no amino acid
  Variant (291)..(293): Xaa in position 291 to 293 is any amino acid
  Variant (294)..(299): Xaa in position 294 to 299 is any or no amino acid
  Variant (303)..(303): Xaa in position 303 is any amino acid
  Variant (307)..(307): Xaa in position 307 is any amino acid
  Variant (309)..(309): Xaa in position 309 is any amino acid
  Variant (311)..(326): Xaa in position 311 to 326 is any amino acid
  Variant (327)..(343): Xaa in position 327 to 343 is any or no amino acid
  Variant (345)..(345): Xaa in position 345 is any amino acid
  Variant (357)..(357): Xaa in position 357 is any or no amino acid
  Variant (359)..(361): Xaa in position 359 to 361 is any amino acid
  Variant (362)..(362): Xaa in position 362 is any or no amino acid
  Variant (365)..(366): Xaa in position 365 to 366 is any amino acid
  Variant (368)..(370): Xaa in position 368 to 370 is any amino acid
  Variant (372)..(373): Xaa in position 372 to 373 is any amino acid
  Variant (376)..(382): Xaa in position 376 to 382 is any amino acid
  Variant (383)..(390): Xaa in position 383 to 390 is any or no amino acid
  Variant (395)..(395): Xaa in position 395 is any amino acid
  Variant (400)..(402): Xaa in position 400 to 402 is any amino acid
  Variant (406)..(407): Xaa in position 406 to 407 is any amino acid
  Variant (409)..(412): Xaa in position 409 to 412 is any amino acid
  Variant (414)..(414): Xaa in position 414 is any amino acid
  Variant (415)..(443): Xaa in position 415 to 443 is any or no amino acid
  Variant (445)..(446): Xaa in position 445 to 446 is any amino acid
  Variant (448)..(448): Xaa in position 448 is any amino acid
  Variant (452)..(452): Xaa in position 452 is any amino acid
  Variant (460)..(460): Xaa in position 460 is any amino acid
  Variant (462)..(463): Xaa in position 462 to 463 is any or no amino acid
  Variant (465)..(466): Xaa in position 465 to 466 is any or no amino acid
  Variant (468)..(470): Xaa in position 468 to 470 is any amino acid
  Variant (473)..(473): Xaa in position 473 is any amino acid
  Variant (475)..(477): Xaa in position 475 to 477 is any amino acid
  Variant (479)..(483): Xaa in position 479 to 483 is any amino acid
  Variant (484)..(484): Xaa in position 484 is any or no amino acid
  Variant (486)..(486): Xaa in position 486 is any amino acid
  Variant (500)..(502): Xaa in position 500 to 502 is any amino acid
  Variant (505)..(505): Xaa in position 505 is any amino acid
  Variant (507)..(507): Xaa in position 507 is any amino acid
  Variant (509)..(509): Xaa in position 509 is any amino acid
  Variant (512)..(512): Xaa in position 512 is any or no amino acid
  Variant (514)..(515): Xaa in position 514 to 515 is any amino acid
  Variant (518)..(520): Xaa in position 518 to 520 is any amino acid
  Variant (524)..(524): Xaa in position 524 is any amino acid
  Variant (526)..(527): Xaa in position 526 to 527 is any amino acid
  Variant (529)..(530): Xaa in position 529 to 530 is any amino acid
  Variant (535)..(540): Xaa in position 535 to 540 is any amino acid
  Variant (544)..(550): Xaa in position 544 to 550 is any amino acid
  Variant (551)..(577): Xaa in position 551 to 577 is any or no amino acid
  Variant (579)..(581): Xaa in position 579 to 581 is any amino acid
  Variant (584)..(584): Xaa in position 584 is any amino acid
  Variant (586)..(586): Xaa in position 586 is any amino acid
  Variant (588)..(588): Xaa in position 588 is any amino acid
  Variant (590)..(591): Xaa in position 590 to 591 is any amino acid
  Variant (593)..(594): Xaa in position 593 to 594 is any amino acid
  Variant (596)..(597): Xaa in position 596 to 597 is any amino acid
  Variant (600)..(608): Xaa in position 600 to 608 is any amino acid
  Variant (609)..(638): Xaa in position 609 to 638 is any or no amino acid
  Variant (640)..(640): Xaa in position 640 is any amino acid

SEQ ID NO: 43845 - protein, 15 aa, Artificial sequence
  Consensus
  Variant (2)..(3): Xaa in position 2 to 3 is any or no amino acid
  Variant (5)..(5): Xaa in position 5 is any or no amino acid
  Variant (11)..(11): Xaa in position 11 is Asp or Glu
  Variant (12)..(12): Xaa in position 12 is Ala, Gly or Ser
  Variant (13)..(13): Xaa in position 13 is Ala, Ser or Thr
LXXLXQHRGQXXXGI

SEQ ID NO: 43846 - protein, 41 aa, Artificial sequence; identical to SEQ ID NO: 30603
  Consensus
  Variant (3)..(3): Xaa in position 3 is Ala, Pro or Ser
  Variant (5)..(5): Xaa in position 5 is Ala, Gln, Ser or Thr
  Variant (7)..(13): Xaa in position 7 to 13 is any amino acid
  Variant (14)..(14): Xaa in position 14 is any or no amino acid
  Variant (17)..(28): Xaa in position 17 to 28 is any amino acid
  Variant (29)..(30): Xaa in position 29 to 30 is any or no amino acid
  Variant (34)..(34): Xaa in position 34 is Asp, Glu or Asn
  Variant (35)..(35): Xaa in position 35 is Phe, Ile or Leu
  Variant (36)..(36): Xaa in position 36 is any amino acid
  Variant (38)..(40): Xaa in position 38 to 40 is any amino acid
  Variant (41)..(41): Xaa in position 41 is Ile, Leu or Val

SEQ ID NO: 43847 - protein, 41 aa, Artificial sequence; identical to SEQ ID NO: 30603
  Consensus
  Variant (3)..(3): Xaa in position 3 is Ala, Pro or Ser
  Variant (5)..(5): Xaa in position 5 is Ala, Gln, Ser or Thr
  Variant (7)..(13): Xaa in position 7 to 13 is any amino acid
  Variant (14)..(14): Xaa in position 14 is any or no amino acid
  Variant (17)..(28): Xaa in position 17 to 28 is any amino acid
  Variant (29)..(30): Xaa in position 29 to 30 is any or no amino acid
  Variant (34)..(34): Xaa in position 34 is Asp, Glu or Asn
  Variant (35)..(35): Xaa in position 35 is Phe, Ile or Leu
  Variant (36)..(36): Xaa in position 36 is any amino acid
  Variant (38)..(40): Xaa in position 38 to 40 is any amino acid
  Variant (41)..(41): Xaa in position 41 is Ile, Leu or Val

SEQ ID NO: 43848 - protein, 20 aa, Artificial sequence
  Consensus
  Variant (3)..(3): Xaa in position 3 is Ser or Thr
  Variant (4)..(4): Xaa in position 4 is any amino acid
  Variant (5)..(5): Xaa in position 5 is Ala, Gly, Ser or Val
  Variant (6)..(6): Xaa in position 6 is Phe, Ile, Leu or Val
  Variant (7)..(14): Xaa in position 7 to 14 is any amino acid
  Variant (16)..(16): Xaa in position 16 is Asp, Glu, Asn, Gln, Ser or Thr
  Variant (17)..(17): Xaa in position 17 is Phe, Ile, Leu or Val
  Variant (18)..(19): Xaa in position 18 to 19 is any amino acid
SEXXXXXXXXXXXXRXXXXG

SEQ ID NO: 43849 - protein, 28 aa, Artificial sequence
  Consensus
  Variant (2)..(2): Xaa in position 2 is any amino acid
  Variant (3)..(3): Xaa in position 3 is Ile or Val
  Variant (5)..(5): Xaa in position 5 is Phe or Leu
  Variant (6)..(6): Xaa in position 6 is Ala or Ser
  Variant (11)..(11): Xaa in position 11 is any amino acid
  Variant (12)..(12): Xaa in position 12 is Phe, Ile, Leu, Met or Val
  Variant (13)..(16): Xaa in position 13 to 16 is any amino acid
  Variant (17)..(17): Xaa in position 17 is Ile, Leu or Val
  Variant (18)..(20): Xaa in position 18 to 20 is any amino acid
  Variant (22)..(24): Xaa in position 22 to 24 is any amino acid
  Variant (26)..(27): Xaa in position 26 to 27 is any amino acid
EXXYXXRPDSXXXXXXXXXXRXXXGXXL

SEQ ID NO: 43850 - protein, 86 aa, Artificial sequence; identical to SEQ ID NO: 30607
  Consensus
  Variant (5)..(5): Xaa in position 5 is any amino acid
  Variant (7)..(8): Xaa in position 7 to 8 is any amino acid
  Variant (9)..(10): Xaa in position 9 to 10 is any or no amino acid
  Variant (12)..(14): Xaa in position 12 to 14 is any amino acid
  Variant (15)..(15): Xaa in position 15 is Ile or Val
  Variant (16)..(17): Xaa in position 16 to 17 is any amino acid
  Variant (19)..(19): Xaa in position 19 is any amino acid
  Variant (20)..(20): Xaa in position 20 is Gly, Asn, Ser or Thr
  Variant (21)..(21): Xaa in position 21 is Ala, Pro, Thr or Val
  Variant (22)..(25): Xaa in position 22 to 25 is any amino acid
  Variant (26)..(26): Xaa in position 26 is Phe, Ile, Leu or Val
  Variant (27)..(30): Xaa in position 27 to 30 is any amino acid
  Variant (31)..(31): Xaa in position 31 is Ile, Leu or Val
  Variant (32)..(32): Xaa in position 32 is any amino acid
  Variant (33)..(33): Xaa in position 33 is Ile, Leu, Met or Val
  Variant (34)..(34): Xaa in position 34 is Ile or Val
  Variant (42)..(42): Xaa in position 42 is Asn or Thr
  Variant (44)..(46): Xaa in position 44 to 46 is any amino acid
  Variant (47)..(47): Xaa in position 47 is Ile, Leu or Val
  Variant (48)..(48): Xaa in position 48 is Ile, Leu, Met or Val
  Variant (49)..(54): Xaa in position 49 to 54 is any amino acid
  Variant (57)..(58): Xaa in position 57 to 58 is any amino acid
  Variant (59)..(59): Xaa in position 59 is Ile, Leu or Val
  Variant (60)..(63): Xaa in position 60 to 63 is any amino acid
  Variant (64)..(64): Xaa in position 64 is Ala, Cys, Gly, Ser, Thr or Val
  Variant (65)..(65): Xaa in position 65 is any amino acid
  Variant (67)..(74): Xaa in position 67 to 74 is any amino acid
  Variant (76)..(83): Xaa in position 76 to 83 is any amino acid
  Variant (84)..(84): Xaa in position 84 is Phe or Leu
  Variant (85)..(85): Xaa in position 85 is Ile, Leu, Met or Val
  Variant (86)..(86): Xaa in position 86 is Ala, Cys, Gly or Ser

SEQ ID NO: 43851 - DNA, 930 bp, Escherichia coli K12; identical to SEQ ID NO: 6852
  CDS (1)..(930)

SEQ ID NO: 43852 - protein, 309 aa, Escherichia coli K12; identical to SEQ ID NO: 6853

SEQ ID NO: 43853 - DNA, 1032 bp, Haemophilus influenzae; identical to SEQ ID NO: 6854
  CDS (1)..(1032)

SEQ ID NO: 43854 - protein, 343 aa, Haemophilus influenzae; identical to SEQ ID NO: 6855

SEQ ID NO: 43855 - DNA, 1089 bp, Xylella fastidiosa; identical to SEQ ID NO: 6856
  CDS (1)..(1089)

SEQ ID NO: 43856 - protein, 362 aa, Xylella fastidiosa; identical to SEQ ID NO: 6857

SEQ ID NO: 43857 - DNA, 924 bp, Pseudomonas aeruginosa; identical to SEQ ID NO: 6858
  CDS (1)..(924)

SEQ ID NO: 43858 - protein, 307 aa, Pseudomonas aeruginosa; identical to SEQ ID NO: 6859

SEQ ID NO: 43859 - DNA, 882 bp, Brucella melitensis; identical to SEQ ID NO: 6860
  CDS (1)..(882)

SEQ ID NO: 43860 - protein, 293 aa, Brucella melitensis; identical to SEQ ID NO: 6861

SEQ ID NO: 43861 - DNA, 870 bp, Listeria monocytogenes; identical to SEQ ID NO: 6862
  CDS (1)..(870)

SEQ ID NO: 43862 - protein, 289 aa, Listeria monocytogenes; identical to SEQ ID NO: 6863

SEQ ID NO: 43863 - DNA, 870 bp, Listeria innocua; identical to SEQ ID NO: 6864
  CDS (1)..(870)

SEQ ID NO: 43864 - protein, 289 aa, Listeria innocua; identical to SEQ ID NO: 6865

SEQ ID NO: 43865 - DNA, 882 bp, Agrobacterium tumefaciens; identical to SEQ ID NO: 6866
  CDS (1)..(882)

SEQ ID NO: 43866 - protein, 293 aa, Agrobacterium tumefaciens; identical to SEQ ID NO: 6867

SEQ ID NO: 43867 - DNA, 1020 bp, Listeria innocua; identical to SEQ ID NO: 6868
  CDS (1)..(1020)

SEQ ID NO: 43868 - protein, 339 aa, Listeria innocua; identical to SEQ ID NO: 6869

SEQ ID NO: 43869 - DNA, 927 bp, Yersinia pestis; identical to SEQ ID NO: 6870
  CDS (1)..(927)

SEQ ID NO: 43870 - protein, 308 aa, Yersinia pestis; identical to SEQ ID NO: 6871

SEQ ID NO: 43871 - DNA, 927 bp, Halobacterium sp. NRC-1; identical to SEQ ID NO: 6872
  CDS (1)..(927)

SEQ ID NO: 43872 - protein, 308 aa, Halobacterium sp. NRC-1; identical to SEQ ID NO: 6873

SEQ ID NO: 43873 - DNA, 849 bp, Staphylococcus aureus; identical to SEQ ID NO: 6874
  CDS (1)..(849)

SEQ ID NO: 43874 - protein, 282 aa, Staphylococcus aureus; identical to SEQ ID NO: 6875

SEQ ID NO: 43875 - DNA, 936 bp, Aquifex aeolicus; identical to SEQ ID NO: 6876
  CDS (1)..(936)

SEQ ID NO: 43876 - protein, 311 aa, Aquifex aeolicus; identical to SEQ ID NO: 6877

SEQ ID NO: 43877 - DNA, 873 bp, Rickettsia prowazekii; identical to SEQ ID NO: 6878
  CDS (1)..(873)

SEQ ID NO: 43878 - protein, 290 aa, Rickettsia prowazekii; identical to SEQ ID NO: 6879

SEQ ID NO: 43879 - DNA, 822 bp, Thermotoga maritima; identical to SEQ ID NO: 6880
  CDS (1)..(822)

SEQ ID NO: 43880 - protein, 273 aa, Thermotoga maritima; identical to SEQ ID NO: 6881

SEQ ID NO: 43881 - DNA, 1077 bp, Deinococcus radiodurans; identical to SEQ ID NO: 6882
  CDS (1)..(1077)

SEQ ID NO: 43882 - protein, 358 aa, Deinococcus radiodurans; identical to SEQ ID NO: 6883

SEQ ID NO: 43883 - DNA, 852 bp, Bacillus halodurans; identical to SEQ ID NO: 6884
  CDS (1)..(852)

SEQ ID NO: 43884 - protein, 283 aa, Bacillus halodurans; identical to SEQ ID NO: 6885

SEQ ID NO: 43885 - DNA, 1104 bp, Arabidopsis thaliana (mouse-ear cress); identical to SEQ ID NO: 6886
  CDS (1)..(1104)

SEQ ID NO: 43886 - protein, 367 aa, Arabidopsis thaliana (mouse-ear cress); identical to SEQ ID NO: 6887

SEQ ID NO: 43887 - DNA, 1092 bp, Helicobacter pylori; identical to SEQ ID NO: 6888
  CDS (28)..(1050)

SEQ ID NO: 43888 - protein, 340 aa, Helicobacter pylori; identical to SEQ ID NO: 6889

SEQ ID NO: 43889 - DNA, 1023 bp, Helicobacter pylori; identical to SEQ ID NO: 6890
  CDS (1)..(1023)

SEQ ID NO: 43890 - protein, 340 aa, Helicobacter pylori; identical to SEQ ID NO: 6891

SEQ ID NO: 43891 - DNA, 999 bp, Neisseria meningitidis; identical to SEQ ID NO: 6892
  CDS (1)..(999)

SEQ ID NO: 43892 - protein, 332 aa, Neisseria meningitidis; identical to SEQ ID NO: 6893

SEQ ID NO: 43893 - DNA, 915 bp, Campylobacter jejuni; identical to SEQ ID NO: 6894
  CDS (1)..(915)

SEQ ID NO: 43894 - protein, 304 aa, Campylobacter jejuni; identical to SEQ ID NO: 6895

SEQ ID NO: 43895 - DNA, 999 bp, Neisseria meningitidis; identical to SEQ ID NO: 6896
  CDS (1)..(999)

SEQ ID NO: 43896 - protein, 332 aa, Neisseria meningitidis; identical to SEQ ID NO: 6897

SEQ ID NO: 43897 - DNA, 888 bp, Bacillus halodurans; identical to SEQ ID NO: 6898
  CDS (1)..(888)

SEQ ID NO: 43898 - protein, 295 aa, Bacillus halodurans; identical to SEQ ID NO: 6899

SEQ ID NO: 43899 - DNA, 1077 bp, Bacillus halodurans; identical to SEQ ID NO: 6900
  CDS (1)..(1077)

SEQ ID NO: 43900 - protein, 358 aa, Bacillus halodurans; identical to SEQ ID NO: 6901

SEQ ID NO: 43901 - DNA, 858 bp, Halobacterium sp. NRC-1; identical to SEQ ID NO: 6902
  CDS (1)..(858)

SEQ ID NO: 43902 - protein, 285 aa, Halobacterium sp. NRC-1; identical to SEQ ID NO: 6903

SEQ ID NO: 43903 - DNA, 1077 bp, Staphylococcus aureus; identical to SEQ ID NO: 6904
  CDS (1)..(1077)

SEQ ID NO: 43904 - protein, 358 aa, Staphylococcus aureus; identical to SEQ ID NO: 6905

SEQ ID NO: 43905 - DNA, 1196 bp, Arabidopsis thaliana (mouse-ear cress); identical to SEQ ID NO: 6906
  CDS (9)..(1079)

SEQ ID NO: 43906 - protein, 356 aa, Arabidopsis thaliana (mouse-ear cress); identical to SEQ ID NO: 6907

SEQ ID NO: 43907 - DNA, 1026 bp, Clostridium acetobutylicum; identical to SEQ ID NO: 6908
  CDS (1)..(1026)

SEQ ID NO: 43908 - protein, 341 aa, Clostridium acetobutylicum; identical to SEQ ID NO: 6909

SEQ ID NO: 43909 - DNA, 873 bp, Archaeoglobus fulgidus; identical to SEQ ID NO: 6910
  CDS (1)..(873)

SEQ ID NO: 43910 - protein, 290 aa, Archaeoglobus fulgidus; identical to SEQ ID NO: 6911

SEQ ID NO: 43911 - DNA, 849 bp, Bacillus subtilis; identical to SEQ ID NO: 6912
  CDS (1)..(849)

SEQ ID NO: 43912 - protein, 282 aa, Bacillus subtilis; identical to SEQ ID NO: 6913

SEQ ID NO: 43913 - DNA, 1023 bp, Streptococcus pneumoniae; identical to SEQ ID NO: 6914
  CDS (1)..(1023)

SEQ ID NO: 43914 - protein, 340 aa, Streptococcus pneumoniae; identical to SEQ ID NO: 6915

SEQ ID NO: 43915 - DNA, 867 bp, Methanococcus jannaschii; identical to SEQ ID NO: 6916
  CDS (1)..(867)

SEQ ID NO: 43916 - protein, 288 aa, Methanococcus jannaschii; identical to SEQ ID NO: 6917

SEQ ID NO: 43917 - DNA, 960 bp, Vibrio cholerae; identical to SEQ ID NO: 6918
  CDS (1)..(960)

SEQ ID NO: 43918 - protein, 319 aa, Vibrio cholerae; identical to SEQ ID NO: 6919

SEQ ID NO: 43919 - DNA, 891 bp, Caulobacter crescentus; identical to SEQ ID NO: 6920
  CDS (1)..(891)

SEQ ID NO: 43920 - protein, 296 aa, Caulobacter crescentus; identical to SEQ ID NO: 6921

SEQ ID NO: 43921 - DNA, 1071 bp, Bacillus subtilis; identical to SEQ ID NO: 6922
  CDS (1)..(1071)

SEQ ID NO: 43922 - protein, 356 aa, Bacillus subtilis; identical to SEQ ID NO: 6923

SEQ ID NO: 43923 - DNA, 1182 bp, Saccharomyces cerevisiae; identical to SEQ ID NO: 6924
  CDS (1)..(1182)

SEQ ID NO: 43924 - protein, 393 aa, Saccharomyces cerevisiae; identical to SEQ ID NO: 6925

SEQ ID NO: 43925 - DNA, 1131 bp, Saccharomyces cerevisiae; identical to SEQ ID NO: 6926
  CDS (1)..(1131)

SEQ ID NO: 43926 - protein, 376 aa, Saccharomyces cerevisiae; identical to SEQ ID NO: 6927

SEQ ID NO: 43927 - DNA, 1092 bp, Bacillus subtilis; identical to SEQ ID NO: 6928
  CDS (1)..(1092)

SEQ ID NO: 43928 - protein, 363 aa, Bacillus subtilis; identical to SEQ ID NO: 6929

SEQ ID NO: 43929 - DNA, 918 bp, Synechocystis sp; identical to SEQ ID NO: 6930
  CDS (1)..(918)

SEQ ID NO: 43930 - protein, 305 aa, Synechocystis sp; identical to SEQ ID NO: 6931

SEQ ID NO: 43931 - DNA, 1155 bp, Arabidopsis thaliana (mouse-ear cress); identical to SEQ ID NO: 6932
  CDS (1)..(1155)

SEQ ID NO: 43932 - protein, 384 aa, Arabidopsis thaliana (mouse-ear cress); identical to SEQ ID NO: 6933

SEQ ID NO: 43933 - DNA, 1167 bp, Arabidopsis thaliana (mouse-ear cress); identical to SEQ ID NO: 6934
  CDS (211)..(1167)

SEQ ID NO: 43934 - protein, 318 aa, Arabidopsis thaliana (mouse-ear cress); identical to SEQ ID NO: 6935

SEQ ID NO: 43935 - DNA, 4266 bp, Arabidopsis thaliana (mouse-ear cress); identical to SEQ ID NO: 6936
  CDS (1)..(4266)

SEQ ID NO: 43936 - protein, 1421 aa, Arabidopsis thaliana (mouse-ear cress); identical to SEQ ID NO: 6937

SEQ ID NO: 43937 - DNA, 1182 bp, Caenorhabditis elegans; identical to SEQ ID NO: 6938
  CDS (1)..(1182)

SEQ ID NO: 43938 - protein, 393 aa, Caenorhabditis elegans; identical to SEQ ID NO: 6939

SEQ ID NO: 43939 - DNA, 1089 bp, Streptomyces coelicolor; identical to SEQ ID NO: 6940
  CDS (1)..(1089)

SEQ ID NO: 43940 - protein, 362 aa, Streptomyces coelicolor; identical to SEQ ID NO: 6941

SEQ ID NO: 43941 - DNA, 1143 bp, Schizosaccharomyces pombe; identical to SEQ ID NO: 6942
  CDS (1)..(1143)

SEQ ID NO: 43942 - protein, 380 aa, Schizosaccharomyces pombe; identical to SEQ ID NO: 6943

SEQ ID NO: 43943 - DNA, 1107 bp, Mycobacterium leprae; identical to SEQ ID NO: 6944
  CDS (1)..(1107)

SEQ ID NO: 43944 - protein, 368 aa, Mycobacterium leprae; identical to SEQ ID NO: 6945

SEQ ID NO: 43945 - DNA, 1065 bp, Arabidopsis thaliana (mouse-ear cress); identical to SEQ ID NO: 6946
  CDS (1)..(1065)

SEQ ID NO: 43946 - protein, 354 aa, Arabidopsis thaliana (mouse-ear cress); identical to SEQ ID NO: 6947

SEQ ID NO: 43947 - DNA, 1062 bp, Mus musculus; identical to SEQ ID NO: 6948
  CDS (1)..(1062)

SEQ ID NO: 43948 - protein, 353 aa, Mus musculus; identical to SEQ ID NO: 6949

SEQ ID NO: 43949 - DNA, 876 bp, Symbiobacterium thermophilum; identical to SEQ ID NO: 6950
  CDS (1)..(876)

SEQ ID NO: 43950 - protein, 291 aa, Symbiobacterium thermophilum; identical to SEQ ID NO: 6951

SEQ ID NO: 43951 - DNA, 846 bp, Symbiobacterium thermophilum; identical to SEQ ID NO: 6952
  CDS (1)..(846)

SEQ ID NO: 43952 - protein, 281 aa, Symbiobacterium thermophilum; identical to SEQ ID NO: 6953

SEQ ID NO: 43953 - DNA, 1092 bp, Propionibacterium acnes; identical to SEQ ID NO: 6954
  CDS (1)..(1092)

SEQ ID NO: 43954 - protein, 363 aa, Propionibacterium acnes; identical to SEQ ID NO: 6955

SEQ ID NO: 43955 - DNA, 1134 bp, Leifsonia xyli; identical to SEQ ID NO: 6956
  CDS (1)..(1134)

SEQ ID NO: 43956 - protein, 377 aa, Leifsonia xyli; identical to SEQ ID NO: 6957

SEQ ID NO: 43957 - DNA, 1083 bp, Desulfotalea psychrophila; identical to SEQ ID NO: 6958
  CDS (1)..(1083)

SEQ ID NO: 43958 - protein, 360 aa, Desulfotalea psychrophila; identical to SEQ ID NO: 6959

SEQ ID NO: 43959 - DNA, 852 bp, Desulfotalea psychrophila; identical to SEQ ID NO: 6960
  CDS (1)..(852)

SEQ ID NO: 43960 - protein, 283 aa, Desulfotalea psychrophila; identical to SEQ ID NO: 6961

SEQ ID NO: 43961 - DNA, 1104 bp, Debaryomyces hansenii CBS767; identical to SEQ ID NO: 6962
  CDS (1)..(1104)

SEQ ID NO: 43962 - protein, 367 aa, Debaryomyces hansenii CBS767; identical to SEQ ID NO: 6963

SEQ ID NO: 43963 - DNA, 1167 bp, Yarrowia lipolytica CLIB99; identical to SEQ ID NO: 6964
  CDS (1)..(1167)

SEQ ID NO: 43964 - protein, 388 aa, Yarrowia lipolytica CLIB99; identical to SEQ ID NO: 6965

SEQ ID NO: 43965 - DNA, 918 bp, Erwinia carotovora; identical to SEQ ID NO: 6966
  CDS (1)..(918)

SEQ ID NO: 43966 - protein, 305 aa, Erwinia carotovora; identical to SEQ ID NO: 6967

SEQ ID NO: 43967 - DNA, 936 bp, Acinetobacter sp; identical to SEQ ID NO: 6968
  CDS (1)..(936)

SEQ ID NO: 43968 - protein, 311 aa, Acinetobacter sp; identical to SEQ ID NO: 6969

SEQ ID NO: 43969 - DNA, 1116 bp, Candida glabrata CBS138; identical to SEQ ID NO: 6970
  CDS (1)..(1116)

SEQ ID NO: 43970 - protein, 371 aa, Candida glabrata CBS138; identical to SEQ ID NO: 6971

SEQ ID NO: 43971 - DNA, 1188 bp, Candida glabrata CBS138; identical to SEQ ID NO: 6972
  CDS (1)..(1188)

SEQ ID NO: 43972 - protein, 395 aa, Candida glabrata CBS138; identical to SEQ ID NO: 6973

SEQ ID NO: 43973 - DNA, 1107 bp, Bartonella henselae; identical to SEQ ID NO: 6974
  CDS (1)..(1107)

SEQ ID NO: 43974 - protein, 368 aa, Bartonella henselae; identical to SEQ ID NO: 6975

SEQ ID NO: 43975 - DNA, 1077 bp, Staphylococcus aureus; identical to SEQ ID NO: 6976
  CDS (1)..(1077)

SEQ ID NO: 43976 - protein, 358 aa, Staphylococcus aureus; identical to SEQ ID NO: 6977

SEQ ID NO: 43977 - DNA, 885 bp, Bacillus thuringiensis; identical to SEQ ID NO: 6978
  CDS (1)..(885)

SEQ ID NO: 43978 - protein, 294 aa, Bacillus thuringiensis; identical to SEQ ID NO: 6979

SEQ ID NO: 43979 - DNA, 876 bp, Bacillus thuringiensis; identical to SEQ ID NO: 6980
  CDS (1)..(876)

SEQ ID NO: 43980 - protein, 291 aa, Bacillus thuringiensis; identical to SEQ ID NO: 6981

SEQ ID NO: 43981 - DNA, 873 bp, Bacillus thuringiensis; identical to SEQ ID NO: 6982
  CDS (1)..(873)

SEQ ID NO: 43982 - protein, 290 aa, Bacillus thuringiensis; identical to SEQ ID NO: 6983

SEQ ID NO: 43983 - DNA, 939 bp, Photobacterium profundum; identical to SEQ ID NO: 6984
  CDS (1)..(939)

SEQ ID NO: 43984 - protein, 312 aa, Photobacterium profundum; identical to SEQ ID NO: 6985

SEQ ID NO: 43985 - DNA, 864 bp, Methanococcus maripaludis; identical to SEQ ID NO: 6986
  CDS (1)..(864)

SEQ ID NO: 43986 - protein, 287 aa, Methanococcus maripaludis; identical to SEQ ID NO: 6987

SEQ ID NO: 43987 - DNA, 975 bp, Bdellovibrio bacteriovorus; identical to SEQ ID NO: 6988
  CDS (1)..(975)

SEQ ID NO: 43988 - protein, 324 aa, Bdellovibrio bacteriovorus; identical to SEQ ID NO: 6989

SEQ ID NO: 43989 - DNA, 1068 bp, Bdellovibrio bacteriovorus; identical to SEQ ID NO: 6990
  CDS (1)..(1068)

SEQ ID NO: 43990 - protein, 355 aa, Bdellovibrio bacteriovorus; identical to SEQ ID NO: 6991

SEQ ID NO: 43991 - DNA, 885 bp, Rhodopseudomonas palustris; identical to SEQ ID NO: 6992
  CDS (1)..(885)

SEQ ID NO: 43992 - protein, 294 aa, Rhodopseudomonas palustris; identical to SEQ ID NO: 6993

SEQ ID NO: 43993 - DNA, 1113 bp, Rhodopseudomonas palustris; identical to SEQ ID NO: 6994
  CDS (1)..(1113)

SEQ ID NO: 43994 - protein, 370 aa, Rhodopseudomonas palustris; identical to SEQ ID NO: 6995

SEQ ID NO: 43995 - DNA, 1116 bp, Corynebacterium diphtheriae; identical to SEQ ID NO: 6996
  CDS (1)..(1116)

SEQ ID NO: 43996 - protein, 371 aa, Corynebacterium diphtheriae; identical to SEQ ID NO: 6997

SEQ ID NO: 43997 - DNA, 2014 bp, Brachydanio rerio; identical to SEQ ID NO: 6998
  CDS (20)..(1177)

SEQ ID NO: 43998 - protein, 385 aa, Brachydanio rerio; identical to SEQ ID NO: 6999

SEQ ID NO: 43999 - DNA, 915 bp, uncultured crenarchaeote; identical to SEQ ID NO: 7000
  CDS (1)..(915)

SEQ ID NO: 44000 - protein, 304 aa, uncultured crenarchaeote; identical to SEQ ID NO: 7001

SEQ ID NO: 44001 - DNA, 1194 bp, Hordeum vulgare; identical to SEQ ID NO: 7002
  CDS (1)..(1194)

SEQ ID NO: 44002 - protein, 397 aa, Hordeum vulgare; identical to SEQ ID NO: 7003

SEQ ID NO: 44003 - DNA, 870 bp, Listeria monocytogenes; identical to SEQ ID NO: 7004
  CDS (1)..(870)

SEQ ID NO: 44004 - protein, 289 aa, Listeria monocytogenes; identical to SEQ ID NO: 7005

SEQ ID NO: 44005 - DNA, 1020 bp, Listeria monocytogenes; identical to SEQ ID NO: 7006
  CDS (1)..(1020)

SEQ ID NO: 44006 - protein, 339 aa, Listeria monocytogenes; identical to SEQ ID NO: 7007

SEQ ID NO: 44007 - DNA, 930 bp, Desulfovibrio vulgaris; identical to SEQ ID NO: 7008
  CDS (1)..(930)

SEQ ID NO: 44008 - protein, 309 aa, Desulfovibrio vulgaris; identical to SEQ ID NO: 7009

SEQ ID NO: 44009 - DNA, 957 bp, Thermus thermophilus; identical to SEQ ID NO: 7010
  CDS (1)..(957)

SEQ ID NO: 44010 - protein, 318 aa, Thermus thermophilus; identical to SEQ ID NO: 7011

SEQ ID NO: 44011 - DNA, 957 bp, Leptospira interrogans; identical to SEQ ID NO: 7012
  CDS (1)..(957)

SEQ ID NO: 44012 - protein, 318 aa, Leptospira interrogans; identical to SEQ ID NO: 7013

SEQ ID NO: 44013 - DNA, 873 bp, Bacillus cereus; identical to SEQ ID NO: 7014
  CDS (1)..(873)

SEQ ID NO: 44014 - protein, 290 aa, Bacillus cereus; identical to SEQ ID NO: 7015

SEQ ID NO: 44015 - DNA, 876 bp, Bacillus cereus; identical to SEQ ID NO: 7016
  CDS (1)..(876)

SEQ ID NO: 44016 - protein, 291 aa, Bacillus cereus; identical to SEQ ID NO: 7017

SEQ ID NO: 44017 - DNA, 900 bp, Bacillus cereus; identical to SEQ ID NO: 7018
  CDS (1)..(900)

SEQ ID NO: 44018 - protein, 299 aa, Bacillus cereus; identical to SEQ ID NO: 7019

SEQ ID NO: 44019 - DNA, 897 bp, Bacillus cereus; identical to SEQ ID NO: 7020
  CDS (1)..(897)

SEQ ID NO: 44020 - protein, 298 aa, Bacillus cereus; identical to SEQ ID NO: 7021

SEQ ID NO: 44021 - DNA, 873 bp, Bacillus cereus; identical to SEQ ID NO: 7022
  CDS (1)..(873)

SEQ ID NO: 44022 - protein, 290 aa, Bacillus cereus; identical to SEQ ID NO: 7023

SEQ ID NO: 44023 - DNA, 1116 bp, Mycobacterium paratuberculosis; identical to SEQ ID NO: 7024
  CDS (1)..(1116)

SEQ ID NO: 44024 - protein, 371 aa, Mycobacterium paratuberculosis; identical to SEQ ID NO: 7025

SEQ ID NO: 44025 - DNA, 1074 bp, Geobacter sulfurreducens; identical to SEQ ID NO: 7026
  CDS (1)..(1074)

SEQ ID NO: 44026 - protein, 357 aa, Geobacter sulfurreducens; identical to SEQ ID NO: 7027

SEQ ID NO: 44027 - DNA, 897 bp, Nanoarchaeum equitans; identical to SEQ ID NO: 7028
  CDS (1)..(897)

SEQ ID NO: 44028 - protein, 298 aa, Nanoarchaeum equitans; identical to SEQ ID NO: 7029

SEQ ID NO: 44029 - DNA, 1140 bp, Corynebacterium glutamicum; identical to SEQ ID NO: 7030
  CDS (1)..(1140)

SEQ ID NO: 44030 - protein, 379 aa, Corynebacterium glutamicum; identical to SEQ ID NO: 7031

SEQ ID NO: 44031 - DNA, 1300 bp, Lactococcus lactis; identical to SEQ ID NO: 7032
  CDS (154)..(1176)

SEQ ID NO: 44032 - protein, 340 aa, Lactococcus lactis; identical to SEQ ID NO: 7033

SEQ ID NO: 44033 - DNA, 918 bp, Wolinella succinogenes; identical to SEQ ID NO: 7034
  CDS (1)..(918)

SEQ ID NO: 44034 - protein, 305 aa, Wolinella succinogenes; identical to SEQ ID NO: 7035

SEQ ID NO: 44035 - DNA, 939 bp, Vibrio vulnificus; identical to SEQ ID NO: 7036
  CDS (1)..(939)

SEQ ID NO: 44036 - protein, 312 aa, Vibrio vulnificus; identical to SEQ ID NO: 7037

SEQ ID NO: 44037 - DNA, 1020 bp, Porphyromonas gingivalis; identical to SEQ ID NO: 7038
  CDS (1)..(1020)

SEQ ID NO: 44038 - protein, 339 aa, Porphyromonas gingivalis; identical to SEQ ID NO: 7039

SEQ ID NO: 44039 - DNA, 927 bp, Photorhabdus luminescens; identical to SEQ ID NO: 7040
  CDS (1)..(927)

SEQ ID NO: 44040 - protein, 308 aa, Photorhabdus luminescens; identical to SEQ ID NO: 7041

SEQ ID NO: 44041 - DNA, 948 bp, Photorhabdus luminescens; identical to SEQ ID NO: 7042
  CDS (1)..(948)

SEQ ID NO: 44042 - protein, 315 aa, Photorhabdus luminescens; identical to SEQ ID NO: 7043

SEQ ID NO: 44043 - DNA, 876 bp, Gloeobacter violaceus; identical to SEQ ID NO: 7044
  CDS (1)..(876)

SEQ ID NO: 44044 - protein, 291 aa, Gloeobacter violaceus; identical to SEQ ID NO: 7045

SEQ ID NO: 44045 - DNA, 960 bp, Gloeobacter violaceus; identical to SEQ ID NO: 7046
  CDS (1)..(960)

SEQ ID NO: 44046 - protein, 319 aa, Gloeobacter violaceus; identical to SEQ ID NO: 7047

SEQ ID NO: 44047 - DNA, 924 bp, Chromobacterium violaceum; identical to SEQ ID NO: 7048
  CDS (1)..(924)

SEQ ID NO: 44048 - protein, 307 aa, Chromobacterium violaceum; identical to SEQ ID NO: 7049

SEQ ID NO: 44049 - DNA, 1284 bp, Neurospora crassa; identical to SEQ ID NO: 7050
  CDS (1)..(1284)

SEQ ID NO: 44050 - protein, 427 aa, Neurospora crassa; identical to SEQ ID NO: 7051

SEQ ID NO: 44051 - DNA, 1242 bp, Neurospora crassa; identical to SEQ ID NO: 7052
  CDS (1)..(1242)

SEQ ID NO: 44052 - protein, 413 aa, Neurospora crassa; identical to SEQ ID NO: 7053

SEQ ID NO: 44053 - DNA, 915 bp, Prochlorococcus marinus subsp; identical to SEQ ID NO: 7054
  CDS (1)..(915)

SEQ ID NO: 44054 - protein, 304 aa, Prochlorococcus marinus subsp; identical to SEQ ID NO: 7055

SEQ ID NO: 44055 - DNA, 921 bp, Prochlorococcus marinus; identical to SEQ ID NO: 7056
  CDS (1)..(921)

SEQ ID NO: 44056 - protein, 306 aa, Prochlorococcus marinus; identical to SEQ ID NO: 7057

SEQ ID NO: 44057 - DNA, 1107 bp, Mycobacterium bovis; identical to SEQ ID NO: 7058
  CDS (1)..(1107)

SEQ ID NO: 44058 - protein, 368 aa, Mycobacterium bovis; identical to SEQ ID NO: 7059

SEQ ID NO: 44059 - DNA, 915 bp, Synechococcus sp; identical to SEQ ID NO: 7060
  CDS (1)..(915)

SEQ ID NO: 44060 - protein, 304 aa, Synechococcus sp; identical to SEQ ID NO: 7061

SEQ ID NO: 44061 - DNA, 858 bp, Rhodopirellula baltica; identical to SEQ ID NO: 7062
  CDS (1)..(858)

SEQ ID NO: 44062 - protein, 285 aa, Rhodopirellula baltica; identical to SEQ ID NO: 7063

SEQ ID NO: 44063 - DNA, 915 bp, Prochlorococcus marinus; identical to SEQ ID NO: 7064
  CDS (1)..(915)

SEQ ID NO: 44064 - protein, 304 aa, Prochlorococcus marinus; identical to SEQ ID NO: 7065

SEQ ID NO: 44065 - DNA, 933 bp, Helicobacter hepaticus; identical to SEQ ID NO: 7066
  CDS (1)..(933)

SEQ ID NO: 44066 - protein, 310 aa, Helicobacter hepaticus; identical to SEQ ID NO: 7067

SEQ ID NO: 44067 - DNA, 924 bp, Candidatus Blochmannia floridanus; identical to SEQ ID NO: 7068
  CDS (1)..(924)

SEQ ID NO: 44068 - protein, 307 aa, Candidatus Blochmannia floridanus; identical to SEQ ID NO: 7069

SEQ ID NO: 44069 - DNA, 921 bp, Bordetella parapertussis; identical to SEQ ID NO: 7070
  CDS (1)..(921)

SEQ ID NO: 44070 - protein, 306 aa, Bordetella parapertussis; identical to SEQ ID NO: 7071

SEQ ID NO: 44071 - DNA, 903 bp, Bordetella parapertussis; identical to SEQ ID NO: 7072
  CDS (1)..(903)

SEQ ID NO: 44072 - protein, 300 aa, Bordetella parapertussis; identical to SEQ ID NO: 7073

SEQ ID NO: 44073 - DNA, 945 bp, Bordetella bronchiseptica; identical to SEQ ID NO: 7074
  CDS (1)..(945)

SEQ ID NO: 44074 - protein, 314 aa, Bordetella bronchiseptica; identical to SEQ ID NO: 7075

SEQ ID NO: 44075 - DNA, 1233 bp, Oryza sativa; identical to SEQ ID NO: 7076
  CDS (1)..(1233)

SEQ ID NO: 44076 - protein, 410 aa, Oryza sativa; identical to SEQ ID NO: 7077

SEQ ID NO: 44077 - DNA, 1104 bp, Trypanosoma brucei; identical to SEQ ID NO: 7078
  CDS (1)..(1104)

SEQ ID NO: 44078 - protein, 367 aa, Trypanosoma brucei; identical to SEQ ID NO: 7079

SEQ ID NO: 44079 - DNA, 1104 bp, Trypanosoma brucei; identical to SEQ ID NO: 7080
  CDS (1)..(1104)

SEQ ID NO: 44080 - protein, 367 aa, Trypanosoma brucei; identical to SEQ ID NO: 7081

SEQ ID NO: 44081 - DNA, 879 bp, Bacillus cereus; identical to SEQ ID NO: 7082
  CDS (1)..(879)

SEQ ID NO: 44082 - protein, 292 aa, Bacillus cereus; identical to SEQ ID NO: 7083

SEQ ID NO: 44083 - DNA, 873 bp, Bacillus cereus; identical to SEQ ID NO: 7084
  CDS (1)..(873)

SEQ ID NO: 44084 - protein, 290 aa, Bacillus cereus; identical to SEQ ID NO: 7085

SEQ ID NO: 44085 - DNA, 873 bp, Bacillus anthracis; identical to SEQ ID NO: 7086
  CDS (1)..(873)

SEQ ID NO: 44086 - protein, 290 aa, Bacillus anthracis; identical to SEQ ID NO: 7087

SEQ ID NO: 44087 - DNA, 822 bp, Streptomyces avermitilis; identical to SEQ ID NO: 7088
  CDS (1)..(822)

SEQ ID NO: 44088 - protein, 273 aa, Streptomyces avermitilis; identical to SEQ ID NO: 7089

SEQ ID NO: 44089 - DNA, 1089 bp, Streptomyces avermitilis; identical to SEQ ID NO: 7090
  CDS (1)..(1089)

SEQ ID NO: 44090 - protein, 362 aa, Streptomyces avermitilis; identical to SEQ ID NO: 7091

SEQ ID NO: 44091 - DNA, 924 bp, Nitrosomonas europaea; identical to SEQ ID NO: 7092
  CDS (1)..(924)

SEQ ID NO: 44092 - protein, 307 aa, Nitrosomonas europaea; identical to SEQ ID NO: 7093

SEQ ID NO: 44093 - DNA, 861 bp, Nitrosomonas europaea; identical to SEQ ID NO: 7094
  CDS (1)..(861)

SEQ ID NO: 44094 - protein, 286 aa, Nitrosomonas europaea; identical to SEQ ID NO: 7095

SEQ ID NO: 44095 - DNA, 1020 bp, Enterococcus faecalis; identical to SEQ ID NO: 7096
  CDS (1)..(1020)

SEQ ID NO: 44096 - protein, 339 aa, Enterococcus faecalis; identical to SEQ ID NO: 7097

SEQ ID NO: 44097 - DNA, 846 bp, Coxiella burnetii; identical to SEQ ID NO: 7098
  CDS (1)..(846)

SEQ ID NO: 44098 - protein, 281 aa, Coxiella burnetii; identical to SEQ ID NO: 7099

SEQ ID NO: 44099 - DNA, 1086 bp, Tropheryma whipplei; identical to SEQ ID NO: 7100
  CDS (1)..(1086)

SEQ ID NO: 44100 - protein, 361 aa, Tropheryma whipplei; identical to SEQ ID NO: 7101

SEQ ID NO: 44101 - DNA, 837 bp, Legionella pneumophila; identical to SEQ ID NO: 7102
  CDS (1)..(837)

SEQ ID NO: 44102 - protein, 278 aa, Legionella pneumophila; identical to SEQ ID NO: 7103

SEQ ID NO: 44103 - DNA, 921 bp, Bacillus cereus; identical to SEQ ID NO: 7104
  CDS (1)..(921)

SEQ ID NO: 44104 - protein, 306 aa, Bacillus cereus; identical to SEQ ID NO: 7105

SEQ ID NO: 44105 - DNA, 897 bp, Bacillus cereus; identical to SEQ ID NO: 7106
  CDS (1)..(897)

SEQ ID NO: 44106 - protein, 298 aa, Bacillus cereus; identical to SEQ ID NO: 7107

SEQ ID NO: 44107 - DNA, 876 bp, Bacillus cereus; identical to SEQ ID NO: 7108
  CDS (1)..(876)

SEQ ID NO: 44108 - protein, 291 aa, Bacillus cereus; identical to SEQ ID NO: 7109

SEQ ID NO: 44109 - DNA, 900 bp, Bacillus cereus; identical to SEQ ID NO: 7110
  CDS (1)..(900)

SEQ ID NO: 44110 - protein, 299 aa, Bacillus cereus; identical to SEQ ID NO: 7111

SEQ ID NO: 44111 - DNA, 1861 bp, Cicer arietinum; identical to SEQ ID NO: 7112
  CDS (5)..(1660)

SEQ ID NO: 44112 - protein, 551 aa, Cicer arietinum; identical to SEQ ID NO: 7113

SEQ ID NO: 44113 - DNA, 1229 bp, Giardia lamblia; identical to SEQ ID NO: 7114
  CDS (72)..(1139)

SEQ ID NO: 44114 - protein, 355 aa, Giardia lamblia; identical to SEQ ID NO: 7115

SEQ ID NO: 44115 - DNA, 1089 bp, Xylella fastidiosa; identical to SEQ ID NO: 7116
  CDS (1)..(1089)

SEQ ID NO: 44116 - protein, 362 aa, Xylella fastidiosa; identical to SEQ ID NO: 7117

SEQ ID NO: 44117 - DNA, 939 bp, Vibrio parahaemolyticus; identical to SEQ ID NO: 7118
  CDS (1)..(939)

SEQ ID NO: 44118 - protein, 312 aa, Vibrio parahaemolyticus; identical to SEQ ID NO: 7119

SEQ ID NO: 44119 - DNA, 1035 bp, Pseudomonas syringae; identical to SEQ ID NO: 7120
  CDS (16)..(1035)

SEQ ID NO: 44120 - protein, 339 aa, Pseudomonas syringae; identical to SEQ ID NO: 7121

SEQ ID NO: 44121 - DNA, 1122 bp, Pseudomonas putida; identical to SEQ ID NO: 7122
  CDS (103)..(1122)

SEQ ID NO: 44122 - protein, 339 aa, Pseudomonas putida; identical to SEQ ID NO: 7123

SEQ ID NO: 44123 - DNA, 1029 bp, Lactobacillus plantarum; identical to SEQ ID NO: 7124
  CDS (1)..(1029)

SEQ ID NO: 44124 - protein, 342 aa, Lactobacillus plantarum; identical to SEQ ID NO: 7125

SEQ ID NO: 44125 - DNA, 822 bp, Clostridium tetani; identical to SEQ ID NO: 7126
  CDS (1)..(822)

SEQ ID NO: 44126 - protein, 273 aa, Clostridium tetani; identical to SEQ ID NO: 7127

SEQ ID NO: 44127 - DNA, 1083 bp, Bradyrhizobium japonicum; identical to SEQ ID NO: 7128
  CDS (1)..(1083)

SEQ ID NO: 44128 - protein, 360 aa, Bradyrhizobium japonicum; identical to SEQ ID NO: 7129

SEQ ID NO: 44129 - DNA, 888 bp, Bradyrhizobium japonicum; identical to SEQ ID NO: 7130
  CDS (1)..(888)

SEQ ID NO: 44130 - protein, 295 aa, Bradyrhizobium japonicum; identical to SEQ ID NO: 7131

SEQ ID NO: 44131 - DNA, 1056 bp, Bradyrhizobium japonicum; identical to SEQ ID NO: 7132
  CDS (1)..(1056)

SEQ ID NO: 44132 - protein, 351 aa, Bradyrhizobium japonicum; identical to SEQ ID NO: 7133

SEQ ID NO: 44133 - DNA, 1020 bp, Bacteroides thetaiotaomicron; identical to SEQ ID NO: 7134
  CDS (1)..(1020)

SEQ ID NO: 44134 - protein, 339 aa, Bacteroides thetaiotaomicron; identical to SEQ ID NO: 7135

SEQ ID NO: 44135 - DNA, 867 bp, Oceanobacillus iheyensis; identical to SEQ ID NO: 7136
  CDS (1)..(867)

SEQ ID NO: 44136 - protein, 288 aa, Oceanobacillus iheyensis; identical to SEQ ID NO: 7137

SEQ ID NO: 44137 - DNA, 861 bp, Synechococcus elongatus; identical to SEQ ID NO: 7138
  CDS (1)..(861)

SEQ ID NO: 44138 - protein, 286 aa, Synechococcus elongatus; identical to SEQ ID NO: 7139

SEQ ID NO: 44139 - DNA, 912 bp, Synechococcus elongatus; identical to SEQ ID NO: 7140
  CDS (1)..(912)

SEQ ID NO: 44140 - protein, 303 aa, Synechococcus elongatus; identical to SEQ ID NO: 7141

SEQ ID NO: 44141 - DNA, 1026 bp, Streptococcus mutans; identical to SEQ ID NO: 7142
  CDS (1)..(1026)

SEQ ID NO: 44142 - protein, 341 aa, Streptococcus mutans; identical to SEQ ID NO: 7143

SEQ ID NO: 44143 - DNA, 1023 bp, Streptococcus agalactiae; identical to SEQ ID NO: 7144
  CDS (1)..(1023)

SEQ ID NO: 44144 - protein, 340 aa, Streptococcus agalactiae; identical to SEQ ID NO: 7145

SEQ ID NO: 44145 - DNA, 1092 bp, Shewanella oneidensis; identical to SEQ ID NO: 7146
  CDS (1)..(1092)

SEQ ID NO: 44146 - protein, 363 aa, Shewanella oneidensis; identical to SEQ ID NO: 7147

SEQ ID NO: 44147 - DNA, 1095 bp, Oceanobacillus iheyensis; identical to SEQ ID NO: 7148
  CDS (1)..(1095)

SEQ ID NO: 44148 - protein, 364 aa, Oceanobacillus iheyensis; identical to SEQ ID NO: 7149

SEQ ID NO: 44149 - DNA, 1236 bp, Corynebacterium efficiens; identical to SEQ ID NO: 7150
  CDS (1)..(1236)

SEQ ID NO: 44150 - protein, 411 aa, Corynebacterium efficiens; identical to SEQ ID NO: 7151

SEQ ID NO: 44151 - DNA, 1128 bp, Bifidobacterium longum; identical to SEQ ID NO: 7152
  CDS (1)..(1128)

SEQ ID NO: 44152 - protein, 375 aa, Bifidobacterium longum; identical to SEQ ID NO: 7153

SEQ ID NO: 44153 - DNA, 1248 bp, Oryza sativa; identical to SEQ ID NO: 7154
  CDS (1)..(1248)

SEQ ID NO: 44154 - protein, 415 aa, Oryza sativa; identical to SEQ ID NO: 7155

SEQ ID NO: 44155 - DNA, 1472 bp, Oryza sativa; identical to SEQ ID NO: 7156
  CDS (60)..(1277)

SEQ ID NO: 44156 - protein, 405 aa, Oryza sativa; identical to SEQ ID NO: 7157

SEQ ID NO: 44157 - DNA, 912 bp, Chlorobium tepidum; identical to SEQ ID NO: 7158
  CDS (1)..(912)

SEQ ID NO: 44158 - protein, 303 aa, Chlorobium tepidum; identical to SEQ ID NO: 7159

SEQ ID NO: 44159 - DNA, 960 bp, Rhizobium loti; identical to SEQ ID NO: 7160
  CDS (1)..(960)

SEQ ID NO: 44160 - protein, 319 aa, Rhizobium loti; identical to SEQ ID NO: 7161

SEQ ID NO: 44161 - DNA, 1023 bp, Streptococcus pyogenes; identical to SEQ ID NO: 7162
  CDS (1)..(1023)

SEQ ID NO: 44162 - protein, 340 aa, Streptococcus pyogenes; identical to SEQ ID NO: 7163

SEQ ID NO: 44163 - DNA, 1086 bp, Xanthomonas campestris; identical to SEQ ID NO: 7164
  CDS (1)..(1086)

SEQ ID NO: 44164 - protein, 361 aa, Xanthomonas campestris; identical to SEQ ID NO: 7165

SEQ ID NO: 44165 - DNA, 1086 bp, Xanthomonas axonopodis; identical to SEQ ID NO: 7166
  CDS (1)..(1086)

SEQ ID NO: 44166 - protein, 361 aa, Xanthomonas axonopodis; identical to SEQ ID NO: 7167

SEQ ID NO: 44167 - DNA, 885 bp, Methanosarcina mazei; identical to SEQ ID NO: 7168
  CDS (1)..(885)

SEQ ID NO: 44168 - protein, 294 aa, Methanosarcina mazei; identical to SEQ ID NO: 7169

SEQ ID NO: 44169 - DNA, 876 bp, Thermoanaerobacter tengcongensis; identical to SEQ ID NO: 7170
  CDS (1)..(876)

SEQ ID NO: 44170 - protein, 291 aa, Thermoanaerobacter tengcongensis; identical to SEQ ID NO: 7171

SEQ ID NO: 44171 - DNA, 885 bp, Methanosarcina acetivorans; identical to SEQ ID NO: 7172
  CDS (1)..(885)

SEQ ID NO: 44172 - protein, 294 aa, Methanosarcina acetivorans; identical to SEQ ID NO: 7173

SEQ ID NO: 44173 - DNA, 888 bp, Methanopyrus kandleri; identical to SEQ ID NO: 7174
  CDS (1)..(888)

SEQ ID NO: 44174 - protein, 295 aa, Methanopyrus kandleri; identical to SEQ ID NO: 7175

SEQ ID NO: 44175 - DNA, 1065 bp, Ralstonia solanacearum; identical to SEQ ID NO: 7176
  CDS (1)..(1065)

SEQ ID NO: 44176 - protein, 354 aa, Ralstonia solanacearum; identical to SEQ ID NO: 7177

SEQ ID NO: 44177 - DNA, 1026 bp, Clostridium perfringens; identical to SEQ ID NO: 7178
  CDS (1)..(1026)

SEQ ID NO: 44178 - protein, 341 aa, Clostridium perfringens; identical to SEQ ID NO: 7179

SEQ ID NO: 44179 - DNA, 930 bp, Ralstonia solanacearum; identical to SEQ ID NO: 7180
  CDS (1)..(930)

SEQ ID NO: 44180 - protein, 309 aa, Ralstonia solanacearum; identical to SEQ ID NO: 7181

SEQ ID NO: 44181 - DNA, 912 bp, Pyrobaculum aerophilum; identical to SEQ ID NO: 7182
  CDS (1)..(912)

SEQ ID NO: 44182 - protein, 303 aa, Pyrobaculum aerophilum; identical to SEQ ID NO: 7183

SEQ ID NO: 44183 - DNA, 864 bp, Rhizobium meliloti; identical to SEQ ID NO: 7184
  CDS (1)..(864)

SEQ ID NO: 44184 - protein, 287 aa, Rhizobium meliloti; identical to SEQ ID NO: 7185

SEQ ID NO: 44185 - DNA, 936 bp, Rhizobium meliloti; identical to SEQ ID NO: 7186
  CDS (1)..(936)

SEQ ID NO: 44186 - protein, 311 aa, Rhizobium meliloti; identical to SEQ ID NO: 7187

SEQ ID NO: 44187 - DNA, 1098 bp, Rhizobium meliloti; identical to SEQ ID NO: 7188
  CDS (1)..(1098)

SEQ ID NO: 44188 - protein, 365 aa, Rhizobium meliloti; identical to SEQ ID NO: 7189

SEQ ID NO: 44189 - DNA, 870 bp, Brucella suis; identical to SEQ ID NO: 7190
  CDS (1)..(870)

SEQ ID NO: 44190 - protein, 289 aa, Brucella suis; identical to SEQ ID NO: 7191

SEQ ID NO: 44191 - DNA, 912 bp, Streptomyces avermitilis; identical to SEQ ID NO: 7192
  CDS (1)..(912)

SEQ ID NO: 44192 - protein, 303 aa, Streptomyces avermitilis; identical to SEQ ID NO: 7193

SEQ ID NO: 44193 - DNA, 1398 bp, Capsicum annuum; identical to SEQ ID NO: 7194
  CDS (85)..(1242)

SEQ ID NO: 44194 - protein, 385 aa, Capsicum annuum; identical to SEQ ID NO: 7195

SEQ ID NO: 44195 - DNA, 1449 bp, Oryza sativa; identical to SEQ ID NO: 7196
  CDS (1)..(1146)

SEQ ID NO: 44196 - protein, 381 aa, Oryza sativa; identical to SEQ ID NO: 7197

SEQ ID NO: 44197 - DNA, 876 bp, Rhizobium loti; identical to SEQ ID NO: 7198
  CDS (1)..(876)

SEQ ID NO: 44198 - protein, 291 aa, Rhizobium loti; identical to SEQ ID NO: 7199

SEQ ID NO: 44199 - DNA, 879 bp, Rhizobium loti; identical to SEQ ID NO: 7200
  CDS (1)..(879)

SEQ ID NO: 44200 - protein, 292 aa, Rhizobium loti; identical to SEQ ID NO: 7201

SEQ ID NO: 44201 - DNA, 894 bp, Rhizobium loti; identical to SEQ ID NO: 7202
  CDS (1)..(894)

SEQ ID NO: 44202 - protein, 297 aa, Rhizobium loti; identical to SEQ ID NO: 7203

SEQ ID NO: 44203 - DNA, 963 bp, Rhizobium loti; identical to SEQ ID NO: 7204
  CDS (1)..(963)

SEQ ID NO: 44204 - protein, 320 aa, Rhizobium loti; identical to SEQ ID NO: 7205

SEQ ID NO: 44205 - DNA, 864 bp, Rhizobium loti; identical to SEQ ID NO: 7206
  CDS (1)..(864)

SEQ ID NO: 44206 - protein, 287 aa, Rhizobium loti; identical to SEQ ID NO: 7207

SEQ ID NO: 44207 - DNA, 1200 bp, Rattus norvegicus; identical to SEQ ID NO: 7208
  CDS (1)..(1200)

SEQ ID NO: 44208 - protein, 399 aa, Rattus norvegicus; identical to SEQ ID NO: 7209

SEQ ID NO: 44209 - DNA, 873 bp, Rickettsia montana; identical to SEQ ID NO: 7210
  CDS (1)..(873)

SEQ ID NO: 44210 - protein, 290 aa, Rickettsia montana; identical to SEQ ID NO: 7211

SEQ ID NO: 44211 - DNA, 1023 bp, Pasteurella multocida; identical to SEQ ID NO: 7212
  CDS (1)..(1023)

SEQ ID NO: 44212 - protein, 340 aa, Pasteurella multocida; identical to SEQ ID NO: 7213

SEQ ID NO: 44213 - DNA, 1080 bp, Staphylococcus carnosus; identical to SEQ ID NO: 7214
  CDS (1)..(1080)

SEQ ID NO: 44214 - protein, 359 aa, Staphylococcus carnosus; identical to SEQ ID NO: 7215

SEQ ID NO: 44215 - DNA, 822 bp, Streptomyces coelicolor; identical to SEQ ID NO: 7216
  CDS (1)..(822)

SEQ ID NO: 44216 - protein, 273 aa, Streptomyces coelicolor; identical to SEQ ID NO: 7217

SEQ ID NO: 44217 - DNA, 1700 bp, Solanum tuberosum; identical to SEQ ID NO: 7218
  CDS (340)..(1473)

SEQ ID NO: 44218 - protein, 377 aa, Solanum tuberosum; identical to SEQ ID NO: 7219

SEQ ID NO: 44219 - DNA, 1683 bp, Solanum tuberosum; identical to SEQ ID NO: 7220
  CDS (116)..(1372)

SEQ ID NO: 44220 - protein, 418 aa, Solanum tuberosum; identical to SEQ ID NO: 7221

SEQ ID NO: 44221 - DNA, 1668 bp, Arabidopsis thaliana; identical to SEQ ID NO: 7222
  CDS (1)..(1668)

SEQ ID NO: 44222 - protein, 555 aa, Arabidopsis thaliana; identical to SEQ ID NO: 7223

SEQ ID NO: 44223 - DNA, 1680 bp, Arabidopsis thaliana; identical to SEQ ID NO: 7224
  CDS (1)..(1680)

SEQ ID NO: 44224 - protein, 559 aa, Arabidopsis thaliana; identical to SEQ ID NO: 7225

SEQ ID NO: 44225 - DNA, 1973 bp, Arabidopsis thaliana; identical to SEQ ID NO: 7226
  CDS (571)..(1818)

SEQ ID NO: 44226 - protein, 415 aa, Arabidopsis thaliana; identical to SEQ ID NO: 7227

SEQ ID NO: 44227 - DNA, 1541 bp, Homo sapiens; identical to SEQ ID NO: 7228
  CDS (1)..(1179)

SEQ ID NO: 44228 - protein, 392 aa, Homo sapiens; identical to SEQ ID NO: 7229

SEQ ID NO: 44229 - DNA, 1953 bp, Ovis aries; identical to SEQ ID NO: 7230
  CDS (492)..(1649)

SEQ ID NO: 44230 - protein, 385 aa, Ovis aries; identical to SEQ ID NO: 7231

SEQ ID NO: 44231 - DNA, 1322 bp, Bacillus licheniformis; identical to SEQ ID NO: 7232
  CDS (247)..(1098)

SEQ ID NO: 44232 - protein, 283 aa, Bacillus licheniformis; identical to SEQ ID NO: 7233

SEQ ID NO: 44233 - DNA, 1194 bp, Bacillus sphaericus; identical to SEQ ID NO: 7234
  CDS (134)..(985)

SEQ ID NO: 44234 - protein, 283 aa, Bacillus sphaericus; identical to SEQ ID NO: 7235

SEQ ID NO: 44235 - DNA, 849 bp, Staphylococcus epidermidis; identical to SEQ ID NO: 7236
  CDS (1)..(849)

SEQ ID NO: 44236 - protein, 282 aa, Staphylococcus epidermidis; identical to SEQ ID NO: 7237

SEQ ID NO: 44237 - DNA, 1529 bp, Staphylococcus haemolyticus; identical to SEQ ID NO: 7238
  CDS (216)..(1064)

SEQ ID NO: 44238 - protein, 282 aa, Staphylococcus haemolyticus; identical to SEQ ID NO: 7239

SEQ ID NO: 44239 - DNA, 921 bp, Methanobacterium thermoautotrophicum; identical to SEQ ID NO: 7240
  CDS (1)..(921)

SEQ ID NO: 44240 - protein, 306 aa, Methanobacterium thermoautotrophicum; identical to SEQ ID NO: 7241

SEQ ID NO: 44241 - DNA, 1077 bp, Staphylococcus epidermidis; identical to SEQ ID NO: 7242
  CDS (1)..(1077)

SEQ ID NO: 44242 - protein, 358 aa, Staphylococcus epidermidis; identical to SEQ ID NO: 7243

SEQ ID NO: 44243 - DNA, 1074 bp, Cochliobolus carbonum; identical to SEQ ID NO: 7244
  CDS (1)..(1074)

SEQ ID NO: 44244 - protein, 357 aa, Cochliobolus carbonum; identical to SEQ ID NO: 7245

SEQ ID NO: 44245 - DNA, 24 bp, Artificial sequence
  Primer sequence
atgaccacgaagaaagctgattac

SEQ ID NO: 44246 - DNA, 26 bp, Artificial sequence
  Primer sequence
ttattgattaacttgatctaaccagc

SEQ ID NO: 44247 - protein, 278 aa, Artificial sequence; identical to SEQ ID NO: 9102
  Consensus
  Variant (2)..(3): Xaa in position 2 to 3 is any amino acid
  Variant (5)..(8): Xaa in position 5 to 8 is any amino acid
  Variant (10)..(12): Xaa in position 10 to 12 is any amino acid
  Variant (14)..(15): Xaa in position 14 to 15 is any amino acid
  Variant (17)..(19): Xaa in position 17 to 19 is any amino acid
  Variant (22)..(24): Xaa in position 22 to 24 is any amino acid
  Variant (28)..(28): Xaa in position 28 is any amino acid
  Variant (30)..(30): Xaa in position 30 is any amino acid
  Variant (32)..(42): Xaa in position 32 to 42 is any amino acid
  Variant (44)..(47): Xaa in position 44 to 47 is any amino acid
  Variant (49)..(50): Xaa in position 49 to 50 is any amino acid
  Variant (53)..(54): Xaa in position 53 to 54 is any amino acid
  Variant (57)..(87): Xaa in position 57 to 87 is any amino acid
  Variant (89)..(89): Xaa in position 89 is any amino acid
  Variant (91)..(95): Xaa in position 91 to 95 is any amino acid
  Variant (97)..(132): Xaa in position 97 to 132 is any amino acid
  Variant (134)..(142): Xaa in position 134 to 142 is any amino acid
  Variant (144)..(153): Xaa in position 144 to 153 is any amino acid
  Variant (155)..(158): Xaa in position 155 to 158 is any amino acid
  Variant (160)..(167): Xaa in position 160 to 167 is any amino acid
  Variant (170)..(172): Xaa in position 170 to 172 is any amino acid
  Variant (174)..(179): Xaa in position 174 to 179 is any amino acid
  Variant (181)..(183): Xaa in position 181 to 183 is any amino acid
  Variant (185)..(187): Xaa in position 185 to 187 is any amino acid
  Variant (189)..(192): Xaa in position 189 to 192 is any amino acid
  Variant (194)..(194): Xaa in position 194 is any amino acid
  Variant (196)..(196): Xaa in position 196 is any amino acid
  Variant (198)..(199): Xaa in position 198 to 199 is any amino acid
  Variant (201)..(203): Xaa in position 201 to 203 is any amino acid
  Variant (206)..(211): Xaa in position 206 to 211 is any amino acid
  Variant (213)..(213): Xaa in position 213 is any amino acid
  Variant (218)..(227): Xaa in position 218 to 227 is any amino acid
  Variant (229)..(232): Xaa in position 229 to 232 is any amino acid
  Variant (234)..(244): Xaa in position 234 to 244 is any amino acid
  Variant (248)..(248): Xaa in position 248 is any amino acid
  Variant (250)..(251): Xaa in position 250 to 251 is any amino acid
  Variant (255)..(255): Xaa in position 255 is any amino acid
  Variant (257)..(258): Xaa in position 257 to 258 is any amino acid
  Variant (260)..(263): Xaa in position 260 to 263 is any amino acid
  Variant (265)..(274): Xaa in position 265 to 274 is any amino acid
  Variant (276)..(277): Xaa in position 276 to 277 is any amino acid

SEQ ID NO: 44248 - protein, 64 aa, Artificial sequence; identical to SEQ ID NO: 9097
  Consensus
  Variant (1)..(1): Xaa in position 1 is Trp, Tyr, Phe, Asn or Leu
  Variant (2)..(13): Xaa in position 2 to 13 is any amino acid
  Variant (14)..(14): Xaa in position 14 is Ile, Leu, Val, Met, Thr or Phe
  Variant (15)..(23): Xaa in position 15 to 23 is any amino acid
  Variant (24)..(24): Xaa in position 24 is Gly, Ala or Ser
  Variant (25)..(27): Xaa in position 25 to 27 is any amino acid
  Variant (28)..(28): Xaa in position 28 is Phe, Tyr or Trp
  Variant (29)..(29): Xaa in position 29 is Glu, Asp or Gly
  Variant (30)..(30): Xaa in position 30 is Gly, Val, Thr or Tyr
  Variant (31)..(31): Xaa in position 31 is any amino acid
  Variant (32)..(32): Xaa in position 32 is Arg, Lys, His, Ala or Pro
  Variant (33)..(38): Xaa in position 33 to 38 is any amino acid
  Variant (39)..(45): Xaa in position 39 to 45 is any or no amino acid
  Variant (46)..(46): Xaa in position 46 is Phe, His, Pro, Val or Leu
  Variant (47)..(50): Xaa in position 47 to 50 is any amino acid
  Variant (51)..(51): Xaa in position 51 is His or Asn
  Variant (52)..(53): Xaa in position 52 to 53 is any amino acid
  Variant (55)..(55): Xaa in position 55 is Leu, Met, Phe, Val or Ile
  Variant (56)..(63): Xaa in position 56 to 63 is any amino acid
  Variant (64)..(64): Xaa in position 64 is Leu, Met, Ile, Phe or Thr

SEQ ID NO: 44249 - protein, 61 aa, Artificial sequence; identical to SEQ ID NO: 9098
  Consensus
  Variant (2)..(2): Xaa in position 2 is any amino acid
  Variant (3)..(3): Xaa in position 3 is Gly or Ser
  Variant (4)..(4): Xaa in position 4 is Ile, Val or Cys
  Variant (5)..(5): Xaa in position 5 is Thr, Ile or Val
  Variant (6)..(6): Xaa in position 6 is Arg, Lys, Gln, Asn or Tyr
  Variant (7)..(8): Xaa in position 7 to 8 is any amino acid
  Variant (9)..(9): Xaa in position 9 is Val, Ile, Leu, Thr, Ala or Met
  Variant (10)..(29): Xaa in position 10 to 29 is any amino acid
  Variant (30)..(44): Xaa in position 30 to 44 is any or no amino acid
  Variant (45)..(45): Xaa in position 45 is Glu or Gly
  Variant (46)..(46): Xaa in position 46 is any amino acid
  Variant (47)..(47): Xaa in position 47 is Phe, Gly, Ile, Trp or Met
  Variant (48)..(48): Xaa in position 48 is any amino acid
  Variant (49)..(49): Xaa in position 49 is Thr, Cys, Ser, Ala or Val
  Variant (50)..(50): Xaa in position 50 is Gly, Ser, Ala or Asn
  Variant (51)..(51): Xaa in position 51 is Thr, Ser, Asn or Ala
  Variant (52)..(54): Xaa in position 52 to 54 is any amino acid
  Variant (55)..(55): Xaa in position 55 is Ile, Val or Leu
  Variant (56)..(57): Xaa in position 56 to 57 is any amino acid
  Variant (58)..(58): Xaa in position 58 is Val, Ile, Met or Leu
  Variant (59)..(60): Xaa in position 59 to 60 is any amino acid
  Variant (61)..(61): Xaa in position 61 is Ile, Val, Leu, Phe or Tyr

SEQ ID NO: 44250 - protein, 55 aa, Artificial sequence; identical to SEQ ID NO: 9099
  Consensus
  Variant (1)..(1): Xaa in position 1 is Trp, Tyr, Phe, Leu or His
  Variant (2)..(2): Xaa in position 2 is any amino acid
  Variant (3)..(3): Xaa in position 3 is Asn, Asp, Glu or Gly
  Variant (4)..(4): Xaa in position 4 is Gly, Asp or Leu
  Variant (5)..(6): Xaa in position 5 to 6 is any amino acid
  Variant (7)..(7): Xaa in position 7 is Val, Leu or Ile
  Variant (8)..(11): Xaa in position 8 to 11 is any amino acid
  Variant (13)..(13): Xaa in position 13 is any amino acid
  Variant (14)..(14): Xaa in position 14 is Val, Ile, Leu or Thr
  Variant (15)..(15): Xaa in position 15 is His or Ser
  Variant (16)..(16): Xaa in position 16 is Val, Ile or Phe
  Variant (17)..(17): Xaa in position 17 is any amino acid
  Variant (18)..(18): Xaa in position 18 is Thr, Asp or Ser
  Variant (19)..(19): Xaa in position 19 is His, Ser, Arg, Trp or Asn
  Variant (20)..(21): Xaa in position 20 to 21 is any amino acid
  Variant (22)..(22): Xaa in position 22 is His, Leu or Gln
  Variant (23)..(23): Xaa in position 23 is Tyr, His or Gly
  Variant (24)..(24): Xaa in position 24 is Gly, Ser or Ala
  Variant (25)..(25): Xaa in position 25 is any amino acid
  Variant (26)..(26): Xaa in position 26 is Ser, Gly, Ala or Thr
  Variant (27)..(27): Xaa in position 27 is Val, Ile, Ala or Thr
  Variant (28)..(28): Xaa in position 28 is Phe, Tyr, Trp or Leu
  Variant (29)..(29): Xaa in position 29 is Glu, Gly or Asp
  Variant (30)..(30): Xaa in position 30 is Gly, Thr or Val
  Variant (31)..(31): Xaa in position 31 is any amino acid
  Variant (32)..(32): Xaa in position 32 is Arg or His
  Variant (33)..(33): Xaa in position 33 is any amino acid
  Variant (34)..(34): Xaa in position 34 is Tyr, Trp, Ile or Leu
  Variant (35)..(38): Xaa in position 35 to 38 is any amino acid
  Variant (39)..(45): Xaa in position 39 to 45 is any or no amino acid
  Variant (46)..(46): Xaa in position 46 is Phe or Leu
  Variant (47)..(47): Xaa in position 47 is Arg, Lys, Phe, Ala or Met
  Variant (48)..(50): Xaa in position 48 to 50 is any amino acid
  Variant (52)..(53): Xaa in position 52 to 53 is any amino acid
  Variant (55)..(55): Xaa in position 55 is Leu, Phe or Met

SEQ ID NO: 44251 - protein, 64 aa, Artificial sequence; identical to SEQ ID NO: 9100
  Consensus
  Variant (1)..(1): Xaa in position 1 is Lys or His
  Variant (2)..(4): Xaa in position 2 to 4 is any amino acid
  Variant (5)..(5): Xaa in position 5 is any or no amino acid
  Variant (6)..(6): Xaa in position 6 is Tyr, Trp or Leu
  Variant (7)..(7): Xaa in position 7 is Leu, Met, Ile, Val or Asn
  Variant (8)..(14): Xaa in position 8 to 14 is any amino acid
  Variant (15)..(15): Xaa in position 15 is any or no amino acid
  Variant (16)..(16): Xaa in position 16 is Ala, Ser or Asp
  Variant (17)..(19): Xaa in position 17 to 19 is any amino acid
  Variant (20)..(20): Xaa in position 20 is Gly, Asn or Asp
  Variant (21)..(22): Xaa in position 21 to 22 is any amino acid
  Variant (23)..(23): Xaa in position 23 is Glu, Asp or Thr
  Variant (24)..(24): Xaa in position 24 is Ala or Gly
  Variant (25)..(25): Xaa in position 25 is Ile, Leu, Met or Phe
  Variant (26)..(26): Xaa in position 26 is any amino acid
  Variant (27)..(27): Xaa in position 27 is Leu, Met or Val
  Variant (28)..(28): Xaa in position 28 is Asp, Asn, Ser or Thr
  Variant (29)..(30): Xaa in position 29 to 30 is any amino acid
  Variant (31)..(31): Xaa in position 31 is Gly or Asp
  Variant (32)..(32): Xaa in position 32 is any amino acid
  Variant (33)..(33): Xaa in position 33 is Val, Ile or Leu
  Variant (34)..(34): Xaa in position 34 is any amino acid
  Variant (36)..(36): Xaa in position 36 is Gly, Ala, Cys or Thr
  Variant (37)..(37): Xaa in position 37 is any amino acid
  Variant (38)..(38): Xaa in position 38 is Gly, Ala or Thr
  Variant (39)..(39): Xaa in position 39 is any amino acid
  Variant (40)..(40): Xaa in position 40 is Asn or Cys
  Variant (41)..(41): Xaa in position 41 is Ile, Leu, Val or Phe
  Variant (42)..(42): Xaa in position 42 is Phe or Trp
  Variant (43)..(43): Xaa in position 43 is any amino acid
  Variant (44)..(44): Xaa in position 44 is Val or Ile
  Variant (45)..(46): Xaa in position 45 to 46 is any amino acid
  Variant (47)..(47): Xaa in position 47 is Gly, Asp, Lys or Asn
  Variant (48)..(48): Xaa in position 48 is any amino acid
  Variant (49)..(49): Xaa in position 49 is Leu, Ile, Val or Ala
  Variant (50)..(50): Xaa in position 50 is any amino acid
  Variant (51)..(51): Xaa in position 51 is Thr or Ser
  Variant (53)..(56): Xaa in position 53 to 56 is any amino acid
  Variant (57)..(58): Xaa in position 57 to 58 is any or no amino acid
  Variant (60)..(60): Xaa in position 60 is any amino acid
  Variant (61)..(61): Xaa in position 61 is Gly or Ser
  Variant (62)..(62): Xaa in position 62 is Ile or Phe
  Variant (64)..(64): Xaa in position 64 is Arg or Gln

SEQ ID NO: 44252 - protein, 20 aa, Artificial sequence
  Consensus
  Variant (1)..(1): Xaa in position 1 is Ala or Phe
  Variant (2)..(2): Xaa in position 2 is Asp, Thr, Ser, Asn or Glu
  Variant (3)..(3): Xaa in position 3 is Glu, Gly or Gln
  Variant (4)..(4): Xaa in position 4 is any amino acid
  Variant (5)..(5): Xaa in position 5 is Phe or Trp
  Variant (6)..(6): Xaa in position 6 is any amino acid
  Variant (7)..(7): Xaa in position 7 is Thr, Ser or Val
  Variant (8)..(8): Xaa in position 8 is Gly, Ser or Asn
  Variant (9)..(9): Xaa in position 9 is Thr or Ser
  Variant (10)..(10): Xaa in position 10 is Ala, Met, Gly, Thr or Val
  Variant (11)..(12): Xaa in position 11 to 12 is any amino acid
  Variant (13)..(13): Xaa in position 13 is Ile, Val, Leu, Ser or Ala
  Variant (14)..(14): Xaa in position 14 is any amino acid
  Variant (15)..(15): Xaa in position 15 is Pro, Trp or Asn
  Variant (16)..(16): Xaa in position 16 is Val or Ile
  Variant (17)..(18): Xaa in position 17 to 18 is any amino acid
  Variant (19)..(19): Xaa in position 19 is Val, Ile or Leu
  Variant (20)..(20): Xaa in position 20 is Asp, Gly, Glu or Asn
XXXXXXXXXXXXXXXXXXXX

SEQ ID NO: 44253 - protein, 37 aa, Artificial sequence; identical to SEQ ID NO: 9103
  Consensus
  Variant (2)..(2): Xaa in position 2 is any amino acid
  Variant (3)..(3): Xaa in position 3 is Ser, Thr, Ala, Gly, Cys or Ile
  Variant (4)..(5): Xaa in position 4 to 5 is any amino acid
  Variant (7)..(7): Xaa in position 7 is Leu, Ile, Val, Met, Phe, Ala or Cys
  Variant (8)..(8): Xaa in position 8 is Phe or Tyr
  Variant (9)..(14): Xaa in position 9 to 14 is any amino acid
  Variant (15)..(20): Xaa in position 15 to 20 is any or no amino acid
  Variant (21)..(21): Xaa in position 21 is Leu, Ile, Val, Met, Phe or Ala
  Variant (22)..(22): Xaa in position 22 is any amino acid
  Variant (24)..(29): Xaa in position 24 to 29 is any amino acid
  Variant (30)..(31): Xaa in position 30 to 31 is any or no amino acid
  Variant (32)..(32): Xaa in position 32 is Leu, Ile, Val or Met
  Variant (33)..(33): Xaa in position 33 is any amino acid
  Variant (34)..(34): Xaa in position 34 is Gly or Ser
  Variant (35)..(35): Xaa in position 35 is Leu, Ile, Val or Met
  Variant (36)..(36): Xaa in position 36 is any amino acid
  Variant (37)..(37): Xaa in position 37 is Lys or Arg

SEQ ID NO: 44254 - DNA, 1647 bp, Escherichia coli
  CDS (1)..(1647)
atgtcaaacaaaccctttatctaccaggcacctttcccgatggggaaagacaataccgaatactatctactcacttccgattacgttagcgttgccgacttcgacggcgaaaccatcctgaaagtggaaccagaagccctgaccctgctggcgcagcaagcctttcacgacgcttcttttatgctccgcccggcacaccagaaacaggttgcggctattcttcacgatccagaagccagcgaaaacgacaagtacgtggcgctgcaattcttaagaaactccgaaatcgccgccaaaggcgtgctgccgacctgccaggataccggcaccgcgatcatcgtcggtaaaaaaggccagcgcgtgtggaccggcggcggtgatgaagaaacgctgtcgaaaggcgtctataacacctatatcgaagataacctgcgctattcacagaatgcggcgctggacatgtacaaagaggtcaacaccggcactaacctgcctgcgcaaatcgacctgtacgcggtagatggcgatgagtacaaattcctttgcgttgcgaaaggcggcggctctgccaacaaaacgtatctctaccaggaaaccaaagccctgctgactcccggcaaactgaaaaacttcctcgtcgagaaaatgcgtaccctcggtactgcagcctgcccgccgtaccatatcgcgtttgtgattggcggtacgtctgcggaaaccaacctgaaaaccgtcaagttagcaagcgctcactattacgatgaactgccgacggaagggaacgaacatggtcaggcgttccgcgatgtccagctggaacaggaactgctggaagaggcccagaaactcggtcttggcgcgcagtttggcggtaaatacttcgcgcacgacattcgcgttatccgtctgccacgtcacggcgcatcctgcccggtcggcatgggcgtctcctgctccgctgaccgtaacattaaagcgaaaatcaaccgcgaaggtatctggatcgaaaaactggaacacaacccaggccagtacattccacaagaactgcgccaggccggtgaaggcgaagcggtgaaagttgaccttaaccgcccgatgaaagagatcctcgcccagctttcgcaatacccggtatccactcgtttgtcgctcaccggcaccattatcgtgggccgagatattgcacacgccaagctgaaagagctgattgacgccggtaaagaacttccgcagtacatcaaagatcacccgatctactacgcgggtccggcgaaaacccctgccggttatccatcaggttcacttggcccaaccaccgcaggccgtatggactcctacgtggatctgctgcaatcccacggcggcagcatgatcatgctggcgaaaggtaaccgcagtcagcaggttaccgacgcgtgtcataaacacggcggcttctacctcggtagcatcggcggtccggcggcggtactggcgcagcagagcatcaagcatctggagtgcgtcgcttatccggagctgggtatggaagctatctggaaaatcgaagtagaagatttcccggcgtttatcctggtcgatgacaaaggtaacgacttcttccagcaaatcgtcaacaaacagtgcgcgaactgcactaagtaa

SEQ ID NO: 44255 - protein, 548 aa, Escherichia coli
MSNKPFIYQAPFPMGKDNTEYYLLTSDYVSVADFDGETILKVEPEALTLLAQQAFHDASFMLRPAHQKQVAAILHDPEASENDKYVALQFLRNSEIAAKGVLPTCQDTGTAIIVGKKGQRVWTGGGDEETLSKGVYNTYIEDNLRYSQNAALDMYKEVNTGTNLPAQIDLYAVDGDEYKFLCVAKGGGSANKTYLYQETKALLTPGKLKNFLVEKMRTLGTAACPPYHIAFVIGGTSAETNLKTVKLASAHYYDELPTEGNEHGQAFRDVQLEQELLEEAQKLGLGAQFGGKYFAHDIRVIRLPRHGASCPVGMGVSCSADRNIKAKINREGIWIEKLEHNPGQYIPQELRQAGEGEAVKVDLNRPMKEILAQLSQYPVSTRLSLTGTIIVGRDIAHAKLKELIDAGKELPQYIKDHPIYYAGPAKTPAGYPSGSLGPTTAGRMDSYVDLLQSHGGSMIMLAKGNRSQQVTDACHKHGGFYLGSIGGPAAVLAQQSIKHLECVAYPELGMEAIWKIEVEDFPAFILVDDKGNDFFQQIVNKQCANCTK

SEQ ID NO: 44256 - DNA, 1545 bp, Mesorhizobium loti MAFF303099
  CDS (1)..(1545): transl_table=11
gtgggaaatagaacacggaccatagccggcaaggacatcacaaggagcgtggccgacgcccttcagtacatctcgtactaccatcctccagattatatccggtctctttcgcaggcctacgcgcgcgaacagagtccagcggcgaagaacgcaatagggcagattctgctgaactcccgcatggcggccttcgggcggcggccgatctgccaggacaccggccttgtggtcgtcttcgcgaaggtcggcatggaaacccgcatcaaatcaacgatcagtttcgcagacctcgtgaacgagggcgtccgtcaggcatatctcgacccggacaatccccttcgggcctcgatcgttgccgatccgctcgccggacgggtcaatactcgtgacaacacgccggcggtcgtccacgttgaccttgtacaaggtaaccagattgagatcaccattgccgcaaaaggcggcgggtcagagaacaaagcacgttttaccaccttgaaccccagcgcctccgtttccgactgggtgattgacacagtatcgacgcttggcagtgggtggtgtccgcccggcctgatctccgtcggcatcggtggtagcgctgaaaaggcgatgctgctggccaaggaggccatgaacaagcccatcgacatgtcggaactaatcgccagggggccgtcaagcgcggaggaggcattgcggattgagctttatgagcggattaacgcgctgggcatcggcgcccaaggcctcggtggcctgacgacagtcgtcgatgtcaaggttgcgacgtatcctacccatgcggcgtccaagcccgtggcgctcattccgcaatgcgccgccaaccggcacctgaagtttaccttggatggctccggaccaatcagggtgcagccgcccgatttgtgcgaatggcccgacattggaaccgacgaattgagtccagccggcgtgcgaagagtcaacctcgatgcgttgaccaaggaagagacggcatcgtggcgctgtggtgaaacgctccttctgtccggaaagatgctgacaggccgtgacgccgcccacaagcgaatggtcgagctgatcgacgccggcaaaccgcttccgttcgatctgcagggacgcgtgatatactacgttggacccgtccgcgccgtgcgagatgaggtcgtcggaccggctggcccaacaacctccagccgcttggacgattttacggacaaggtgctcgccgaaaccgggcttttcgcgatggtgggcaaagcggagaggggacgagcggccatcgagtcgatcgtaagacataaaacgccgtatctcatcgcagtgggtggggctgcctacctgatatcaaaatcaattaagtcagcgcggctcattgccttcgaagacctgggtatggaagcagtctatgaattcgaggtgcaggatatgcccgtgatcatggctgtcgatgttgatggaaactccattcacaattcagggcctcttgagtggcgcaagcgcatggcggccgacagcatcgcacgcaacatcggcgtttga

SEQ ID NO: 44257 - protein, 514 aa, Mesorhizobium loti MAFF303099
MGNRTRTIAGKDITRSVADALQYISYYHPPDYIRSLSQAYAREQSPAAKNAIGQILLNSRMAAFGRRPICQDTGLVVVFAKVGMETRIKSTISFADLVNEGVRQAYLDPDNPLRASIVADPLAGRVNTRDNTPAVVHVDLVQGNQIEITIAAKGGGSENKARFTTLNPSASVSDWVIDTVSTLGSGWCPPGLISVGIGGSAEKAMLLAKEAMNKPIDMSELIARGPSSAEEALRIELYERINALGIGAQGLGGLTTVVDVKVATYPTHAASKPVALIPQCAANRHLKFTLDGSGPIRVQPPDLCEWPDIGTDELSPAGVRRVNLDALTKEETASWRCGETLLLSGKMLTGRDAAHKRMVELIDAGKPLPFDLQGRVIYYVGPVRAVRDEVVGPAGPTTSSRLDDFTDKVLAETGLFAMVGKAERGRAAIESIVRHKTPYLIAVGGAAYLISKSIKSARLIAFEDLGMEAVYEFEVQDMPVIMAVDVDGNSIHNSGPLEWRKRMAADSIARNIGV

SEQ ID NO: 44258 - DNA, 1539 bp, Bacillus halodurans C-125
  CDS (1)..(1539): transl_table=11
atggagaaactgcaggaaagcatgtatcaactcatcgtcgaaacgtcaaccaatttaccgaatgatgtgcgccgtgcgattgcagaagcaaaggcaaaagagaacgctggaacacgggcagcactttctttatcgaccataacagaaaacattaaaatggccgatgaaaatatctctccaatctgtcaagatactgggatgccaacatttgaaataaaggttcccgttggcgtcaaccaaattgagatgaagaaggcgatctatgcagccattgaacaggcaacaaaagatggaaagcttcgtcccaattctgttgattcgctaacagggaaaaatagtggcaacaaccttggagaaggaacgccggtcatccattttgaacaatgggaagaggattacattgatgcccgcttgatcctaaagggaggcggctgtgaaaacaaaaacattcaatatagcttacctgctgaactagaaggtttaggccgtgctggacgtgaccttgacggaatccgtaaatgcattatgcactcggtataccaagctcaaggacaaggctgtagcgctggttttatcggtgttggtattggcggagaccggacaacgagctatagccttgcgaaggagcagctgttccgcaaagtcgatgatgtgaatccgaatgacgacttgcgaaagctcgaagaatacgtattagagaatgcaaataaacttgggatcggtacgatgggctttggtggagaagcaacccttttaggctgtaaggtcggggcgatgaaccgtctcccagcaagcttttttgtctctgttgcgtacaactgctgggcgtttcgtcgtctcggcgtcgagctagacgcggaaaccggtgagattaaaaaatggctctacaaagatggtgaacgagtcgacttaaatgaagtggcaagccaagtcgctgcaaccgctgagacaacggaagtacgtgaggttgtgcttgaagcgccagttacagaagagcaaattcgggaattaaaggtcggggatgtcgttattattaatggcatgcttcacaccggtcgagatgcgatccaccatcacttaatggatcatgatgcaccgatcgacttggacggacaaatcatttaccactgcggaccggtcatgctccaagatgacgcaggggaatggcatgtaaaggcagcaggtccaacgacaagtattcgtgaagagccgtaccaaggagacattatgaaaaaattcggcattcgtgcagtcattggaaaaggtggcatgggaccaaaaacattgaaagccttacaggagcatggcggtgtgtatttgaatgcgattggcggcgctgctcaatattatgcggactgtattaagaaagtgaagggtgtcgacttaatggaatttggaattcctgaagcgatgtggcatttagaagtggaagggttcgcagcgattgtgacgatggattctcatggaaatagtcttcacgaagatgtcgataaatcatcacttgaaaagctcgaacaatttgcagaaaaggtcttttaa

SEQ ID NO: 44259 - protein, 512 aa, Bacillus halodurans C-125
MEKLQESMYQLIVETSTNLPNDVRRAIAEAKAKENAGTRAALSLSTITENIKMADENISPICQDTGMPTFEIKVPVGVNQIEMKKAIYAAIEQATKDGKLRPNSVDSLTGKNSGNNLGEGTPVIHFEQWEEDYIDARLILKGGGCENKNIQYSLPAELEGLGRAGRDLDGIRKCIMHSVYQAQGQGCSAGFIGVGIGGDRTTSYSLAKEQLFRKVDDVNPNDDLRKLEEYVLENANKLGIGTMGFGGEATLLGCKVGAMNRLPASFFVSVAYNCWAFRRLGVELDAETGEIKKWLYKDGERVDLNEVASQVAATAETTEVREVVLEAPVTEEQIRELKVGDVVIINGMLHTGRDAIHHHLMDHDAPIDLDGQIIYHCGPVMLQDDAGEWHVKAAGPTTSIREEPYQGDIMKKFGIRAVIGKGGMGPKTLKALQEHGGVYLNAIGGAAQYYADCIKKVKGVDLMEFGIPEAMWHLEVEGFAAIVTMDSHGNSLHEDVDKSSLEKLEQFAEKVF

SEQ ID NO: 44260 - DNA, 1524 bp, Pseudomonas aeruginosa PAO1
  CDS (1)..(1524): transl_table=11
atggccgtgatcaagcaagacgacctgatccagagcgtcgccgatgccctgcagttcatctcctactaccacccggtcgatttcatccaggccatgcatgaggcctacctgcgcgaagaatcgccggctgcccgcgactccatggcgcagatcctgatcaactcgcgcatgtgcgccaccggccaccgcccgatctgccaggacaccgggatcgtcaccgtgttcgtccgggtcggcatggacgtgcgctgggacggcgctaccatgagcgtcgacgatatgatcaacgaaggcgtgcgtcgcgcctacaacctgccggagaacgtcctgcgcgcctcgatcctggccgacccggccggcgcgcggaagaacaccaaggacaacacgccggcggtgatccactactccatcgttcccggcgacaaggtcgaagtcgatgtcgcggccaagggcggcggctcggagaacaagtcgaagatggccatgctcaacccgtccgactcgatcgtcgactgggtgctgaaaaccgtaccgaccatgggcgccggctggtgcccgccgggcatgctcggcatcggcatcggcggcaccgcggagaaagcagcggtgatggcgaaggaagtcctcatggacccgatcgacatccacgaactgaaggcccgcggcccgcagaaccgcatcgaggaactgcgcctggagctgttcgagaaggtcaaccagttgggcatcggtgcccagggcctgggcggcctgaccaccgtgctcgacgtcaagatcatggactacccgacccacgccgcctcgctgccggtgtgcatgatccccaactgcgccgcgacccgccacgcccacttcgtgctcgacggctccggccccgccgaactggaagcgccgtcgctcgacgcctacccggagatcgtctgggaagccggcccgtccgcgcgccgcgtcgacctggacaagatcaccccggaagaggtgcaaagctggaaaccgggcgagaccctgctgctcaacggcaagatgctcaccggccgcgacgccgcgcacaagcgcatggtcgacatgctgaacaagggcgaaacgctgccggtggacctgaaaggccgcttcatctattacgtcggcccggtcgatccggtcggcgacgaggtggtcggcccggccggtcccaccaccgccacccggatggacaagttcacccgccagatcctcgaacagaccggcctgctgggcatgatcggcaagtccgagcgcggtcccatcgccatcgaggcgatcaaggacaacaaggcggtatacctgatggccgtcggcggcgccgcctacctggtcgcccaggcgatcaagaagtccaaggtgctggccttcgccgaactgggcatggaagcgatctacgagttcgaggtaaaggacatgccggtcaccgtcgcggttgacaccaacggcgagtcggtgcacatcaccggcccagcggtctggcagaagaagatcgccgaaagcctggcggtcgaggtcaagtaa

SEQ ID NO: 44261 - protein, 507 aa, Pseudomonas aeruginosa PAO1
MAVIKQDDLIQSVADALQFISYYHPVDFIQAMHEAYLREESPAARDSMAQILINSRMCATGHRPICQDTGIVTVFVRVGMDVRWDGATMSVDDMINEGVRRAYNLPENVLRASILADPAGARKNTKDNTPAVIHYSIVPGDKVEVDVAAKGGGSENKSKMAMLNPSDSIVDWVLKTVPTMGAGWCPPGMLGIGIGGTAEKAAVMAKEVLMDPIDIHELKARGPQNRIEELRLELFEKVNQLGIGAQGLGGLTTVLDVKIMDYPTHAASLPVCMIPNCAATRHAHFVLDGSGPAELEAPSLDAYPEIVWEAGPSARRVDLDKITPEEVQSWKPGETLLLNGKMLTGRDAAHKRMVDMLNKGETLPVDLKGRFIYYVGPVDPVGDEVVGPAGPTTATRMDKFTRQILEQTGLLGMIGKSERGPIAIEAIKDNKAVYLMAVGGAAYLVAQAIKKSKVLAFAELGMEAIYEFEVKDMPVTVAVDTNGESVHITGPAVWQKKIAESLAVEVK

SEQ ID NO: 44262 - DNA, 1524 bp, Neisseria meningitidis MC58
  CDS (1)..(1524): transl_table=11
atgaccgtcatcaaacaggaagactttatccaaagcatttgcgatgccttccaattcatcagctactatcatcccaaagactacatcgacgcgctttataaggcgtggcagaaggaagaaaatcctgccgccaaagacgcgatgacgcagattttggtcaacagccgtatgtgtgcggaaaacaaccgccccatctgccaagacacaggtatcgcaaccgtcttcctcaaagtcggtatgaacgtccaatgggatgcggacatgagcgtggaagagatggttaacgaaggcgtacgccgcgcctacacttgggaaggcaatacgctgcgcgcttccgtcctcgccgatccggccggcaaacgccaaaacaccaaagacaacacccccgccgtcatccatatgagcatcgtgccgggcggtaaagtcgaagtaacctgcgcggcaaaaggcggcggctctgaaaacaaatccaaactcgccatgctcaatccttccgacaacatcgtcgattgggtattgaaaaccatcccgaccatgggcgcgggctggtgtcctcccggcatcttgggtatcggcatcggcggcacgcccgaaaaagccgtgctgatggcaaaagagtccctgatgagccacatcgacattcaagaattgcaggaaaaggccgcgtccggcgcggaattgtccaccaccgaagccctgcgcctcgaactctttgaaaaagtcaacgcgctgggcatcggcgcacaaggcttgggcggactgaccaccgtgttggacgtgaaaatcctcgattatccgacccacgccgcctccaaaccgattgccatgattccgaactgcgccgccacccgccacgtcgaatttgaattggacggctcaggccctgtcgaactcacgccgccgcgcgtcgaagactggcccgatttgacttacagccccgacaacggcaaacgcgtcgatgtcgacaagctgaccaaagaagaagtggcaagctggaaaaccggcgacgtattgctgttgaacggcaaaatcctcaccggccgcgatgccgcacacaaacgcctcgtcgatatgctcaacaaaggcgaagaattgcccgtcgatttcaccaaccgcctgatttactacgtcggccccgtcgatccggtcggcgatgaagtcgtcggtccggcaggtccgaccacagccacccgcatggacaaattcacccgccaaatgctcgaacaaaccgacctcttgggcatgatcggcaaatccgagcgcggcgtggccacctgcgaagccatcgccgacaacaaagccgtgtacctcatggcagtcggcggcgcggcgtatctcgtggcaaaagccatcaaatcttccaaagtcttggcgttccccgaattgggcatggaagccatttacgaatttgaagtcaaagacatgcccgtaaccgtcgccgtagatagcaaaggcgaatccatccacgccaccgccccgcgcaaatggcaggcgaaaatcggcatcatccccgtcgaatcttga

SEQ ID NO: 44263 - protein, 507 aa, Neisseria meningitidis MC58
MTVIKQEDFIQSICDAFQFISYYHPKDYIDALYKAWQKEENPAAKDAMTQILVNSRMCAENNRPICQDTGIATVFLKVGMNVQWDADMSVEEMVNEGVRRAYTWEGNTLRASVLADPAGKRQNTKDNTPAVIHMSIVPGGKVEVTCAAKGGGSENKSKLAMLNPSDNIVDWVLKTIPTMGAGWCPPGILGIGIGGTPEKAVLMAKESLMSHIDIQELQEKAASGAELSTTEALRLELFEKVNALGIGAQGLGGLTTVLDVKILDYPTHAASKPIAMIPNCAATRHVEFELDGSGPVELTPPRVEDWPDLTYSPDNGKRVDVDKLTKEEVASWKTGDVLLLNGKILTGRDAAHKRLVDMLNKGEELPVDFTNRLIYYVGPVDPVGDEVVGPAGPTTATRMDKFTRQMLEQTDLLGMIGKSERGVATCEAIADNKAVYLMAVGGAAYLVAKAIKSSKVLAFPELGMEAIYEFEVKDMPVTVAVDSKGESIHATAPRKWQAKIGIIPVES

SEQ ID NO: 44264 - DNA, 1641 bp, Neisseria meningitidis Z2491
  CDS (1)..(1641): transl_table=11
ttgtctttaccgtacaaacgctggcactatttcaacctgataaaaaacagccttcaaaaaggttgtttaaaacagcagcagacacttaccgccacaaccttgaaaaggaacacaatcatgaccgtcatcaaacaggaagactttatccaaagcatttgcgatgccttccaattcatcagctactaccatcccaaagactacatcgacgcgctttataaggcgtggcagaaggaagaaaaccccgccgccaaagacgcgatgacgcagattttggtcaacagccgcatgtgtgccgaaaacaaccgccccatctgccaagataccggtatcgcgaccgtgtttttgaaagtcggtatggatgtgcaatgggatgcagacatgagcgtcgaagagatggttaacgaaggcgtgcgccgcgcctacacttgggaaggcaatacgctgcgcgcttccgttctcgccgaccccgccggcaaacgccaaaataccaaagacaacacgcccgccgtcatccatatgagcatcgtgccgggcgacaaagtcgaagtaacctgcgcggcaaaaggcggcggttctgaaaacaaatccaaactcgccatgctcaacccttccgacaacatcgtcgattgggtattgaaaaccattccgaccatgggcgcgggctggtgtcctcccggcatcttgggcatcggcatcggcggtacgcccgaaaaagccgtgttgatggcgaaagaatccctgatgagccacatcgacatccaagaattgcaggaaaaagccgcgtccggcgcggaattgtccaccaccgaagccctgcgcctcgaactctttgaaaaagtcaacgcgctaggcatcggcgcgcaaggcttgggcggtctgaccaccgtgttggacgtgaaaatcctcgattacccgacccacgccgcctccaaaccgattgccatgattccgaactgcgccgccacccgccacgtcgaatttgaattggacggctcaggccctgtcgaactcacgccgccgcgcgtcgaagactggcccgatttgacttacagccccgacaacggcaaacgcgtcgatgtcgacaagctgaccaaagaagaagtggcaagctggaaaaccggcgacgtattgctgttgaacggcaaaatcctcaccggccgcgatgccgcacacaaacgcctcgtcgatatgctcgacaaaggcgaagaattgcccgtcgatttcaccaaccgcctgatttactacgtcggccccgtcgatccggtcggcgacgaaatcgtcggcccagcaggtccgaccaccgccacccgcatggacaaattcacccgccaaatgctcgaacaaaccgacctcttgggcatgatcggcaaatccgagcgcggcgcggccacctgcgaagccatcgccgacaacaaagccgtgtacctcatggcagtcggcggcgcggcgtatctcgtggcaaaagccatcaaatcttccaaagtcttggcgttccccgaattgggcatggaagccatttacgaatttgaagtcaaagacatgcccgtaaccgtcgccgtagacagcaaaggcgaatccatccacgccaccgccccgccccaatggcaggcgaaaatcggcatcatccccgtcaaatcttga

SEQ ID NO: 44265 - protein, 546 aa, Neisseria meningitidis Z2491
MSLPYKRWHYFNLIKNSLQKGCLKQQQTLTATTLKRNTIMTVIKQEDFIQSICDAFQFISYYHPKDYIDALYKAWQKEENPAAKDAMTQILVNSRMCAENNRPICQDTGIATVFLKVGMDVQWDADMSVEEMVNEGVRRAYTWEGNTLRASVLADPAGKRQNTKDNTPAVIHMSIVPGDKVEVTCAAKGGGSENKSKLAMLNPSDNIVDWVLKTIPTMGAGWCPPGILGIGIGGTPEKAVLMAKESLMSHIDIQELQEKAASGAELSTTEALRLELFEKVNALGIGAQGLGGLTTVLDVKILDYPTHAASKPIAMIPNCAATRHVEFELDGSGPVELTPPRVEDWPDLTYSPDNGKRVDVDKLTKEEVASWKTGDVLLLNGKILTGRDAAHKRLVDMLDKGEELPVDFTNRLIYYVGPVDPVGDEIVGPAGPTTATRMDKFTRQMLEQTDLLGMIGKSERGAATCEAIADNKAVYLMAVGGAAYLVAKAIKSSKVLAFPELGMEAIYEFEVKDMPVTVAVDSKGESIHATAPPQWQAKIGIIPVKS

SEQ ID NO: 44266 - DNA, 1656 bp, Xylella fastidiosa 9a5c
  CDS (1)..(1656): transl_table=11
ttggaagaaaatttaagcgataagcggggtagggatgtaagcggtttcagtggggggatcgcaatgtttatcctatggctgatgtattcagggggattacaatggcaacgttttttagtcagccataagggccagccggtgtcattgatcaaacaagaagactttatccagtccatcgctgatgcgctgcaatacatcagttactaccatccggtcgattacatcaagactctggttttggcgtatgagcgcgaggaatcgcccgccgctaaagatgcaatggcgcagattttgattaactcacgtatgtgtgcggaggggcgccgcccgatttgccaagatacagggattgtcacggtgttccttagcatcgggatggaggtacgttgggatgacgtcacgatggatgtggaagagatggtgaatgagggggttcgccgtgcctatcgtcatccggataacacgctacgtgcgtctgtgcttgctgatcctgccggcaagcgctgcaatacgagggacaatacgccagcagtcgttaacgtcaaggttgtttctgggggccatgttgaagtgattgttgctgccaagggagggggatcggaggccaagagcaaatttgcaatgctaaatccatcggattccatcgttgattgggtcctggacactgtgccaaccatgggggctggctggtgcccaccagggatgcttgggatcggtatcggtggtacggctgagaaagcgatgctgctcgctaaggaagcgttgatggaaccgattgacatccaggatttgatggtacgcggcccttccaatcgtgctgaagaattacgcttggagttgtacgagaaggtcaatgctttggggatcggtgctcagggggtgggtggggtgacgacggtattagacattaaagtcaaagattatccaacgcatgctgctaatttgccggtagcgatgatccctaattgtgcgtccacacgccatgcccatttcacattggacggtagcggtccagttgctctggaaccgccgtcattagagcattggcctaagttgagctatctcccggagtctgcccgccaggtgaatttgaatacgatgaccagggatgaggtggcgcagttcaaaccaggtgaggtgttgctactcagcggcaaattgttgacggggcgagatgctgcgcataagcgtatcgttgagatgctcaacaagggggagacattaccagttgatttcacgaatcgctttatctactacgtgggtccggtggatcctgtgcgtgatgaagtcgtcggtcctgcgggtccaaccacagcaacgcgtatggataagttcacgcgtcagatgctggagcaggccgggttgctcggtatggtgggcaaggccgagcgtggccctactgccatcgctgcaatccgtgacaacaaagccgtgtatctgatggcggtgggaggggcggcttatcttgtgtccaaggcgatcaaaacgagccggatactggcttttgaagatcttggcatggaggcaatttatgagtttgaagtcaaggagatgcctgtaacagtggcggttgattgcaacggtgagtcgatacatacaactgggccgcgtgagtggcggagccggatcggaaaaattccggttgttgtggagtag

SEQ ID NO: 44267 - protein, 551 aa, Xylella fastidiosa 9a5c
MEENLSDKRGRDVSGFSGGIAMFILWLMYSGGLQWQRFLVSHKGQPVSLIKQEDFIQSIADALQYISYYHPVDYIKTLVLAYEREESPAAKDAMAQILINSRMCAEGRRPICQDTGIVTVFLSIGMEVRWDDVTMDVEEMVNEGVRRAYRHPDNTLRASVLADPAGKRCNTRDNTPAVVNVKVVSGGHVEVIVAAKGGGSEAKSKFAMLNPSDSIVDWVLDTVPTMGAGWCPPGMLGIGIGGTAEKAMLLAKEALMEPIDIQDLMVRGPSNRAEELRLELYEKVNALGIGAQGVGGVTTVLDIKVKDYPTHAANLPVAMIPNCASTRHAHFTLDGSGPVALEPPSLEHWPKLSYLPESARQVNLNTMTRDEVAQFKPGEVLLLSGKLLTGRDAAHKRIVEMLNKGETLPVDFTNRFIYYVGPVDPVRDEVVGPAGPTTATRMDKFTRQMLEQAGLLGMVGKAERGPTAIAAIRDNKAVYLMAVGGAAYLVSKAIKTSRILAFEDLGMEAIYEFEVKEMPVTVAVDCNGESIHTTGPREWRSRIGKIPVVVE

SEQ ID NO: 44268 - DNA, 1647 bp, Escherichia coli K12
  CDS (1)..(1647): transl_table=11
atgtcaaacaaaccctttcattatcaggctccttttccactcaaaaaagatgatactgagtattacctgctaaccagcgaacacgttagcgtatctgaatttgaagggcaggagattttgaaagtcgcacccgaagcgttaactctgttggcgcgccaggcgtttcatgatgcgtcgttcatgctgcgtccggcgcaccaacaacaggtggccgacattctgcgtgacccggaggccagcgaaaatgataaatatgtggcgctgcaattcctgcgtaactccgacatcgcggcgaaaggcgttctgccaacctgtcaggataccggcaccgcgattattgttggtaaaaaagggcagcgtgtatggaccggtggtggtgatgaagcggcgctggcgcgcggtgtctataacacttatatcgaagataatctgcgctactcgcaaaacgcgccgctggatatgtataaagaagtgaataccggcaccaatctgccagcgcagatcgatctttatgccgttgatggcgacgaatacaaattcctctgtatcgccaaaggtggtggttcggcaaacaagacgtatctctatcaggaaaccaaagcgttactgacgccggggaaactgaaaaattacctggttgagaagatgcgcacgctgggtacggcggcctgtcctccgtatcatattgcgttcgttattggtggaacttctgcagaaacgaaccttaaaacggtgaaactggcttccgcgaaatactatgatgaactgccaacggaagggaatgagcacggtcaggcgttccgcgatgtggaactggaaaaagaattgctgatcgaagcgcaaaatcttggtctgggtgcgcagtttggtggtaaatacttcgctcacgacatccgcgtgattcgcctgccacgtcacggcgcatcctgcccggtcggtatgggcgtctcctgctctgctgaccgtaatatcaaagcgaagatcaaccgtcaggggatctggatcgaaaaactggaacataatccaggcaaatatatcccggaagagctgcgcaaagcgggagaaggcgaagcggtgcgcgttgaccttaaccgtccgatgaaagagatcctcgcacagttgtcgcagtatcccgtttctacacgcttatcgcttaacggcacgattatcgtcggtcgtgatattgctcacgccaaactgaaagagcggatggataacggtgaagggctgccgcagtacatcaaagatcatccgatttactacgcgggtccggccaaaacgccggaaggttatgcctccggttctcttggcccaacgaccgccggacggatggattcttatgtcgatcaactgcaagcgcagggcggaagtatgatcatgctggcgaaaggcaaccgcagccagcaggtgacggatgcctgtaaaaaacacggcggcttctaccttggcagtatcggtggtccggccgctgtattggcgcagggaagtattaagagcctggaatgtgttgaatatccggaactgggaatggaagccatctggaaaattgaagtggaagatttcccggcgtttatccttgtggatgataaaggaaatgacttcttccagcagatacaactcacacaatgcacccgctgtgtgaaataa

SEQ ID NO: 44269 - protein, 548 aa, Escherichia coli K12
MSNKPFHYQAPFPLKKDDTEYYLLTSEHVSVSEFEGQEILKVAPEALTLLARQAFHDASFMLRPAHQQQVADILRDPEASENDKYVALQFLRNSDIAAKGVLPTCQDTGTAIIVGKKGQRVWTGGGDEAALARGVYNTYIEDNLRYSQNAPLDMYKEVNTGTNLPAQIDLYAVDGDEYKFLCIAKGGGSANKTYLYQETKALLTPGKLKNYLVEKMRTLGTAACPPYHIAFVIGGTSAETNLKTVKLASAKYYDELPTEGNEHGQAFRDVELEKELLIEAQNLGLGAQFGGKYFAHDIRVIRLPRHGASCPVGMGVSCSADRNIKAKINRQGIWIEKLEHNPGKYIPEELRKAGEGEAVRVDLNRPMKEILAQLSQYPVSTRLSLNGTIIVGRDIAHAKLKERMDNGEGLPQYIKDHPIYYAGPAKTPEGYASGSLGPTTAGRMDSYVDQLQAQGGSMIMLAKGNRSQQVTDACKKHGGFYLGSIGGPAAVLAQGSIKSLECVEYPELGMEAIWKIEVEDFPAFILVDDKGNDFFQQIQLTQCTRCVK

SEQ ID NO: 44270 - DNA, 1524 bp, Ralstonia solanacearum GMI1000
  CDS (1)..(1524): transl_table=11
atgaccgtcattcgtcaagaagacctcatccagagcgtcgccgactccctgcagtacatcagctattaccacccgatggactacatcactgctctgggccaggcctatgagcaggagcagagcccggccgccaaggatgccatcgcgcagatcctgaccaacagccgcatgtgcgccgaaggcaagcgcccgatctgccaggacaccggcatcgtcaccgtgttcctgaaagtcggcatgaacgtgcgctgggacggcgccacgatgagcctggaagacatggtcaacgaaggcgtgcgccgcgcctataacgaccaggacaacaagctgcgcgccagcgtcctggccgacccggccggcaagcgcaccaacacgaaggacaacaccccggcggtgatcaacatgtccatcgtgccgggcgacacagtggacgtgatcgtcgcggccaagggcggcggctccgaggccaagtccaagttcgtgatgctcaacccgtccgactcgatcgtcgactgggtgctcaagacggtgccgaccatgggcgccggctggtgcccgccgggcatgctgggcatcggcatcggcggcaccgccgagaaggcgatgctgctggccaaggaagccctgatggagccgatcgacatccaggacctgatcgcgcgcggcccgtcgaaccgcgccgaagagctgcgcatcgagctctacgaaaaggtcaacgcactgggtatcggggcccagggcctgggcggcctcgccaccgtgctcgacgtgaagatcaaggactacccgacccacgccgccaacctgccggtggccatgatcccgaactgcgcggccacccgccacgcgcacttcacgctggacggcagcggcgtcgccaagctcgaagcgccggacctgtcgcaatggccgaaggtcgagtgggcgccgaacaccgaaacctccaagcgcgttgatctgaacgcgctcacgccggaagaagtcgcctcgtggaagccgggccaaaccctgctgctcaacggcaagatgctcacgggccgcgacgccgcgcacaagcgcatcgccgacatgctggcccgcggcgaacagttgccgatcgacttcaccaaccgcgtgatctactacgtcggcccggtcgatccggtgcgcgacgaggtggtcggtccggccggccccaccacggccacgcgcatggacaagttcaccgagacgatgctcgccaagaccggcctgatcgccatggtcggcaaggccgagcgcggtccggtcgccatcgaggccatccagaagcacaagtcggcctacctgatggccgtgggcggcgcggcctaccttgtgtccaaggccatccgcggcgcgaaggtgctggcattcgaagacctgggcatggaagccatctacgaattcgacgtgaaggacatgcccgtcaccgtggcggtcgacagcgcgggcacctcggtgcacaagaccggcccggcggaatggcaggccaagatcggcaagatcccggtcgccgcggcgtga

SEQ ID NO: 44271 - protein, 507 aa, Ralstonia solanacearum GMI1000
MTVIRQEDLIQSVADSLQYISYYHPMDYITALGQAYEQEQSPAAKDAIAQILTNSRMCAEGKRPICQDTGIVTVFLKVGMNVRWDGATMSLEDMVNEGVRRAYNDQDNKLRASVLADPAGKRTNTKDNTPAVINMSIVPGDTVDVIVAAKGGGSEAKSKFVMLNPSDSIVDWVLKTVPTMGAGWCPPGMLGIGIGGTAEKAMLLAKEALMEPIDIQDLIARGPSNRAEELRIELYEKVNALGIGAQGLGGLATVLDVKIKDYPTHAANLPVAMIPNCAATRHAHFTLDGSGVAKLEAPDLSQWPKVEWAPNTETSKRVDLNALTPEEVASWKPGQTLLLNGKMLTGRDAAHKRIADMLARGEQLPIDFTNRVIYYVGPVDPVRDEVVGPAGPTTATRMDKFTETMLAKTGLIAMVGKAERGPVAIEAIQKHKSAYLMAVGGAAYLVSKAIRGAKVLAFEDLGMEAIYEFDVKDMPVTVAVDSAGTSVHKTGPAEWQAKIGKIPVAAA

SEQ ID NO: 44272 - DNA, 1677 bp, Streptomyces coelicolor A3(2)
  CDS (1)..(1677)
atgggcgagatgcctgagttcgcgtacaccgatctgctcccccagggcgaggacaccactccgtaccggctggtgaccgccgagggtgtcgccaccttcgaggccgacgggcggaccttcctcaaggtggagccggaggccctgcgcaagctggccgaggaggccgttcacgacatccagcactacctgcgcccggcgcacctggcacagctgcgccgcatcatcgacgacccggaggcgtccggcaacgacaagttcgtcgccctggacctgctgaagaacgcgaacatcgcggctgcgggcgtgctgccgatgtgccaggacaccggcacggcgatcgtcatgggcaagcgcggccagaacgtgctcaccgagggcggtgacgaggaggccctgagccggggcatctacgacgcgtacaagaacctgaacctgcgctactcccagatggccccgctgaccatgtgggaggagaagaacaccggctccaacctccccgcccagatcgagctgtacgcgaccgacggcggcgcctacaagttcctcttcatggcgaagggcggcggctcggccaacaagtccttcctctaccaggagacgaaggccgtcctgaacgagtcctccatgatgaagttcctggaggagaagatccgctcgctcggcacggccgcctgcccgccgtaccacctggcgatcgtggtcggcggcacgtcggccgagtacgcgctgaagaccgcgaagtacgcctccgcgcactacctggacgagatcccggccgagggctcggagctcgggcacggcttccgggacaaggagctggaggagaaggtcttcgagctgacccagaagatcggcatcggcgctcagttcggcggcaagtacttctgccacgacgtgcgcgtggtgcggctgccccggcacggggcgtcctgcccggtcgccatcgcggtgtcctgctcggcggaccggcaggcggtcgcgaagatcaccgccgagggcgtcttcctggagcagctggagaccgacccggcgcggttcctgccggagaccacggacgagcatctggaggaggagggcgacgtcgtcaaggtcgacctcaaccagccgatggacgacatcctcgccgagctgaccaggcacccggtcaagacccggctgtcgctgaccggtccgctggtggtggcccgcgacatcgcgcacgccaagatcaaggagcggctggacgcgggcgaggagatgccgcagtacctgaaggaccacccggtgtactacgcgggccccgcgaagacgcccgagggctacgcctccgggtccttcggtccgaccaccgccgggcgcatggactcctacgtcgagcagttccaggcggcgggcggctccaaggtgatgctggccaagggcaaccggagcaagcaggtcaccgacgcgtgcgacgcgcacggcggcttctacctgggctcgatcggcgggcccgcggcgcggctcgcacaggactgcatcaagaaggtcgaggtcgtcgagtacgaggagctcggcatggaggcggtctggaagatcgaggtcgaggacttccccgcgttcatcgtggtggacgacaagggcaacgacttcttccaggacccggcgcccgcgccgacgttcacgacgattccggtacgggggccgggcctggcgtaa

SEQ ID NO: 44273 - protein, 558 aa, Streptomyces coelicolor A3(2)
MGEMPEFAYTDLLPQGEDTTPYRLVTAEGVATFEADGRTFLKVEPEALRKLAEEAVHDIQHYLRPAHLAQLRRIIDDPEASGNDKFVALDLLKNANIAAAGVLPMCQDTGTAIVMGKRGQNVLTEGGDEEALSRGIYDAYKNLNLRYSQMAPLTMWEEKNTGSNLPAQIELYATDGGAYKFLFMAKGGGSANKSFLYQETKAVLNESSMMKFLEEKIRSLGTAACPPYHLAIVVGGTSAEYALKTAKYASAHYLDEIPAEGSELGHGFRDKELEEKVFELTQKIGIGAQFGGKYFCHDVRVVRLPRHGASCPVAIAVSCSADRQAVAKITAEGVFLEQLETDPARFLPETTDEHLEEEGDVVKVDLNQPMDDILAELTRHPVKTRLSLTGPLVVARDIAHAKIKERLDAGEEMPQYLKDHPVYYAGPAKTPEGYASGSFGPTTAGRMDSYVEQFQAAGGSKVMLAKGNRSKQVTDACDAHGGFYLGSIGGPAARLAQDCIKKVEVVEYEELGMEAVWKIEVEDFPAFIVVDDKGNDFFQDPAPAPTFTTIPVRGPGLA

SEQ ID NO: 44274 - DNA, 1512 bp, Chlorobium tepidum TLS
  CDS (1)..(1512): transl_table=11
atgatcgccttgatcaccgagacctccacgaatctgccgagcgacgttcgcaaggccatcgccgatgccgttggcaatgatgctgccgattcgagggccggacttgccatgtctgccatcacgctcaatatcgacatggcggtcgataatgtcggcccggtttgccaggataccggtatgcctaccttcttcgtgcacacgccgaaaggcgctgaccagctcgccatgaagcgcgacatcgaggaggctgtcgtcgaggcaacccgaaccggcaagcttcgtcccaatgcggtcgattcgctgaccggtaagaactccggcaacaaccttggctgccatgtgccggtgatccatttcgagccgtgggatcgcgacgagatcgaggtgaagctcatcctcaaaggcggcggctgcgagaacaaaaacatccagtactcgctgcctgccgatattcccggacttggccgcgcggctcgcgacctcgacggcgtgcgtaagtgcatcctccacgccgtgtaccaggcgcagggacaggggtgcagccccggcttcatcggcgtcggcgtcggtggcgaccgcaccagcagcttcgagctggccaagaagcagttgctccgctcggtcgatgacaccaattccgatgcggtgctggccgaactcgaacaggagattctcgacaaggctaaccgcctgaacatcgggccgatgggctttgccggcaagaccacgctgcttggctgcaagatcggcacatcgcatcgcgttccggctagcttctttgtctcggtagcctacaattgctgggcctatcgccgtcttggcgtcatcatcgacccgaaagagggttcgatttccgagtggcagtaccgctatccgggcgaaatcaagcgcatggcgcgcggcgcgggcattccgctgacgggccgtgaggtggtgctcaccgcgccggtcagcgaggagacgatccgctcgctcaaggttggcgacatcgtgatcgttgatggcgaaatgcacaccggacgcgatgccttccaccactacatcatgcaccatgatctgcccgagggtctcgacatccgcggcggcatcatctaccactgcggcccggtgatgctcaagaacgaggcgggcgagtacacggtcgttgctgccgggccgaccacttcgattcgcgaggagccttaccagtcggacgtgatcgaaaagctcggacttcgcgcggtgattggcaagggcggcatggggccgaagacgcttgcgggcttgcagaagcacggtgcggtctatctcaacgccatcggcggtgcggcgcagtactacgccaggtgcatcgaaaaggtgaccggcgtcgatttcttggaagagatgggcgtgccggaggcgatgtggcacttgcaggccaaagccttcccgtgcatcgtcacgatggacgcgcacggcaacagcctgcacaagcaggtcgatgaggagtccttcgcgatgcttgaaaacatcggcaaggagcaggcgtaa

SEQ ID NO: 44275 - protein, 503 aa, Chlorobium tepidum TLS
MIALITETSTNLPSDVRKAIADAVGNDAADSRAGLAMSAITLNIDMAVDNVGPVCQDTGMPTFFVHTPKGADQLAMKRDIEEAVVEATRTGKLRPNAVDSLTGKNSGNNLGCHVPVIHFEPWDRDEIEVKLILKGGGCENKNIQYSLPADIPGLGRAARDLDGVRKCILHAVYQAQGQGCSPGFIGVGVGGDRTSSFELAKKQLLRSVDDTNSDAVLAELEQEILDKANRLNIGPMGFAGKTTLLGCKIGTSHRVPASFFVSVAYNCWAYRRLGVIIDPKEGSISEWQYRYPGEIKRMARGAGIPLTGREVVLTAPVSEETIRSLKVGDIVIVDGEMHTGRDAFHHYIMHHDLPEGLDIRGGIIYHCGPVMLKNEAGEYTVVAAGPTTSIREEPYQSDVIEKLGLRAVIGKGGMGPKTLAGLQKHGAVYLNAIGGAAQYYARCIEKVTGVDFLEEMGVPEAMWHLQAKAFPCIVTMDAHGNSLHKQVDEESFAMLENIGKEQA

SEQ ID NO: 44276 - DNA, 1644 bp, Yersinia pestis KIM
  CDS (1)..(1644): transl_table=11
atgtcaaacaaaccgttccactatcaggatcccttcccgctcaaggaagatgatactgaatattaccttgtcagtgataaacatgtctcagttgcacagtttgaaggacacgacatcctaaaagtcgagccggaagccctgaccctcctcgctcaacaggctttccacgatgcctctttcctcctgcgccccgctcaccaaaaacaagttgccgccattctggatgacccggaagccagcgaaaacgataaatatgtcgccctgcaattcctacgtaactctgagatttcggctaaagggattttacccacctgtcaagataccggcaccgcgatcatcatgggcaaaaaaggccagcgggtctggactgggggtaacgatgccgaagcgttatcacgtggggtctataacacctttattgaagataacctgcgctattcacaaaacgccgcgctggatatgtataaggaagtgaataccggtaccaacctgccagcacagatcgatctatacagcaccgaaggtgaagagtacaaattcttgtttgtgactaaaggcggcggttcagccaataaaacctatctgtatcaggaaaccaaagccctgctcacaccgggcaggctgaaagcgtttttggtcgagaaaatgcgcacattgggtaccgcggcttgcccgccttatcacattgcctttgtcatcggcggtacctctgccgaaagtacgctgaagacggttaaactggcctcgaccaaatattacgatggcttgccgaccgaagggaatgaacacggccaagcgttccgtgacactgcgttagagcaagaattgctggaagcagcacaagatttaggtctgggcgcgcaatttggcggcaaatactttgcccacgatgttcgggtcgttcgcctgccacgccacggagcctcctgcccggtcggcatgggggtatcttgttctgctgaccgtaatatcaaaggcaaaattaaccgcaaaggcatttggttggagaaactggaacagaatccagggaaatatattcccgaacatttgcgccacagcactgaaggccaagtggttaaaattgatcttaaccgcccgatgcctgaaattttaaaagagctgtcacagtacccggtctccacccgcctgtcgttaagcggcaccattattgttggccgtgatatcgcccatgccaaattaaaagagcggctggataacggtgaaggcttaccacaatacattaaagatcatccgatctattacgccggaccggccaaaacccccgaaggctatgcttcaggatcactcgggccaaccaccgcagggcgcatggactcttacgtggatctgctgcaatcccacgggggtagcatgatcatgttagccaaaggcaaccgtagccagcaagtgaccgacgcctgccataaacacgggggcttctatctgggcagcatcggtggcccggcagcggtattggcgcaaaacagtattaagagtctggaatgtgtggaatatcctgaattagggatggaagccatctggaagattgaagtggaagacttcccagcctttattttagttgatgataagggcaatgatttcttccagcagatccaagcggcaaaatgcaaccgttgtggctga

SEQ ID NO: 44277 - protein, 547 aa, Yersinia pestis KIM
MSNKPFHYQDPFPLKEDDTEYYLVSDKHVSVAQFEGHDILKVEPEALTLLAQQAFHDASFLLRPAHQKQVAAILDDPEASENDKYVALQFLRNSEISAKGILPTCQDTGTAIIMGKKGQRVWTGGNDAEALSRGVYNTFIEDNLRYSQNAALDMYKEVNTGTNLPAQIDLYSTEGEEYKFLFVTKGGGSANKTYLYQETKALLTPGRLKAFLVEKMRTLGTAACPPYHIAFVIGGTSAESTLKTVKLASTKYYDGLPTEGNEHGQAFRDTALEQELLEAAQDLGLGAQFGGKYFAHDVRVVRLPRHGASCPVGMGVSCSADRNIKGKINRKGIWLEKLEQNPGKYIPEHLRHSTEGQVVKIDLNRPMPEILKELSQYPVSTRLSLSGTIIVGRDIAHAKLKERLDNGEGLPQYIKDHPIYYAGPAKTPEGYASGSLGPTTAGRMDSYVDLLQSHGGSMIMLAKGNRSQQVTDACHKHGGFYLGSIGGPAAVLAQNSIKSLECVEYPELGMEAIWKIEVEDFPAFILVDDKGNDFFQQIQAAKCNRCG

SEQ ID NO: 44278 - DNA, 1620 bp, Brucella suis 1330
  CDS (1)..(1620): transl_table=11
atggcagaagcaagcaccgccgatcttttccctcttggcgaagacgacaccccttatcgcaaactgacttcggattatgtgtcggtggacacgttcaaggggcaggaagtcctgactgtggacccggaagggcttcgcctgctttcagaagtagcctttgccgatatcaaccatctgctgcgccccggccatctgcaacagcttgcaaagattcttcaggatcccgaagcaaccgacaatgaccgcttcgtcgcctacgaccttttgaagaacgccaatatcgcagccggcggcgtgctgcccatgtgccaggataccggcacggccattatcatgggcaagaagggccgccgcgtctggaccgaaggcggcgatgccgatgcgctcggcgccggtgtgctggacgcctataacaagaagaacctgcgttattcgcagctcgccccgctttcgatgttcgaggaaaagaacaccaagaacaacctgcccgcgcagatcgatatctatgaagaaggcgaagacgcctacaagttcctgttcgttgccaagggcggcggttcggcgaacaagacgtttctctatcagggaacgccttcgcttctgacgcatgaccgcatgattgatttcctcaaggacaaaatcctgagcctcggcacagccgcctgcccgccctatcatctggccatcgtcattggcggcacttcggcggaaatgaacctgaagacggtgaagcttgcttccacgcgctatctcgacagcctgccgaccaaaggctcggaaaccggccacgccttccgcgaccttgaaatggaagcagaaattcacaagctgacccagtcgctcggtgtcggcgcgcagttcggcggcaaatatttctgccatgacgtgcgcgtcatccgcctgccccgccacggcgcttcgctgccgatcggcatcggcgtttcctgttcggccgaccgtcaggcgaagggcaagatcaccaaggacggcattttccttgagcagcttgaagccaatccggcaaaatacatgccggatatcgacgaggaaaagctgaccgcgcatgtggtcaagatcgacctcaaccagccgatgtcggaaatactcaaggaactctcgaagcatccggtcaagacgcgtctttcgctctccggcccgatcatcgtggcgcgcgatctggcacatgcgaaaatccgcgaacggctggaaaacggcgagccaatgccggattacttcaagaaccacccgatctattatgcgggccccgccaagacgcccgcgggctatgcttccggctccttcgggccgacaacggcaggccgcatggattcctacgtggaccagttccagtctttcggcggctccatggtcatgctcgccaagggcaaccgttcgcgccaggtgcgcgaagcctgcggccagcacgggggcttctatctcggctccatcggcgggccggccgcacgtcttgcgcaagactgcatcaaaaaggtggaagtcgtcgagtacccggaacttggcatggaggccatctggcgcattgaagtcgaagatttcccggctttcatcgttatcgatgacaagggcaatgacttcttcaaggaattcaacctgagttga

SEQ ID NO: 44279 - protein, 539 aa, Brucella suis 1330
MAEASTADLFPLGEDDTPYRKLTSDYVSVDTFKGQEVLTVDPEGLRLLSEVAFADINHLLRPGHLQQLAKILQDPEATDNDRFVAYDLLKNANIAAGGVLPMCQDTGTAIIMGKKGRRVWTEGGDADALGAGVLDAYNKKNLRYSQLAPLSMFEEKNTKNNLPAQIDIYEEGEDAYKFLFVAKGGGSANKTFLYQGTPSLLTHDRMIDFLKDKILSLGTAACPPYHLAIVIGGTSAEMNLKTVKLASTRYLDSLPTKGSETGHAFRDLEMEAEIHKLTQSLGVGAQFGGKYFCHDVRVIRLPRHGASLPIGIGVSCSADRQAKGKITKDGIFLEQLEANPAKYMPDIDEEKLTAHVVKIDLNQPMSEILKELSKHPVKTRLSLSGPIIVARDLAHAKIRERLENGEPMPDYFKNHPIYYAGPAKTPAGYASGSFGPTTAGRMDSYVDQFQSFGGSMVMLAKGNRSRQVREACGQHGGFYLGSIGGPAARLAQDCIKKVEVVEYPELGMEAIWRIEVEDFPAFIVIDDKGNDFFKEFNLS

SEQ ID NO: 44280 - DNA, 1551 bp, Shewanella oneidensis MR-1
  CDS (1)..(1551): transl_table=11
atgtcatctcaccatgaaacgtctgaaaatgtagtgattaaacaagccgacttcattgaaagtgtggcggatgccctgcaatacatctcctactaccaccccaaagattttgtcgatgccatgagcgaagcttatgagcgtgaacaaagtgctgcggcgaaggatgcaattgcacaaattttgattaactcgcgcatgtctgccgaaggcaaacgtccactgtgccaagacacgggtatcgtgaccacgtttgttaaagtgggtatgggggttaagtgggataaaactgatatgaccattcaacaaatggtcgatgaaggtgtgcgtcgtgcttacaccaacccagataatccactgcgtgcatcaattgtggcggatcctgcaggtagccgtaaaaacaccaaagacaacaccccatcagttgtgcatatcgatatggtgccaggtaatcatgttgaagttgctatcgcagcaaaaggcggcggcagtgaaaacaaagctaagatggtgatgttaaacccatcggacgatatcgccgcttgggttgaaaaaacgctgcccaccatgggcgcgggctggtgtcctcctggtatgctcggtatcggtattggcggcaccgctgaaaaagcggccgtattggccaaagaagccctgatggaaagcgtggatatccatgagttaatggcgcgcggtgcacaaactacagaagaaaaactgcgtttagatatctttgaacgtgccaacaacttaggtattggtgcgcaggggcttggcgggttaaccacggttttagacgtgaaaatcaagtctgcaccgacccacgcggcatcaaaacctgtggtgatgatccccaactgcgccgcaactcgtcacgtgcatttccacttagacggcacgggtcctgctgatcttgcgccgccatcactcagcgactggccagaaatcacccgcgaagtgggcagcgatgtgcgccgtgttaacttagacacagtcacacaagccgatatcgaacagtggcagagcggtgaaaccctgctgctgagcggtaaaatgctcaccggccgtgacgctgcccataaacgtatccaaagcctgattgaaagcggcgaaggtttaccagaaggcgtcgactttactggtaagtttatttattacgttggcccagttgaccccgtgggtaatgaagtggtggggcctgcaggacctacaaccgcgacccgtatggacaagtttactgacctgatgctggataagactggcctgatgggcatgatcggtaaggctgagcgtggtcctgcaaccgttgaatctatcaagaagcacaaagcggtgtacttgatggctgttggcggcgcggcttacttagtgtcaaaagccattaaaaaatcccgtgtggtagcttttgccgatttaggtatggaagcgatttacgagtttgatgtgcaggatatgccagtcactgtagcggttgactcaaacggcgtgaatgcccatgaaacgggtcctgcgatttggaaagtgaatatcgctaacgcgaatgcaaaagcctaa

SEQ ID NO: 44281 - protein, 516 aa, Shewanella oneidensis MR-1
MSSHHETSENVVIKQADFIESVADALQYISYYHPKDFVDAMSEAYEREQSAAAKDAIAQILINSRMSAEGKRPLCQDTGIVTTFVKVGMGVKWDKTDMTIQQMVDEGVRRAYTNPDNPLRASIVADPAGSRKNTKDNTPSVVHIDMVPGNHVEVAIAAKGGGSENKAKMVMLNPSDDIAAWVEKTLPTMGAGWCPPGMLGIGIGGTAEKAAVLAKEALMESVDIHELMARGAQTTEEKLRLDIFERANNLGIGAQGLGGLTTVLDVKIKSAPTHAASKPVVMIPNCAATRHVHFHLDGTGPADLAPPSLSDWPEITREVGSDVRRVNLDTVTQADIEQWQSGETLLLSGKMLTGRDAAHKRIQSLIESGEGLPEGVDFTGKFIYYVGPVDPVGNEVVGPAGPTTATRMDKFTDLMLDKTGLMGMIGKAERGPATVESIKKHKAVYLMAVGGAAYLVSKAIKKSRVVAFADLGMEAIYEFDVQDMPVTVAVDSNGVNAHETGPAIWKVNIANANAKA

SEQ ID NO: 44282 - DNA, 1524 bp, Pseudomonas putida KT2440
  CDS (1)..(1524): transl_table=11
atgaccgtgatcaagcaagacgacctgattcagagcgtcgccgacgccctgcaattcatctcgtactaccaccccgtcgatttcatccaggccatgcacgaggcctatctgcgtgaggaatcgcctgctgcacgcgattccatcgcccagatcctgatcaactcgcgcatgtgcgccaccggccatcgtccaatctgccaggacaccggtatcgtcaccgtgttcatccgcgtgggcatggacgtgcgctgggatggcgccaccatgagcgtcgacgacatgatcaacgaaggtgtgcgtcgcgcctacaacctgcctgaaaacgtcctgcgcgcttcgatcctggccgacccggccggtgcccgcaagaacaccaaggacaacaccccggcagtgatccactactccatagtccccggcgacaaggtggaagtcgatgtcgcagccaagggcggcggctcggaaaacaagtcgaagatggccatgctcaacccgtccgactcgatcgtcgactgggtactgaagaccgtgccgaccatgggtgctggctggtgcccgcctggcatgctcggcatcggcatcggcggtaccgccgagaaggccgcggtcatggccaaggaagtgttgatggagtccatcgacattcacgaactgaaagcccgtggcccacagaaccgcctggaagaaatccgcctggagctgttcgacaaggtcaaccagctgggcatcggcgcccagggcctgggtggcctgaccaccgtgctcgacgtcaagatcatggactacccgacccacgccgcgtccttgccggtgtgcatgatccccaactgcgctgctacccgccacgcccacttcgtgctcgatggcaccggcccggcagaactggaagcgccgtcgctggacgcttacccggaaatcgtctgggaagccggcccgagcgcccgtcgcgtcaacctcgacgacatcaccccggaagaagtggccagctggaagccgggcgaaaccatcctgctcaacggcaagatgctgaccggccgtgatgccgcgcacaagcgcatggttgaaatgctcaaccgtggcgaagagttgccggtagacctgaaaggccgcttcatctactacgtcggcccggtcgacccggtgggtgacgaagtggtaggcccagccggcccgaccactgctacccgtatggacaagttcactcgccagatccttgagcagactggcctgctgggcatgattggcaagtccgagcgtggcccgaccgccatcgaggcgatcaaggacaacaaggccgtgtacctgatggccgttggcggcgctgcctacctggtcgcccaggccatccgcaagtcgaaggtactggccttcgccgagctgggcatggaagcgatctacgagttcgaagtcaaggacatgccggtgaccgtcgccgtggacagcaacggtgaatcggtacacatcactggccctgccctgtggcagagcaagattgccgaaagcctggccgtcgaagtgaagtaa

SEQ ID NO: 44283 - protein, 507 aa, Pseudomonas putida KT2440
MTVIKQDDLIQSVADALQFISYYHPVDFIQAMHEAYLREESPAARDSIAQILINSRMCATGHRPICQDTGIVTVFIRVGMDVRWDGATMSVDDMINEGVRRAYNLPENVLRASILADPAGARKNTKDNTPAVIHYSIVPGDKVEVDVAAKGGGSENKSKMAMLNPSDSIVDWVLKTVPTMGAGWCPPGMLGIGIGGTAEKAAVMAKEVLMESIDIHELKARGPQNRLEEIRLELFDKVNQLGIGAQGLGGLTTVLDVKIMDYPTHAASLPVCMIPNCAATRHAHFVLDGTGPAELEAPSLDAYPEIVWEAGPSARRVNLDDITPEEVASWKPGETILLNGKMLTGRDAAHKRMVEMLNRGEELPVDLKGRFIYYVGPVDPVGDEVVGPAGPTTATRMDKFTRQILEQTGLLGMIGKSERGPTAIEAIKDNKAVYLMAVGGAAYLVAQAIRKSKVLAFAELGMEAIYEFEVKDMPVTVAVDSNGESVHITGPALWQSKIAESLAVEVK

SEQ ID NO: 44284 - DNA, 1656 bp, Bradyrhizobium japonicum USDA 110
  CDS (1)..(1656)
atgaacgctcccaccgccttccccgaccccgcaaagcccgttccgccctacaagcacaccccgctgttcccgctgggcaaggacgagacgccctacaagaagatttcgtccgagggcgtccgggtcgagaaggtcctgggcaaggacatgctggtggtgtcgcgcgaggcgctgcgggcgctgtcggaggcggctttcggcgacatcaaccattacctgcgccccggccatttgaagcagctccgcgcgatcctggaagacggcgaggcgagcccgaacgacaagttcgtcgcgctcgacttcttgaagaacgccaacatcgcggccggcggcgtgctgccgatgtgccaggacaccggcaccgcgatcatcatgggcaagaagggctgcaacgtcatcaccgacggtgacgacgaggcggcgctgtcggaaggcgcgcgcgatgcgtacctgcgccgcaacctgcgctactcgcaggtcgcgccgctctcgatgtacgaggagaagaacaccgccaacaacatgccggcgcagtgcgagatctacgccgagggcgacgacgcctacaagttcatgttcatggcgaagggcggcggctccgccaacaagagcttcctgttccaggcgacgccttccgtcctgaccaaggaccgcctgctcgcgttcctgaaggaaaagatcctcacgctcggcaccgcggcgtgcccgccctatcacctcgccatcgtgatcggcggcacttcggccgagctctgcatgaagacggtgaagcttgcgtcggcccgctatctcgacgcgctgccgacccacggctcgcccgacggcaacgccttccgcgacgtcgagatggaaaaggaaatccacaagatgacgcagtcgctcggcgtcggcgcgcagttcggaggcaagtatttctgccacgacgtccgcgtgatccgcatgccgcgccatggcgcctcgctcccgatcgggcttggcgtgtcctgctcggccgatcgccaggtgctcggcaagatcaccagggacggcgtctatctcgaggagctcgagcacaacccggcgcaatatctgccgcaggtcgaagaggcgctgggcggcgaggtcgtcaagatcgacctcaaccagccgatgaaggacattttggcgacgttctcgaagcacccgatcaagacccgggtctcgatgaccggcaccatgatcgtcgcgcgcgattccgcccatgccaagctgcgcgagcggctggagaagggcgagccgctgccggactacttcaagaaccatccggtctactacgctggccccgccaagacgccggagggctatgcctccggtgcgttcggtccgaccaccgcgggccggatggattccttcgtcgaccagttccaggccgcgggcggctccatggtgatggtggccaagggcaaccgcgcgccggccgtgcgcgaggcctgcaagaagtatggcggcttctatctcggctcgatcggcggcgccgcggcgaacctcgccgagcactgcatcaagaaggtcgaggtgctcgaatatcccgagctcggcatggaagcgatctggcgcatcgaagtcgtggatttcccggcgttcatcatcatcgatgacaaggggaatgatttcttcaaggagttgaatttgggctag

SEQ ID NO: 44285 - protein, 551 aa, Bradyrhizobium japonicum USDA 110
MNAPTAFPDPAKPVPPYKHTPLFPLGKDETPYKKISSEGVRVEKVLGKDMLVVSREALRALSEAAFGDINHYLRPGHLKQLRAILEDGEASPNDKFVALDFLKNANIAAGGVLPMCQDTGTAIIMGKKGCNVITDGDDEAALSEGARDAYLRRNLRYSQVAPLSMYEEKNTANNMPAQCEIYAEGDDAYKFMFMAKGGGSANKSFLFQATPSVLTKDRLLAFLKEKILTLGTAACPPYHLAIVIGGTSAELCMKTVKLASARYLDALPTHGSPDGNAFRDVEMEKEIHKMTQSLGVGAQFGGKYFCHDVRVIRMPRHGASLPIGLGVSCSADRQVLGKITRDGVYLEELEHNPAQYLPQVEEALGGEVVKIDLNQPMKDILATFSKHPIKTRVSMTGTMIVARDSAHAKLRERLEKGEPLPDYFKNHPVYYAGPAKTPEGYASGAFGPTTAGRMDSFVDQFQAAGGSMVMVAKGNRAPAVREACKKYGGFYLGSIGGAAANLAEHCIKKVEVLEYPELGMEAIWRIEVVDFPAFIIIDDKGNDFFKELNLG

SEQ ID NO: 44286 - DNA, 1524 bp, Pseudomonas syringae pv. tomato str. DC3000
  CDS (1)..(1524): transl_table=11
atgaccgtgatcaagcaagacgacctgattcagagcgttgcagatgcactgcagttcatttcctattaccaccccgtggacttcatccaggccatgcacgaggcgtatctgcgtgaagaatcgcctgccgcccgcgactccatcgcccagatcctgatcaactcgcgcatgtgcgcgaccggtcatcgcccgatctgccaggacaccggcatcgtcacggtttttgtgcgcgtgggtatggatgttcgctgggacggcgccaccatgggcctggacgacatgatcaacgaaggcgtgcgtcgcgcttacaacctgcctgaaaacgtcttgcgtgcctcgatccttgccgacccggcaggcgctcgcaaaaacaccaaggacaacaccccggccgttatccactactccatcgtcccgggtaacaccgtggaagtggacgtcgcggcaaaaggcggcggttcggaaaacaaatcgaagatggcgatgctcaacccgtccgactcgatcgtcgactgggttctgaaaaccgttccgaccatgggcgcaggctggtgccccccgggcatgctcggcatcggcatcggcggcaccgcagaaaaggccgcggtcatggccaaggaagtgttgatggagtccatcgacattcacgaactgaaagcccgcggcccgcaaagccgtatcgaagagatgcgtctggagctgttcgagaaggtcaaccagctgggcattggcgctcagggcctgggcggcctgaccaccgtgctcgacgtcaagatcatggattacccgacccacgccgcgtcgctgccggtgtgcatgatccccaactgcgccgccacccgccacgcgcacttcgtgctcgacggcagcggccctgcctcgctggaggctccatcgctggacgcctatccggaaatcgtctgggaagccggcccatcggcccgccgcgtcaacctcgataccctgaccccggaagaagtacaaagctggaaaccgggcgaaaccgttttgctcaatggcaagatgctcaccggccgcgacgcagcgcacaagcgcatggtcgaaatgctcaacaggggtgaaaccctgccggtagacctcaagggtcgcttcatctactacgtcggcccggttgatccggtacgcgaagaagtcgtcggcccggccggcccgaccacggccacccggatggacaagttcacccggcagatcctcgatcagaccgggttgctgggcatgatcggcaagtccgaacgcggcccgaccgccatagaagcgatccgtgaccacaaggccgtgtacctgatggccgttggtggtgctgcctatctggtggctcaggcgatcaagaaatcccgcgtcgtggccttcgccgagctgggcatggaagcgatctacgagttcgaggttaaggacatgccggtgaccgttgccgtcgacagcaccggtgaatccgttcacatcaccggcccgcagatctggcagaagaagatcagcgacagtctggcggtggaagtgcagtaa

SEQ ID NO: 44287 - protein, 507 aa, Pseudomonas syringae pv. tomato str. DC3000
MTVIKQDDLIQSVADALQFISYYHPVDFIQAMHEAYLREESPAARDSIAQILINSRMCATGHRPICQDTGIVTVFVRVGMDVRWDGATMGLDDMINEGVRRAYNLPENVLRASILADPAGARKNTKDNTPAVIHYSIVPGNTVEVDVAAKGGGSENKSKMAMLNPSDSIVDWVLKTVPTMGAGWCPPGMLGIGIGGTAEKAAVMAKEVLMESIDIHELKARGPQSRIEEMRLELFEKVNQLGIGAQGLGGLTTVLDVKIMDYPTHAASLPVCMIPNCAATRHAHFVLDGSGPASLEAPSLDAYPEIVWEAGPSARRVNLDTLTPEEVQSWKPGETVLLNGKMLTGRDAAHKRMVEMLNRGETLPVDLKGRFIYYVGPVDPVREEVVGPAGPTTATRMDKFTRQILDQTGLLGMIGKSERGPTAIEAIRDHKAVYLMAVGGAAYLVAQAIKKSRVVAFAELGMEAIYEFEVKDMPVTVAVDSTGESVHITGPQIWQKKISDSLAVEVQ

SEQ ID NO: 44288 - DNA, 1518 bp, Vibrio parahaemolyticus RIMD 2210633
  CDS (1)..(1518): transl_table=11
atgacggtaatacgcaagcaggatgtaatcagcagtgtcgctgatgcgctacagtatatttcttactaccacccgctagactttgttcaagctcttgaaaaagcctatcaccgcgaagagagtcaagccgcgaaagacgcgattgctcagatcctaattaactcccgaatgtcagcagaaggtcaccgaccaatttgtcaggatactggcatcgtgacgtgtttcgtcaacatcggtatgggcgtgcaatgggactcaaccgacatgacggttcagcaaatggtagatgaaggtgtccgacaagcgtatacgaacccagacaacccgttgcgtgcgtcagtacttatggatcctgctggtaaacgtattaataccaaagacaacacacctgctgtcgtacacatcaacatggtaccgggcgataaagttgaaattcagatcgcagcgaagggcggcggtagtgaaaacaaaactaagatggtgatgctaaacccatctgacgatattgctgagtgggtagagaaaacactaccaacaatgggcgcgggctggtgtccaccaggtatgcttggcattggtattggcggtacggctgagaaagcagcggtattggcaaaagaatctctaatggaacacatcgatattcaagagcttatcgaccgtggtccacaaaacgcagaagaagagcttcgccttgatattttcaatcgcgtgaacaaacttggtatcggcgcgcaaggtcttggtggtttgacgactgttgtcgacgttaagatcaaaactgcgccaacgcacgcggcttctaagcctgtttgtttgatcccgaactgtgcggcgactcgtcacgtacacttcacgcttgatggcagcggcccagcagagctaacaccacctaaactagaagattggccagacattacttgggaagcgggcgaaaacacgcgtcgcgtaaacttagacactattactaaagaagaagtacaagagtggaagacaggcgaaaccgttcttctatcaggtaaaattctgactggtcgtgatgctgcgcataaacgtattcaaggcatgttagacaatggtgaaggtctaccagaaggcgtagatctaaacggtaagttcatttactacgtaggccctgtcgatgcggttggtgatgaggtcgttggtcctgccggcccaacaacatcaacgcgtatggataaattcaccgatatgatgttagaaaaaaccggcatcatgggcatgatcggtaaagctgagcgtggccctgcaacggttgaatctattaagaatcacaaagcggtttacctaatggctgttggtggcgcggcctaccttgtagcgaaagcgatcaagaaagctcgcgttgtcgcatttgaagatttaggtatggaagcgatttacgaatttgaagttgaagatatgccagtaacagtggctgtagactcaaatggtgttaacgcgcaccaaatcggtccagacacttggaaagtgaaaattcaagagatggaagcataa

SEQ ID NO: 44289 - protein, 505 aa, Vibrio parahaemolyticus RIMD 2210633
MTVIRKQDVISSVADALQYISYYHPLDFVQALEKAYHREESQAAKDAIAQILINSRMSAEGHRPICQDTGIVTCFVNIGMGVQWDSTDMTVQQMVDEGVRQAYTNPDNPLRASVLMDPAGKRINTKDNTPAVVHINMVPGDKVEIQIAAKGGGSENKTKMVMLNPSDDIAEWVEKTLPTMGAGWCPPGMLGIGIGGTAEKAAVLAKESLMEHIDIQELIDRGPQNAEEELRLDIFNRVNKLGIGAQGLGGLTTVVDVKIKTAPTHAASKPVCLIPNCAATRHVHFTLDGSGPAELTPPKLEDWPDITWEAGENTRRVNLDTITKEEVQEWKTGETVLLSGKILTGRDAAHKRIQGMLDNGEGLPEGVDLNGKFIYYVGPVDAVGDEVVGPAGPTTSTRMDKFTDMMLEKTGIMGMIGKAERGPATVESIKNHKAVYLMAVGGAAYLVAKAIKKARVVAFEDLGMEAIYEFEVEDMPVTVAVDSNGVNAHQIGPDTWKVKIQEMEA

SEQ ID NO: 44290 - DNA, 1647 bp, Salmonella enterica subsp. enterica serovar Typhi Ty2
  CDS (1)..(1647): transl_table=11
atgtcaaacaaacccttcttttatcaagacccttttcccctcaaaaaggacgataccgagtactacttgttgaccagcgaacatgtttccgtcgccgagttcgaaggacaagagatcctgaaagtcgcgccggaagcgctaacgttgttggcgcgtcaggccttccacgatgcgtcttttatgctacgtcccgcgcatcagcagcaggtggcggatattctgcgcgatccgcaggccagtgaaaacgacaaatatgtcgcgctgcaattcctgcgaaactccgatatcgcggccaagggcgtgttgcccacctgccaggataccggtacggccattattgtcggcaaaaaaggccaacgcgtctggactggtggaggtgatgaagcggcgctggctcgcggcgtatataacacctatatcgaagataacctgcgctattcgcagaacgcggcgctggatatgtacaaagaggtcaataccggtactaacctgccggcgcagatcgatctctacagcgtcgatggcgatgaatataaattcctctgtatcgctaaaggcggcggttcggcgaataaaacctacctctatcaggagacaaaagcgctactgacgccgggtaagctcaaaaattatctcgtcgataagatgcgtacgctgggcaccgccgcctgtccgccgtatcacattgcgtttgtcattggcggtacctcggcggaagcgaacctgaagaccgttaagctggcctcggcaaaatactatgatgcgctaccgaccgaaggcaatgaacacgggcaggccttccgcgatattgagctggaaaaagaattgttgcttgaggcgcaaaatcttggcttaggcgcgcagttcggcggcaaatatttcgctcacgatattcgtgtcatccgattgccgcgccatggggcatcgtgtccggtaggtatgggcgtgtcctgctccgcggatcgaaacattaaagcgaagatcaaccgggaagggttctggatcgagaagctggagcgcaatcccggtaaatatattccagaggcgctgcgccaggcgggagagggcgaggcggtgcgcgttgatcttaaccgtcccatgagcgagatactgcaacaactgtcgcagtatccggtatcaacgcgcttgtcgctgaacggcacgattattgtgggccgcgatatcgcgcacgctaaactgaaagaacggatggacagaggcgaaggtttgccgcagtacatcaaagatcatcctatctattatgcggggccggcaaaaacgccggaagggtacgcctccgggtcgcttgggccgactaccgcaggacggatggactcttatgttgatcagctccagtcgcagggcggcagtatgatcatgctggcgaaaggcaaccgcagccagcaggtgaccgatgcctgtaagaaacatggcggcttctacctgggcagtatcggcggcccggcagccgttctggcgcagggcagtatcaagcgcctggagtgtgtggaatatcctgaactgggtatggaggctatctggaaaattgaagtggaggattttccggcctttattctggtggatgataaaggtaacgatttcttccagcagattcagtcatcgcagtgcgcgcgctgcgttaagtaa

SEQ ID NO: 44291 - protein, 548 aa, Salmonella enterica subsp. enterica serovar Typhi Ty2
MSNKPFFYQDPFPLKKDDTEYYLLTSEHVSVAEFEGQEILKVAPEALTLLARQAFHDASFMLRPAHQQQVADILRDPQASENDKYVALQFLRNSDIAAKGVLPTCQDTGTAIIVGKKGQRVWTGGGDEAALARGVYNTYIEDNLRYSQNAALDMYKEVNTGTNLPAQIDLYSVDGDEYKFLCIAKGGGSANKTYLYQETKALLTPGKLKNYLVDKMRTLGTAACPPYHIAFVIGGTSAEANLKTVKLASAKYYDALPTEGNEHGQAFRDIELEKELLLEAQNLGLGAQFGGKYFAHDIRVIRLPRHGASCPVGMGVSCSADRNIKAKINREGFWIEKLERNPGKYIPEALRQAGEGEAVRVDLNRPMSEILQQLSQYPVSTRLSLNGTIIVGRDIAHAKLKERMDRGEGLPQYIKDHPIYYAGPAKTPEGYASGSLGPTTAGRMDSYVDQLQSQGGSMIMLAKGNRSQQVTDACKKHGGFYLGSIGGPAAVLAQGSIKRLECVEYPELGMEAIWKIEVEDFPAFILVDDKGNDFFQQIQSSQCARCVK

SEQ ID NO: 44292 - DNA, 1647 bp, Salmonella enterica subsp. enterica serovar Typhi Ty2
  CDS (1)..(1647): transl_table=11
atgtcgaaaaaagagtttatctatcaggcgcctttcccgatgggagaggacaaaacagagtattatctgctcacctccgattatgtcagcgtcagtgaattcaatggagaatctatcctcaacgttgagccgcaggcgttaacgttgctggctcagcaggctttccatgatgcgtcttttatgctccgtcctgaacaccagcagcaagtcgccgccattctccatgaccccgaagccagcgaaaacgacaaatatgtggcgttgcaattcctgagaaactccgagatcgccgccaaaggcattctgccgacctgccaggataccggcacggcgattatcatgggtaaaaaaggccaacgcgtctggacgggcggcggcgatgaagccgcgctctccaaaggcgtgtttaatacctatatcgaagataacctgcgctactcgcagaacgcgccgctggatatgtacaaagaggtcaataccggcagcaacctgccagcgcaaatcgatctctatgccgtcgatggcgacgagtacaagttcctttgcgtggcgaaaggcggcggttcagcaaacaaaacgtatctctatcaggagaccaaagcgctgctcaccccaggcaagctgaaaaacttcctcgttgagaaaatgcgcacgctgggcaccgcggcctgtccgccataccatatcgcctttgtcattggtggcacctcggcggaaagcacgctgaaaaccgttaaactcgccagcacccactattacgacgcgctgccgacggaaggtaacgagcacggccaggcattccgcgatctccacctggaacaggaactgctggaagaagcgcaaaaacttggcctcggcgcccagttcggcgggaaatatttcgcccacgatattcgcgtaattcgcctgccgcgtcacggcgcttcctgtccggtggggatgggcgtctcctgctcggcagaccgtaacatcaaagcgaaaatcaaccgcgaaggcatctggatcgaaaaactggaacacaatccgggccagtatattccgccagcgctgcgtcaggcgggcgaaggcgacgcggtgaaagtcgatcttaaccgtccgatgaaagagatcctcgcccagctatcgcagtacccggtctcgactcgcctgtcgctgacgggcaccattatcgtaggtcgcgatatcgcccacgcgaagctaaaagagcgtattgaatccggcgaagacctgccgcagtatattaaagaccaccccatctattacgcaggtccggccaaaaccccggcaggttatccatctggctcattaggccccaccaccgcaggccgaatggactcttatgtcgatctactgcaatcccacggcggcagtatgatcatgctggcgaaaggcaaccgtagtcagcaggtcacggatgcctgtaaaaaacacggcggcttttatttgggcagtatcggcggcccggcggcggtactggcacagcagagcattaagcatctggagtgcgtcgagtatccggaactcggcatggaagctatctggaaaattgaagtagaagatttcccggcctttattctggtggatgacaaaggcaacgatttcttccagcagattgtcagcaaacagtgcgctaactgcgcgaaataa

SEQ ID NO: 44293 - protein, 548 aa, Salmonella enterica subsp. enterica serovar Typhi Ty2
MSKKEFIYQAPFPMGEDKTEYYLLTSDYVSVSEFNGESILNVEPQALTLLAQQAFHDASFMLRPEHQQQVAAILHDPEASENDKYVALQFLRNSEIAAKGILPTCQDTGTAIIMGKKGQRVWTGGGDEAALSKGVFNTYIEDNLRYSQNAPLDMYKEVNTGSNLPAQIDLYAVDGDEYKFLCVAKGGGSANKTYLYQETKALLTPGKLKNFLVEKMRTLGTAACPPYHIAFVIGGTSAESTLKTVKLASTHYYDALPTEGNEHGQAFRDLHLEQELLEEAQKLGLGAQFGGKYFAHDIRVIRLPRHGASCPVGMGVSCSADRNIKAKINREGIWIEKLEHNPGQYIPPALRQAGEGDAVKVDLNRPMKEILAQLSQYPVSTRLSLTGTIIVGRDIAHAKLKERIESGEDLPQYIKDHPIYYAGPAKTPAGYPSGSLGPTTAGRMDSYVDLLQSHGGSMIMLAKGNRSQQVTDACKKHGGFYLGSIGGPAAVLAQQSIKHLECVEYPELGMEAIWKIEVEDFPAFILVDDKGNDFFQQIVSKQCANCAK

SEQ ID NO: 44294 - DNA, 1635 bp, Bacteroides thetaiotaomicron VPI-5482
  CDS (1)..(1635): transl_table=11
atggcaacacctccgtttaagtatcaacccatgtttgaaaagggaaaagataccactgagtattatctgcttacaaaagactatgtatcggtaagcgagtttgaaggaaatcctatcctgaaaattgagaaagaaggcttgactgcgatggcaaatgcagcttttcgtgatgtgtcattcatgcttcgccgttcgcacaatgaacaggttgctaagattctgagtgatccggaagccagcgagaacgataagtacgtagcactgactttcctgcgtaatgcggaagtggctgccaaaggtgtacttccattctgtcaggataccggtactgctattatccacggtgaaaagggacagcaagtgtggaccggctataccgacgaggaagctctgtcactgggtgtttacaaaacatataccgaagaaaacctgcgttactctcagaatgcgcctctgaatatgtatgatgaggtaaatacaaaatgtaacctgcctgcacagattgacatcgaagctaccgaagggatggaatatgaattcctctgcgtaacgaaaggtggtggttctgccaacaaaacatatctgtatcaggaaacaaaagcaattttgaaccccggtacactggttccgttcctggtggaaaaaatgaagactctgggaactgccgcttgtcctccttatcatatcgcttttgtgatcggcggtacttctgctgagaagaacctgctgacagtgaaactggcgtctactcacttctacgataatctgccgactacgggaaatgaatttggccgtgctttccgtgatatcgaactggaaaaacaagtactggaagaagctcacaagatcggtctgggtgcacaattcggcggtaaatatctggcacatgatgttcgtatcattcgtctgcctcgtcacggtgcttcttgtccggtaggtctgggcgtgtcttgttctgccgaccgtaacatcaaatgtaaaatcaataaagatggtatctggattgagaaactggattcaaatccgggtagcctgattccggcagaattgcgtcaggccggtgaaggtgatgtagtgaagattgatctgaaccgtccgatggctgagattctgaaagaactgaccaaatatcctgtatctactcgtctgtcactgaacggtactatcatcgttggccgtgatatcgctcacgctaaactgaaagaacgtctggatcgtggagaagatttgcctcagtatatcaaggatcatcctatttactatgctggtccggccaagactccggctggtatggcttgcggttcaatgggcccgacaactgccggacgtatggactcgtatgttgagctgttccagagccacggtggcagcatggttatgttggcgaaaggtaaccgtagccagcaggttacagatgcttgtcagaaatatggcggcttctatctgggttctatcggcggaccggctgcaatccttgctcagaacaacatcaagagcattgagtgcgtagaatatccggaactgggcatggaagcaatctggaaaattgaagtggaagatttcccggcatttattctggtagatgacaaaggaaatgacttcttcaaacagattaaaccacgttgtgccaaataa

SEQ ID NO: 44295 - protein, 544 aa, Bacteroides thetaiotaomicron VPI-5482
MATPPFKYQPMFEKGKDTTEYYLLTKDYVSVSEFEGNPILKIEKEGLTAMANAAFRDVSFMLRRSHNEQVAKILSDPEASENDKYVALTFLRNAEVAAKGVLPFCQDTGTAIIHGEKGQQVWTGYTDEEALSLGVYKTYTEENLRYSQNAPLNMYDEVNTKCNLPAQIDIEATEGMEYEFLCVTKGGGSANKTYLYQETKAILNPGTLVPFLVEKMKTLGTAACPPYHIAFVIGGTSAEKNLLTVKLASTHFYDNLPTTGNEFGRAFRDIELEKQVLEEAHKIGLGAQFGGKYLAHDVRIIRLPRHGASCPVGLGVSCSADRNIKCKINKDGIWIEKLDSNPGSLIPAELRQAGEGDVVKIDLNRPMAEILKELTKYPVSTRLSLNGTIIVGRDIAHAKLKERLDRGEDLPQYIKDHPIYYAGPAKTPAGMACGSMGPTTAGRMDSYVELFQSHGGSMVMLAKGNRSQQVTDACQKYGGFYLGSIGGPAAILAQNNIKSIECVEYPELGMEAIWKIEVEDFPAFILVDDKGNDFFKQIKPRCAK

SEQ ID NO: 44296 - DNA, 1524 bp, Bordetella bronchiseptica RB50
  CDS (1)..(1524)
atgaccgtcctcatcaaagaagaagacttcatccagtccatcgccgatggcatccagttcatcagctactaccacccggtggactatatccgtcacctggcgcgcgcctacgagcgtgaagaaagcccggctgcccgcgatgccatggcgcagatcctgaccaactcgcgcatgtgcgccgagggcaagcgcccgctgtgccaggacaccggcatcgtcaacgtgttcctcaaggtcggcatgaacgtgcgcttcgacacgcaacgcacgctgcaggaactctgtgacgaaggcgtgcgccgcggctacctcaaccccgacaacccgctgcgcgcgtcggtgctggacgatccgctgttcgcgcgcaagaacacccgcgacaacacgccctgtatcctgcacgtcgaactggtgccgggcgacaccgtcgacgtgcaagtggcctccaagggcggcggctcggaaaacaagtccaagttcgtcatgctcaatcccagcgattcgctggtcgactgggtgctcaaaaccgtgccgaccatgggcgccggctggtgcccgccgggcatgctcggcatcggcgtgggcggcacggccgagaaggccatgctgatggccaagcagtcgctgatggaagacatcgacatgtacgagctgctggcgcgcggcccgcagagcaagctggaagagctgcgcatcgagctgtacgagaaggtcaacgccctgggcatcggcgcgcagggcctgggcggcctgacgaccgtgctggacgtcaagatcagcaccttccccacgcacgccgcgtccaagccggtggcgatgatcccgaactgcgccgccacgcgccacgcgcatttcgtgctggacggctccggtccggcccgcctcgatccgccgtcgctgtccgaatggccggaagtgcactgggcgcccgattacaacaagtccaggcaggtcgacctcgataccctgaccaaggaagaagtcgccagctggaaaccgggccagaccttgctgctgtcgggcaagatgctgaccggccgcgacgcggcgcacaagcgcatccaggacatgctgtccaagggcgagagcctgccggtggacttcaccaaccgcgtcatctactacgtcggcccggtcgatccggtgcgcgacgaagtcgtcggcccggccggtcccaccacggcgacccgcatggacaagttcaccgacatgatgctggcgcagaccggcctgatttccatgatcggcaagtccgagcgcggcccggtcgccatcgagtcgatccgcaagcacggctcggcctacctgatggcggtgggcggcgcggcctacctggtgtccaaggccatccgcaacgccaaggttctggctttcgaggacctgggcatggaagccatctacgagttcgacgtcaaggacatgcccgtgaccgtcgcggtggactcgcagggcacctcggtgcacaccaccggcccgaaggagtggcaggcccgcatcggcaagattccggtcgcggtcgcctga

SEQ ID NO: 44297 - protein, 507 aa, Bordetella bronchiseptica RB50
MTVLIKEEDFIQSIADGIQFISYYHPVDYIRHLARAYEREESPAARDAMAQILTNSRMCAEGKRPLCQDTGIVNVFLKVGMNVRFDTQRTLQELCDEGVRRGYLNPDNPLRASVLDDPLFARKNTRDNTPCILHVELVPGDTVDVQVASKGGGSENKSKFVMLNPSDSLVDWVLKTVPTMGAGWCPPGMLGIGVGGTAEKAMLMAKQSLMEDIDMYELLARGPQSKLEELRIELYEKVNALGIGAQGLGGLTTVLDVKISTFPTHAASKPVAMIPNCAATRHAHFVLDGSGPARLDPPSLSEWPEVHWAPDYNKSRQVDLDTLTKEEVASWKPGQTLLLSGKMLTGRDAAHKRIQDMLSKGESLPVDFTNRVIYYVGPVDPVRDEVVGPAGPTTATRMDKFTDMMLAQTGLISMIGKSERGPVAIESIRKHGSAYLMAVGGAAYLVSKAIRNAKVLAFEDLGMEAIYEFDVKDMPVTVAVDSQGTSVHTTGPKEWQARIGKIPVAVA

SEQ ID NO: 44298 - DNA, 1527 bp, Chromobacterium violaceum ATCC 12472
  CDS (1)..(1527): transl_table=11
atgaccatcatccgccaggaagacttcatccagagcatcgccgatgccttccagtacatcagttgctaccaccctaaagactatatcgacgcgctgtaccaggcttacctgaacgaggagagcaccgccgccaaggacgcgatggcgcagatcctggtcaacagccgcatgtgcgccgaaggccgccggccgatctgccaggataccggcatcgccgtggtgttcctgaaagtgggcatgaaagtgcagtgggacgcccagctcagcgtgcaggagatggtcaacgaaggcgtgcgccgcgcctacaaccacccggacaacaagctgcgcgcctccgtgctgctggacccggccggcaagcgccagaactccaaggacaataccccggccgtggtgcacttcgagatcgtcgaaggcgaccaggtggaggtgatctgcgcggccaagggcggcggctcggaaaacaagtccaagatggtgatgctgaacccgtccgattccatcgtcgactgggtgctgaagaccgtgccgaccatgggcgccggctggtgtccgcctggcattctcggcatcggcatcggcggcacgccggagaaggcgatgctgctggcgaaagagtcgctgatggaccacgtcgacatccacgagctgaaggccaaggccgcggccggcgccgagctgtcccgcgtcgaggcgctgcggctggagctgttcgacaaggtcaacgcgctgggcatcggcgcccagggcctgggcggcctgaccacggtgctggacgtgaagatcctggattacccgacccacgcggcgtcgctgccggtggcgatgatccccaactgcgccgccacccgccacatccatttccacctggacggcagcggcccggcccacctggaaacgcctagcctggaagactggccggacatcacctacgacgcctcgtccggcaagcgcgtggacctggacaagatcaccaaggaagaagtggccagctggcagccgggcgacgtgctgctgctgaacggcaagatcctgaccggccgcgacgccgcgcacaagcgcatgatcgatatgctgaacaagggcgagaagctgccggtggacttcaccaaccgcttcatctactacgtcggcccggtcgatccggtgcgagacgaagtcgtcggcccggccggcccgaccaccgccacgcggatggacaagttcacgcgccagatgctggagcagaccggcttgctgggcatgataggcaaggccgagcgcggtccggcggcgatagaggcgatcaaggacaacaaggcggtctacctgatggccgtcggcggttcggcttacctggtgtccaaggcgatcaaggcgtccaaggtggtgggcttcgccgacctgggcatggaggcgatctacgagttcgaggtcaaggacatgccggtgacggtggcggtggattcctgtggcacctcggtgcacaacaccggcccggcggagtggcgggtgaagattggcaagattccagtaagccaaatttaa

SEQ ID NO: 44299 - protein, 508 aa, Chromobacterium violaceum ATCC 12472
MTIIRQEDFIQSIADAFQYISCYHPKDYIDALYQAYLNEESTAAKDAMAQILVNSRMCAEGRRPICQDTGIAVVFLKVGMKVQWDAQLSVQEMVNEGVRRAYNHPDNKLRASVLLDPAGKRQNSKDNTPAVVHFEIVEGDQVEVICAAKGGGSENKSKMVMLNPSDSIVDWVLKTVPTMGAGWCPPGILGIGIGGTPEKAMLLAKESLMDHVDIHELKAKAAAGAELSRVEALRLELFDKVNALGIGAQGLGGLTTVLDVKILDYPTHAASLPVAMIPNCAATRHIHFHLDGSGPAHLETPSLEDWPDITYDASSGKRVDLDKITKEEVASWQPGDVLLLNGKILTGRDAAHKRMIDMLNKGEKLPVDFTNRFIYYVGPVDPVRDEVVGPAGPTTATRMDKFTRQMLEQTGLLGMIGKAERGPAAIEAIKDNKAVYLMAVGGSAYLVSKAIKASKVVGFADLGMEAIYEFEVKDMPVTVAVDSCGTSVHNTGPAEWRVKIGKIPVSQI

SEQ ID NO: 44300 - DNA, 1647 bp, Porphyromonas gingivalis W83
  CDS (1)..(1647): transl_table=11
atggcaactccagaatttaagtatcagaagcctttccctatgggggatgatacgacagagtattatttgctgacgaaggagtatgtgtccgtggacaagtttggcgatcatgatgtcctgaaagtggagccggaagctctgcgattacttgcgcggacggcttttcatgacatcgctttctatttgcgaccggagcatcagcagcaagtggctcggattctgtccgatccggaagccagcgaaaacgacaaattcgtggctttgactttcctgcgcaatgcggaggtttcagccaagggacagctccctttctgccaagatacgggcacggctatcatcctcggtaagaagggacagcaggtctggacgggcggtcatgacgaagagcagctctcgcatggtgtctatgatacctatacgcaggagaacctgcgctattcgcagaatgctcctttggatatgtataaggaggtgaatacggggtgcaacctgcccgcacagatcgacctgatggccgtggacggcatggagtacgactttctctgcatagccaaaggaggagggtcggccaataagacgtatctctatcaggaaacgaaagcactgctcaaccccaagacgctggtgaacttcctcgtggataagatgagttctctcggtacagctgcctgtcctccgtatcacattgcattcgtgataggcggaacttcggccgaaacgaacctcaagaccgtcaagctggcttcggccaagtactacgacaatctgcctacttcgggcaacgaaggcgggcgtgccttccgcgatgtcgaactggaaaaagaagtcttggaagctgcctatcatctgggactgggtgctcagtttggaggcaaatacttcgcacacgacgtgcgcatcatccgcctgccccgacatggagcaagctgtcccgtaggtatgggcgtcagttgttcggcagaccgcaatatcaaggcaaagatcaataaagacggtatctggatcgaaaagatggagaccaatcccacacgcctcatccctgaatccatgcgtgagggtacagagggtacggtggtcaaggtcgatctgaatcgtccgatgcctgagattctgagagagctgtcgcagtatcctgtttccacccgtttgtctctcagtggtacgattatcgtggggcgtgatattgctcacgccaaactaaaagaacgtatcgaccgtggcgagggtttgcccgactatatcaagaatcatcccatctactacgccggtccggccaagacaccgaaggggatgccgagcggttcgttcgggcctacgacagcgggccgtatggatagctatgtggatctcttccaatcgcatggaggcagtatggtgatgatagccaaaggcaaccgctctcagcaagtgacggatgcgtgtaagaagtacggcggattctacctcggcagtgttggaggcccagcagctattctggctcaggacagcattaagaaagtggagtgtctggaatatcccgagctgggtatggaggctatttggaagatcgaagtggaggacttcccggcctttattctggtagatgacaagggcaatgatttctttactcagataagagagaagtgtaagggttgtgccttgcattga

SEQ ID NO: 44301 - protein, 548 aa, Porphyromonas gingivalis W83
MATPEFKYQKPFPMGDDTTEYYLLTKEYVSVDKFGDHDVLKVEPEALRLLARTAFHDIAFYLRPEHQQQVARILSDPEASENDKFVALTFLRNAEVSAKGQLPFCQDTGTAIILGKKGQQVWTGGHDEEQLSHGVYDTYTQENLRYSQNAPLDMYKEVNTGCNLPAQIDLMAVDGMEYDFLCIAKGGGSANKTYLYQETKALLNPKTLVNFLVDKMSSLGTAACPPYHIAFVIGGTSAETNLKTVKLASAKYYDNLPTSGNEGGRAFRDVELEKEVLEAAYHLGLGAQFGGKYFAHDVRIIRLPRHGASCPVGMGVSCSADRNIKAKINKDGIWIEKMETNPTRLIPESMREGTEGTVVKVDLNRPMPEILRELSQYPVSTRLSLSGTIIVGRDIAHAKLKERIDRGEGLPDYIKNHPIYYAGPAKTPKGMPSGSFGPTTAGRMDSYVDLFQSHGGSMVMIAKGNRSQQVTDACKKYGGFYLGSVGGPAAILAQDSIKKVECLEYPELGMEAIWKIEVEDFPAFILVDDKGNDFFTQIREKCKGCALH

SEQ ID NO: 44302 - DNA, 1524 bp, Vibrio vulnificus YJ016
  CDS (1)..(1524): transl_table=11
atgactgtaattcgcacgcaagatgtcatcagcagcgtagctgatgcacttcagtacatctcttactaccacccactcgattttgttcaagccctagaaaaagcctaccatcgtgagcagagccaagcggccaaagatgccattgcgcagattttgatcaactcgcgtatgtcggcggaagggcatcgcccaatttgccaagataccggtatcgtgacgtgttttgtcaatatcggtatgggcgttcagtgggactcaacggatctcaccgtacaacagatgattgacgaaggcgtgcgtcaggcttacaccaatcctgacaacccattgcgtgcgtcggtattgatggaccctgcaggtaaacgtattaacaccaaagacaatacacctgcggttgttcacatcaatatggtgccgggcaataccgtagaaattcagatcgcggcaaaaggcggcggctctgaaaacaaaaccaagatggtgatgctcaacccttcagacgatattgctgagtgggtagaaaaaacattgcctttgatgggcgcgggctggtgtcctccgggcatgcttggcattggcattggtggcacagcagaaaaagcggcggtactggctaaagagtcgttgatggagcacatcgacatccacgaactgattgagcgtggcccgcaaaatgcggaagaagagctgcgtttggacatcttcaatcgtgtcaaccgtttaggtattggtgctcaagggctcggtggggtgacaacggtggtggatgtgaaaatcaaaaccgcccctacgcacgcagcgtccaagccagtgtgtatgatcccgaactgtgcggcgactcgtcacgttcatttcacacttgacggctctggcccagcagaactgacgccaccgaagctagaagattggccaaacatcacttgggatgcgggtgcaagcgcgcgccgtgttaacctcgataccgtgacaaaagaagacgttcagcaatggaaaaccggtgagacactcttgctttcaggtaagattttgaccggtcgcgatgccgcgcataaacgcattcaaaccatgttgcaaaatggcgaaggcctacctgaaggcgttgaccttaaagggaagtttatctactacgttggccctgtggatgcagtgggtgacgaagtggttggcccagcaggcccaaccacctcaacacgtatggataagttcaccgatatgatgctggatgaaacgggcattatgggcatgatcggcaaagcggagcgtggcccagccactgttgagtcaatcaagaaccataaagcggtgtatctgatggcggtcggtggtgcggcgtacttggtagcaaaagccatcaagaaagcacgtgttgttgcttttgaagatctcggtatggaagcgatttacgaatttgaagtcgaagatatgccagtgacggtcgcggtggattcgagcggtgccaatgctcaccaaattggtcctgatacttggaaagttaaaatccaagaaatggaatcacaaaaataa

SEQ ID NO: 44303 - protein, 507 aa, Vibrio vulnificus YJ016
MTVIRTQDVISSVADALQYISYYHPLDFVQALEKAYHREQSQAAKDAIAQILINSRMSAEGHRPICQDTGIVTCFVNIGMGVQWDSTDLTVQQMIDEGVRQAYTNPDNPLRASVLMDPAGKRINTKDNTPAVVHINMVPGNTVEIQIAAKGGGSENKTKMVMLNPSDDIAEWVEKTLPLMGAGWCPPGMLGIGIGGTAEKAAVLAKESLMEHIDIHELIERGPQNAEEELRLDIFNRVNRLGIGAQGLGGVTTVVDVKIKTAPTHAASKPVCMIPNCAATRHVHFTLDGSGPAELTPPKLEDWPNITWDAGASARRVNLDTVTKEDVQQWKTGETLLLSGKILTGRDAAHKRIQTMLQNGEGLPEGVDLKGKFIYYVGPVDAVGDEVVGPAGPTTSTRMDKFTDMMLDETGIMGMIGKAERGPATVESIKNHKAVYLMAVGGAAYLVAKAIKKARVVAFEDLGMEAIYEFEVEDMPVTVAVDSSGANAHQIGPDTWKVKIQEMESQK

SEQ ID NO: 44304 - DNA, 1656 bp, Rhodopseudomonas palustris CGA009
  CDS (1)..(1656): transl_table=11
atgaacgctcccacgccgattccgtccgccgctaccccggttccgccctataagcacaccccgctgttcccgctgggcaaggacgagaccgtctatcgcaagatcacgtcggacggcgtgcgggtcgagaaggtgctcgggcgcgacatgctggtggtggagcgcgaggcgctgcgggcgctgtcggaggcagcgttcggcgagatcaaccattatctgcggcccggccacctcaagcagctccgcgccatcctggacgatccggaggcgagcccgaacgacaagttcgtcgcgctggatttcctgaagaacgccaacatcgccgccggcggcgtgctgccgatgtgccaggacactggcaccgcgatcatcatgggcaagaagggctcgaacgtcatcaccgacggcgacgacgaggcggcgctgtcggaaggcgcgcgcgacgcttacttgcgccgcaacctgcgctactcgcaggtcgcgccgctgtcgatgttcgaagagaagaacaccgccaacaacatgccggcgcagtgcgagatctacgccgagggcgatgatgcctacaagttcatgttcatggccaagggcggcggctcggccaacaagagcttcctgttccaggcgacgccgtcgttgctgacccgcgaccggctgctggcgttcctgaaagagaagatcatgacgctcggcaccgcggcgtgcccgccctatcacctggcgatcgtgatcggcggcacttcggtcgagaccacgatgaagacggtgaagctcgcatccgcgcgctatctcgatgcgctgccgacccacggctccgaactcggcaacgccttccgcgacgtcgagatggagcaggaaatccacaagatgacgcagagcctcggcgtcggcgcgcagttcggcggcaagtatttctgccacgacgttcgcgtcatccggctgccgcgccacggcgcctcgttgccgatcgggcttggggtgtcgtgctcggccgaccgccagatggtgggcaagatcaccaaggacggcgtgtatctggaggagctggagcacaatccggcgcagtatctgccggaagtcgagcaggcgctcggcggcgaggtggtgaagatcgacctcaaccagccgatgaaagatatcctcgccacgctgagcaagcacccgatcaagacccggctgtcgctgaccggcaccatgatcgtggcgcgcgacgccgcccatgccaagctgcgcgaccggctggagaagggcgagccgctgccggactacttcaagaaccacccggtgtactacgccggtccagccaagaccccggacggctatgcttccggcgcgttcggcccgactaccgcggggcgcatggactcgttcgtcgatcagttccaggcggccggcggctcgatggtgatggtcgccaagggcaaccgcgcgccggcggtgcgcgaggcctgcaagaagtacggcggtttctacctcggctcgatcggcggcgctgcggccaacctcgctgagcactgcatcaagaaggtcgaggtgctggaatatcccgagctcggcatggaggcgatctggaagatcgacgtcgtcgacttcccggccttcatcatcgtcgacgacaagggcaacgacttcttcaaggaactgaatctgggctga

SEQ ID NO: 44305 - protein, 551 aa, Rhodopseudomonas palustris CGA009
MNAPTPIPSAATPVPPYKHTPLFPLGKDETVYRKITSDGVRVEKVLGRDMLVVEREALRALSEAAFGEINHYLRPGHLKQLRAILDDPEASPNDKFVALDFLKNANIAAGGVLPMCQDTGTAIIMGKKGSNVITDGDDEAALSEGARDAYLRRNLRYSQVAPLSMFEEKNTANNMPAQCEIYAEGDDAYKFMFMAKGGGSANKSFLFQATPSLLTRDRLLAFLKEKIMTLGTAACPPYHLAIVIGGTSVETTMKTVKLASARYLDALPTHGSELGNAFRDVEMEQEIHKMTQSLGVGAQFGGKYFCHDVRVIRLPRHGASLPIGLGVSCSADRQMVGKITKDGVYLEELEHNPAQYLPEVEQALGGEVVKIDLNQPMKDILATLSKHPIKTRLSLTGTMIVARDAAHAKLRDRLEKGEPLPDYFKNHPVYYAGPAKTPDGYASGAFGPTTAGRMDSFVDQFQAAGGSMVMVAKGNRAPAVREACKKYGGFYLGSIGGAAANLAEHCIKKVEVLEYPELGMEAIWKIDVVDFPAFIIVDDKGNDFFKELNLG

SEQ ID NO: 44306 - DNA, 1626 bp, Geobacter sulfurreducens PCA
  CDS (1)..(1626): transl_table=11
atgtccaccaagccgttcgtctaccaggaccctttccccctcggcaaagatgagacgaagtaccgcaagatcgagggatccgagaaacatgtcacggtcgagcagttcgccggcaaggaagtgctgcgggtctgccccgaggcgctttccatcctcgccaacgaggcgatgcgcgatgtatccttcctgctgcgccccgagcacaacgagtcggtggcgaagatcctgcgcgacccggaagcgtccatgaacgacaagggcgtggccctcgcattcctgcgcaacgccgagatctccgccaacttcgagcttcccatctgccaggataccggcaccgccaccgtcatcgccaagaagggccagcaggtctggaccggcggcaaggatgaagaatacctctccaagggggtctacaagacctacaccgaggagaacctccgttactcccagaccgttgccctcaacatgtacgacgagatcaacaccggcaccaatctcccggcccaggtcgagatccaggccgtggacggcgatgcctacaagtttctcttcatggccaaaggtgggggctccgccaacaagaccatgcttttccaggagaccaaggcgctgctcacccccgagaagcttgaaaagttcctcgtggacaagatgaagtacctgggcaccgccgcctgtccgccctaccacatcgccgtggtcgtgggcggctgctccgccgaccagtgcatgaagaccgtcaagcttgcctcggccaagtacctggacgcactccccacccaggggaacgagcacggccaggcgttccgcgatgtggagcttgaggagaaactcctccaggccgcctacaagctcggcatcggcgcccagttcggcggcaagtacttcgcccacgacgtccgggtcatccggcttccgcgtcacggcgcttcctgccccgtggggatggcggtctcctgttccgccgaccgcaacatcaaggcgaagatcaccagggacggcctcttcgtggaagagctcgaccgcaatccgggccgcctcatccccgagcagtaccgcggcaagcacgagcacggcgtcaagatcgacctgaaccgccccatgaaggaaatcctcgccgagctcagcaagtacccggttgcaacgccgctgctcctgaacggtaccatcgtggtcggccgcgacatcgcccacgccaagttcaaggagatcatcgacgccggcaagccggtgcccgagtacctgctcaaccacccgatctactacgcgggaccggccaagaccccggctggcaagccctccggctccttcggccccaccaccgccggccggatggactcctacgtggatctcctccagtccaagggcgcatccatgatcatgatcgccaaggggaaccgcagccagcaggtgaccgatgcctgccagaagtacggcgggttctacctgggctccatcggcggcccggccgcggttcttgccgaggagaacatcaagaaggtcgagtgcatcgacttccccgaactggggatggaagcggtctggaagatcgaagtggaaaacttcccggccttcatccttgtggacgacaaggggaacgacttcttcaagcaactgggtctgtaa

SEQ ID NO: 44307 - protein, 541 aa, Geobacter sulfurreducens PCA
MSTKPFVYQDPFPLGKDETKYRKIEGSEKHVTVEQFAGKEVLRVCPEALSILANEAMRDVSFLLRPEHNESVAKILRDPEASMNDKGVALAFLRNAEISANFELPICQDTGTATVIAKKGQQVWTGGKDEEYLSKGVYKTYTEENLRYSQTVALNMYDEINTGTNLPAQVEIQAVDGDAYKFLFMAKGGGSANKTMLFQETKALLTPEKLEKFLVDKMKYLGTAACPPYHIAVVVGGCSADQCMKTVKLASAKYLDALPTQGNEHGQAFRDVELEEKLLQAAYKLGIGAQFGGKYFAHDVRVIRLPRHGASCPVGMAVSCSADRNIKAKITRDGLFVEELDRNPGRLIPEQYRGKHEHGVKIDLNRPMKEILAELSKYPVATPLLLNGTIVVGRDIAHAKFKEIIDAGKPVPEYLLNHPIYYAGPAKTPAGKPSGSFGPTTAGRMDSYVDLLQSKGASMIMIAKGNRSQQVTDACQKYGGFYLGSIGGPAAVLAEENIKKVECIDFPELGMEAVWKIEVENFPAFILVDDKGNDFFKQLGL

SEQ ID NO: 44308 - DNA, 1836 bp, Bdellovibrio bacteriovorus HD100
  CDS (1)..(1836): transl_table=11
gtgcttataggtccagggcgatatgttgtgtttcagaaggagacgtcacaaacgaagccttctaacctcggtaggttcctgaccactctccagcgaagagagacccggtcccaagaaaaccgccgcaatcgcggctcacaaagtcccacccaaatagcccacctaacacagcctaccgagggttgcgcgcgaacacgacgcaatgctactttcagttgcatgtcatttaaatacttccccctctatgaaaagcaaaaagatacgactcaatataaaaagatctcttccgatcacgtgcgcgtggaaaaaatcggcgagcgcgaggttctgattgttgaacctgaagcattggaactgctcgctcaagaggccttgagcgatgtttcgcacctgttgcgcccaaagcacctggaaaaactggaaagaatccttcaggaccctgaagcttcaccaaatgaccgctttgtggcggtggatctgctgcgcaatgcggtgatcgcggcgcagatggagttcccttcctgtcaggacacgggaactgcaattgttgtcggcaaaaaaggggagcgcgtgttcaccggggctgatgacaaggaattcctgtccaaagggatttacaacacctatcaaaaacgcaatctgcgcttttctcagatggcgccgatttctttctttgaagaaaaaaataccggcagcaatctgccagcccagatcgacatctattccgagcagggcgaagagtacaacttcctgttcctggctaaaggtggcggcagtgcgaataaatcctatctgtatcaaaaaaccaaagcggttctgaatccggaaggttttgaaaagtttgtgcgcgaaacgctgaactctttgggcacggcggcttgtcctccttatcacctggctttttgcgtgggtggaacgtcggcggaagaaacgctgaagatcgtgaaatacgcatctgcaggttatctggatggtctgccgacgacaggcagcgaaggcggacgggcctatcgtgatcttgaaatggaaaaacaagtcgagcagtgggctcgtgaaacgggcatcggtgctcagttcggtggcaagtacttcgtgcacgacgtgcgtgtgatccgactgcctcgccacggagcaagttgcccgattggtgtgggcgtcagctgttctgcggatcgtaacatcaaaggcaagatcacccgcgacggtatcttcctggaacaattggagcttcatccagagcagtacctgccaaatcacctgaaggatgccagcgccgaagcaattgaaattgatctgaacaaaccgatggcggaaacgctgaaggttctttcccagcaaaaagtggcgacccgggtgatgttaagcggtcccatgatcgtggctcgcgacatcgctcatgcgaaactgaaagaaaaagtcgatcgcggcgaaggtgtgcctcagtactttaaggattatgcagtctattacgcgggcccggctaagacgccaaaaggctacgcttccggctccttcgggccgacgaccagtgaacgaatggacccgtatgtggggacgttccaggcgctgggaggctccatgatcatgttgggtaaggggaaccgcagcccgcaggtcacagaagcctgcaaacagtacggtggcttctatctgggctctattggcggcccggcggcccgtttgggcaaagagtgcatcacaaaagttgaagtgctggatttcccggaactgggtatggagtctgtgtggaagatcgaagtcaaagacttcccggcctttatcatcgtcgatgacaaaggaaatgacttcttcaagtccgttatccgaaaactttaa

SEQ ID NO: 44309 - protein, 611 aa, Bdellovibrio bacteriovorus HD100
MLIGPGRYVVFQKETSQTKPSNLGRFLTTLQRRETRSQENRRNRGSQSPTQIAHLTQPTEGCARTRRNATFSCMSFKYFPLYEKQKDTTQYKKISSDHVRVEKIGEREVLIVEPEALELLAQEALSDVSHLLRPKHLEKLERILQDPEASPNDRFVAVDLLRNAVIAAQMEFPSCQDTGTAIVVGKKGERVFTGADDKEFLSKGIYNTYQKRNLRFSQMAPISFFEEKNTGSNLPAQIDIYSEQGEEYNFLFLAKGGGSANKSYLYQKTKAVLNPEGFEKFVRETLNSLGTAACPPYHLAFCVGGTSAEETLKIVKYASAGYLDGLPTTGSEGGRAYRDLEMEKQVEQWARETGIGAQFGGKYFVHDVRVIRLPRHGASCPIGVGVSCSADRNIKGKITRDGIFLEQLELHPEQYLPNHLKDASAEAIEIDLNKPMAETLKVLSQQKVATRVMLSGPMIVARDIAHAKLKEKVDRGEGVPQYFKDYAVYYAGPAKTPKGYASGSFGPTTSERMDPYVGTFQALGGSMIMLGKGNRSPQVTEACKQYGGFYLGSIGGPAARLGKECITKVEVLDFPELGMESVWKIEVKDFPAFIIVDDKGNDFFKSVIRKL

SEQ ID NO: 44310 - DNA, 1527 bp, Acinetobacter sp. ADP1
  CDS (1)..(1527): transl_table=11
atgaccacaattatcaaacaagaagacttgatcacttcggtcaaggatgcccttcagttcatttcctactatcatccgcaagattttattcaggccatgagccgtgcgtacgatcgtgaagcgaaccaagctgcaaaggatgcaatcgcacaaattctcatcaactctcgtatgtgtgcagaaggtcatcgcccaatctgtcaagatacaggtatcgtcaacgtatttgttgatgtcggtctagatgttaagttcgatcttagcatgagcctagatgatgcgattaatgaaggtgtacgccaaggttatcttgaaaataccaacgtactccgtgcttctgtgcttgcagatccagcctttggccgtaaaaataccaaagacaacacccccgctgtaatccattataaacttgttccaggtaacaaagttgatattacagtagccgctaaaggcggtggttctgaaaataaatctaaacttgccatgttgaatccgtctgattcaattgtggactgggtactgaaaactgttccaactatgggcgctggctggtgtcctccaggtatgctgggtatcgggattggtggtactgctgaaaaagccatgatgcttgccaaagaagcattgatggaagaaatcaacatggacgaattacttcgtcgcgggccagaaaacaaaattgaagaacttcgtatcgaaatcttcgagaaagtgaatgcgcttggtattggtgcacaaggtcttggcggtttgactacagttctcgatatcaaaattaaagattatccatgtcatgcggcaggcaaaccagtgggcatgattccaaactgtgctgcgactcgtcatgctcattttcagttagatggttcaggccctgcacatattcaagcacctaaacttgaagattacccagaagtgacgtgggattcatctaaatcaaaacgcgtaaaccttgataccatcactcaagaagaaatgaactcttggcagccaggtgataccttgttgctcagtggcaccatgtacactggtcgtgatgcagcgcataaacgtctggtagaaatgatcgataatggtgaagagcttcctgtcgatcttaaaggtaagtttatttactacgtgggtccagtcgatcctgtaggtgatgaagtggttggacctgctggcccaacaacagcaacgcgtatggacaaattcacacgtaaagtgcttgagcatacgggtctgtttggcatgattggtaaagcagatcgtggcccaaccgcgattgaagcgattaaagataatcaagcaacgtatctcatggcagtcggtggtgcagcataccttgtatctaaggcagtgcgtgaagccgaagtggttgcatttgctgatctaggtatggaagctatctacaaatttgtagtcgaagacatgccagtatccgttgcagttgatgttaacggtacatcggtacatgcaattgcacccaaaatctggcaagaaaagattggtaaaattccagtgattgatgccactgcagtttaa

SEQ ID NO: 44311 - protein, 508 aa, Acinetobacter sp. ADP1
MTTIIKQEDLITSVKDALQFISYYHPQDFIQAMSRAYDREANQAAKDAIAQILINSRMCAEGHRPICQDTGIVNVFVDVGLDVKFDLSMSLDDAINEGVRQGYLENTNVLRASVLADPAFGRKNTKDNTPAVIHYKLVPGNKVDITVAAKGGGSENKSKLAMLNPSDSIVDWVLKTVPTMGAGWCPPGMLGIGIGGTAEKAMMLAKEALMEEINMDELLRRGPENKIEELRIEIFEKVNALGIGAQGLGGLTTVLDIKIKDYPCHAAGKPVGMIPNCAATRHAHFQLDGSGPAHIQAPKLEDYPEVTWDSSKSKRVNLDTITQEEMNSWQPGDTLLLSGTMYTGRDAAHKRLVEMIDNGEELPVDLKGKFIYYVGPVDPVGDEVVGPAGPTTATRMDKFTRKVLEHTGLFGMIGKADRGPTAIEAIKDNQATYLMAVGGAAYLVSKAVREAEVVAFADLGMEAIYKFVVEDMPVSVAVDVNGTSVHAIAPKIWQEKIGKIPVIDATAV

SEQ ID NO: 44312 - DNA, 1644 bp, Erwinia carotovora subsp. atroseptica SCRI1043
  CDS (1)..(1644)
atgtcgaataaacccttctattaccaagatccttttccactcagtaaagatgacactgaatatcgcctgctgagcagcgactttgtctctgtcgcgcaatttgaaggtcaggacatcctgaaagtcgagccagcggcgttgacccttctggcccagcaagccttccacgatgcttctttcatgctccgccccgctcatcagcagcaagttgccgatattctccatgacccagaagccagcgaaaacgataaatacgttgctctgcaattcctgcgcaactcagaaatttccgccaagggaattctgccgacctgtcaggataccggtaccgcgattatcgtcggtaaaaaaggccaaaacgtgtggactggcggtaacgatgccgaagcgctgtctcagggcgtgtacaacacgttcattgaagacaacttgcgttactcgcagaacgctgcgctggatatgtaccaagaggtcaacactggcaccaacctgcctgcgcagattgatctctacagtaccgagggcgaagattataaattcctgttcgtcaccaaaggcggcggttctgctaacaagacctacttgtatcaggaaaccaaagcgctgctgacgccgggtaaactgaagagcttcctgatcgagaaaatgcgttcattgggcacggcggcctgcccgccataccacatcgcgtttgctattggcggtacctcggcagaaaccacgctgaaaaccgttaaactggcttcgaccaagtactatgacgaactgccgaccgaaggcaacgagcacggtcaggcgttccgcgatgtcgcactggagcaggaaattctggaagccgcacgcgatttgggtctgggggcgcagttcggcggtaaatatttcgcgcacgacgtgcggattatccgcttgccgcgccacggcgcatcttgtccggtcgggatgggcgtatcctgttccgctgaccgcaacatcaaaggcaagatcaaccgcaagggcgtctggctggagcagttagagcagaatccgggcaaatatatccctgagcacctgcgtgaaacgggcgaaggcgatgcggttaaaatcgacctgaaccgcccaatgaccgagatcctgaagacgctgtcgcagtatccggtgtccacccgcctttccctgactggcactatcatcgtgggtcgtgatattgctcacgccaagctgaaagagcgtctggataacggtgaaggtctgccgcagtacattaaagatcacccgatctactacgcaggcccagcgaaaacaccggaaggttatccatcaggttcattaggcccaaccacagctggccgcatggattcctatgtcgatttactgcaagccaacggcggcagcatggtcatgctggcaaaaggcaaccgtagccaacaagtcaccgacgcatgccataaacatggcggtttctacctcggcagcatcggcggcccggcagcgattctggcgcaaaacagcatcaaaagcctgacctgtgtggaatacccagaactgggtatggaagccatctggaaaatcgaagtagaagatttccctgcctttattctggtcgatgataaaggcaacgatttcttccaggtgattcagagcgccaaatgcgtgaaatgcggttaa

SEQ ID NO: 44313 - protein, 547 aa, Erwinia carotovora subsp. atroseptica SCRI1043
MSNKPFYYQDPFPLSKDDTEYRLLSSDFVSVAQFEGQDILKVEPAALTLLAQQAFHDASFMLRPAHQQQVADILHDPEASENDKYVALQFLRNSEISAKGILPTCQDTGTAIIVGKKGQNVWTGGNDAEALSQGVYNTFIEDNLRYSQNAALDMYQEVNTGTNLPAQIDLYSTEGEDYKFLFVTKGGGSANKTYLYQETKALLTPGKLKSFLIEKMRSLGTAACPPYHIAFAIGGTSAETTLKTVKLASTKYYDELPTEGNEHGQAFRDVALEQEILEAARDLGLGAQFGGKYFAHDVRIIRLPRHGASCPVGMGVSCSADRNIKGKINRKGVWLEQLEQNPGKYIPEHLRETGEGDAVKIDLNRPMTEILKTLSQYPVSTRLSLTGTIIVGRDIAHAKLKERLDNGEGLPQYIKDHPIYYAGPAKTPEGYPSGSLGPTTAGRMDSYVDLLQANGGSMVMLAKGNRSQQVTDACHKHGGFYLGSIGGPAAILAQNSIKSLTCVEYPELGMEAIWKIEVEDFPAFILVDDKGNDFFQVIQSAKCVKCG

SEQ ID NO: 44314 - DNA, 1545 bp, Desulfotalea psychrophila LSv54
  CDS (1)..(1545): transl_table=11
ttgatattattaaacaaaaaaggaatagccatgaccaccatcaagaaaaaagactttgtcgattctattgctgaaagtttacagcatatctcctactaccaccccctcgactttgtaaaggcgatgcacgcagcctatctgcgtgaggaaaaccccgcggccaaggacgccataggccaaattctgatcaactccaagatggctgctgtcggaaaaaggcctatctgccaagatacgggcatcgtcaatgtcttcttaaaggttggaaaaaactgtcaatttgactgctcagaaagcctgcaagaactggtagatgagggggtacgtcttgcctacgggcatccagaaaaccccctacgcgcctccgttgtcaaaagtcctgcaaccaaccgtctcaataccaaggataacagcccggccattgtctatacagagattgttgaaggtaacgggatcgatataagtatagcagccaagggcggtggttcagaaaataagaccaaattggccatgctcaaccccaacgactcaatcgttgactgggtcaagaaagttgtccccaccatgggcgcgggctggtgtcctccggggataatcagccttggggtcggtggtactgctgacaaggctatggtccttgccaaggagggactcatggcagccgttgatatgccagagattctcgcacgcggaccaaaggacaaggtcgaagagttgcgagtggccctctaccatgccataaatgatctgggcattggcgcccagggtctcggcggactcaccaccgtagtcgacgtcaaattagcagaatatccgacccacgcggcatctctgcccgtggcccttattccaaactgcgcagcaacccgtcatacccactttcatcttgacggcagcggccccgccgaatttccacgtcctgatataacccagtggccggacatctctcttgctgcgggcgacaaggttaaacgtgtccaccttaacaatataaccaaggaagagattgccacctggcaaaccggtgagaccctccttctcaacggtaaaatcctcaccggtcgtgatgccgcccataaacgcatcaagggactgctcgatgcgggagagccactacctgcgggggttgatttcaacggacgatttatctattacgtaggccccgttgatccagtcggcaccgaggtggttggacccgccggccccacaacatctacccgcatggacaagtttaccgacatgatgctagaagaggcgggcctctttggtatgattggcaaatcagaacgtggcgatgaaaccattgagtccatcaagaaaaacaaagctgtctacctgatggccgtaggcggagccgcctaccttgtctccaaggcaatcaaaaaatcccgggtggtggcctttgccgatctcggaatggaggccatctacgaatttgaggtggaggatatgccagtgaccgtggccgtcgacgcccgaggagaggcaatccacaaaacagggcccaccttttggcaggaacatatcaggcagatgaagagatag

SEQ ID NO: 44315 - protein, 514 aa, Desulfotalea psychrophila LSv54
MILLNKKGIAMTTIKKKDFVDSIAESLQHISYYHPLDFVKAMHAAYLREENPAAKDAIGQILINSKMAAVGKRPICQDTGIVNVFLKVGKNCQFDCSESLQELVDEGVRLAYGHPENPLRASVVKSPATNRLNTKDNSPAIVYTEIVEGNGIDISIAAKGGGSENKTKLAMLNPNDSIVDWVKKVVPTMGAGWCPPGIISLGVGGTADKAMVLAKEGLMAAVDMPEILARGPKDKVEELRVALYHAINDLGIGAQGLGGLTTVVDVKLAEYPTHAASLPVALIPNCAATRHTHFHLDGSGPAEFPRPDITQWPDISLAAGDKVKRVHLNNITKEEIATWQTGETLLLNGKILTGRDAAHKRIKGLLDAGEPLPAGVDFNGRFIYYVGPVDPVGTEVVGPAGPTTSTRMDKFTDMMLEEAGLFGMIGKSERGDETIESIKKNKAVYLMAVGGAAYLVSKAIKKSRVVAFADLGMEAIYEFEVEDMPVTVAVDARGEAIHKTGPTFWQEHIRQMKR

SEQ ID NO: 44316 - DNA, 1521 bp, Bacillus cereus ZK
  CDS (1)..(1521): transl_table=11
atggaaaagcttcaagaaagcatgtatcaactaattgttgaaacgtcaacgaacttaccgaaagatgttcgtcgtgcgattcaacaagcgaaagagcgagaaaatgcagggactcgctctgcgatggcacttggcacaattacgaataatattaaaatggctgatgataacatctcaccaatttgccaagatacagggatgccaacgtttaaaatttatacaccagttggtgtgaatcaattaaagttgaaggaagctatctataatgcgcttgagcgggcgacaaaagatggtaaacttcgtccaaattctgttgattctctttttggagacaatagtggaaataatttaggaccaggtactccggtgattaagtttgaacaatgggaaaaagattatattgatgcacgtttaattctaaagggtggtggctgtgagaataaaaatattcagtatagcttaccatgtgaattagaaggacttggacgtgcaggccgtgatttagaaggaattcgtaaatgccttcttcacgcagtatatcaagcacaagggcaaggatgtagtgcaggtgtaattggtgttggtatcgggggagaccgcacatcaggttacgaattagcaaaaaatcaattattccgtacattagatgatgttaatccaatcccagaattacaacaacttgaagaatatgtattagaaaatgcgaataagcttggcattggtacgatgggatttggcggagaaacaactttacttggctgtaaaattggcgtgtataatcgtctgccagctagcttctatgtatctgtggcgtataattgctgggcatatcgccgtcttggcgtaataattcaccctgaaacaggtgaaattatggattggttatatcaagaaggtgacgatacacttcagcaagaggcgcaaaaaaaaacagagcaacgtgagattgtattacaagcaccgattacagaagagcaaattcgtgaacttcgcgttggtgatgttgtaacaattaatggcatgatgtatacaggtcgtgacgcaatccataagcatttaatggataatgattgtccagtagatttaaatggacaagttatttatcactgtggtccagttgtcgtgaaagatgaaaaggacaattggcaaattaaagcggcaggtccaacgacaagtattcgtgaagaaccgtaccaaggtgatattatgaagaaattcggtattcgcgctgtcattggaaaaggcggtatgggtgcgaaaacattagcggctttagaagaacacggcggtgtatatttaaacgcaatcggtggtgcagcgcaatattatgctgaatgtattaaagaagtgaaagatgttgatttcttacaatttggtattccagaggcaatgtggcatttacgtattgaagggtttaaagcagttgtaacgatggattctcatggtaatagcttacatgcagatgttgataaaacatcacttgaaaaattagcgagctttaaagagccagtatttaagtaa

SEQ ID NO: 44317 - protein, 506 aa, Bacillus cereus ZK
MEKLQESMYQLIVETSTNLPKDVRRAIQQAKERENAGTRSAMALGTITNNIKMADDNISPICQDTGMPTFKIYTPVGVNQLKLKEAIYNALERATKDGKLRPNSVDSLFGDNSGNNLGPGTPVIKFEQWEKDYIDARLILKGGGCENKNIQYSLPCELEGLGRAGRDLEGIRKCLLHAVYQAQGQGCSAGVIGVGIGGDRTSGYELAKNQLFRTLDDVNPIPELQQLEEYVLENANKLGIGTMGFGGETTLLGCKIGVYNRLPASFYVSVAYNCWAYRRLGVIIHPETGEIMDWLYQEGDDTLQQEAQKKTEQREIVLQAPITEEQIRELRVGDVVTINGMMYTGRDAIHKHLMDNDCPVDLNGQVIYHCGPVVVKDEKDNWQIKAAGPTTSIREEPYQGDIMKKFGIRAVIGKGGMGAKTLAALEEHGGVYLNAIGGAAQYYAECIKEVKDVDFLQFGIPEAMWHLRIEGFKAVVTMDSHGNSLHADVDKTSLEKLASFKEPVFK

SEQ ID NO: 44318 - DNA, 1647 bp, Bacteroides fragilis YCH46
  CDS (1)..(1647): transl_table=11
atggcaacacctccgtttaagtatcaacctatgttcgaacatggggaagataaaaccgagtattatctgcttaccaaagactatgtgtcagtaagcgagttcgaaggaacacctgtgctgaaagtacagaaagaaggtctgacagcgatggctaatactgctttccgcgacgtatctttcatgcttcgccgtgcgcacaacgagcaggtagcgaagattctgagcgacccggaagcaagtgaaaacgacaaatacgtggcattgactttcctgcgcaacgctgaagtggctgccaaaggtatacttcctttctgccaggataccggtacggctatcatccacggtgaaaaaggacagcaggtatggacaggctattgcgatgaagaagctttgtcattgggtgtttacaagacatatacggaagaaaacctgcgttattcacagaatgctccgctcaacatgtacgacgaggtgaacacgaagtgcaatctgccggcccagatcgatatcgaggctacggaaggcatggagtacaaattcctgtgtgtgaccaagggtggtggttctgccaataagacttatctgtatcaggagacaaaagcgatcctgaatccgggcactctggttccgttcctggttgagaagatgaagacactgggtacagcggcttgtcctccttatcatattgcattcgttatcggcggtacttcggctgagaagaatctgctgactgtgaaactggcttctacccactattacgacgagttgccgactaccggtaatgagtatggtcgtgctttccgcgacgtagaactggagaaagaggtacttgccgaagcccaaaagatcggtttgggagcacagtttggcggtaaatatctggcacacgatgtacgtatcatccgtctgccccgtcacggagcttcttgtccggtgggcttgggtgtatcttgttctgccgaccgtaacatcaaatgtaagatcaataaagacggtatctggattgaaaaactcgattctaatccgggcagtctgattcccgcagaactgcgtggcgcaggtgaaggcgatgtagtgaaaatcgacctgaaccagccgatggcggatatcctgaaggaactgactaaatatccggtagctacacgtctgtcactcaacggtacgatcatcgtaggccgtgatatcgctcacgctaaactgaaagaacgtctggatcgcggcgaagatctgcctcaatatatcaaagaccatccgatttattatgccggtccggctaaaactcctgccggcatggcttgcggttcgatgggaccgactactgccggacgtatggatccctatgtggacttgttccagagccatggcggcagcatgattatgttggcaaaaggtaaccgtagccagcaggtgaccgatgcttgtaagaagtatggcggtttctaccttggttcaatcggtggtccggctgctatccttgcccagaacaatatcaagagcatcgaatgcgtagaatatccggaattgggtatggaagctatctggaagatcgaagtagaggacttccccgcatttattcttgtagatgacaagggtaacgacttctttaagcagataaaaccccgttgcggttcttgcagcaacaaataa

SEQ ID NO: 44319 - protein, 548 aa, Bacteroides fragilis YCH46
MATPPFKYQPMFEHGEDKTEYYLLTKDYVSVSEFEGTPVLKVQKEGLTAMANTAFRDVSFMLRRAHNEQVAKILSDPEASENDKYVALTFLRNAEVAAKGILPFCQDTGTAIIHGEKGQQVWTGYCDEEALSLGVYKTYTEENLRYSQNAPLNMYDEVNTKCNLPAQIDIEATEGMEYKFLCVTKGGGSANKTYLYQETKAILNPGTLVPFLVEKMKTLGTAACPPYHIAFVIGGTSAEKNLLTVKLASTHYYDELPTTGNEYGRAFRDVELEKEVLAEAQKIGLGAQFGGKYLAHDVRIIRLPRHGASCPVGLGVSCSADRNIKCKINKDGIWIEKLDSNPGSLIPAELRGAGEGDVVKIDLNQPMADILKELTKYPVATRLSLNGTIIVGRDIAHAKLKERLDRGEDLPQYIKDHPIYYAGPAKTPAGMACGSMGPTTAGRMDPYVDLFQSHGGSMIMLAKGNRSQQVTDACKKYGGFYLGSIGGPAAILAQNNIKSIECVEYPELGMEAIWKIEVEDFPAFILVDDKGNDFFKQIKPRCGSCSNK

SEQ ID NO: 44320 - DNA, 1536 bp, Burkholderia mallei ATCC 23344
  CDS (1)..(1536): transl_table=11
atgaccgtcatcaaacaggaagacctgatccagagcatcgcggattcgctgcagtacatcagctactaccatccgctcgattacatccaggcgctcggccgcgcatacgagctcgagcagagcccggccgcgaaggatgcgatcgcgcagatcctgacgaacagccgcatgtgcgcggaaggcaagcgcccgatctgccaggacacgggcatcgtcacgatcttcgtgaaggtcggcatggacgtgcgctgggcaagcgagaacggcgccgcgacgatgagcgtcaccgacatgatcaacgaaggcgtgcgccgcggctacacgcatccggacaacgtgctgcgcgcatcgatcgtcaacccgcccgaaggcgcgcgcaagaacacgaaggacaacacgccggccgtgatccattacgagatcgtgccgggcgacaaggtcgacgtgcaagtcgcggcgaagggcggcggctccgagaacaaatcgaagttcgtgatgctgaacccgtcggattcgatcgtcgactgggtactgaagaccgtgccgacgatgggcgcgggctggtgcccgccgggcatgctcggcatcggcatcggcggcaccgccgagaaggcgatgctgatggcgaaggaatcgctgatggagccgatcgacatccaggaaatcatcgcgcgcggcccgaaggactgggtcgaggaactgcgcgtcgagctgcacgagaaggtcaacgcgctcggcatcggcgcgcagggtctcggcggcctcgcgaccgtgctcgacgtgaagatcctggccgcgccgacgcacgcggcgtcgaagcccgtcgcgatgatcccgaactgcgcggccacgcgccatgcgcacttcgtgctcgacggctcgggcgcggcgaagctcgaggcgccgtcgctcgacgcatggccgaaggttcaatgggaaccgaacaccgagacgagcaagcgcgtcgacctgaacacgctgacgccggaagaagtcgcatcgtggaagccgggccagacgctgctgctgtcgggcaagatgctcacgggccgcgacgccgcgcacaagcgcatcgccgacatgctcgccaagggcgagccgttgcccgtcgacttcaagaaccgcgtgatctactacgtcgggccggtcgatccggtgcgcgacgaagtggtcggtccggcgggcccgacgacggccacgcgcatggacaagttcaccgagacgatgctcgcgcagacgggcctcatctcgatggtcggcaaggccgagcgcggcccggtcgcgatcgacgcgatcaagaagcacaaggccgcttatctgatggcggtcggcggcgccgcgtacctcgtgtcgaaggcgattcgcggcgcgaaggtgctcgcgttcgaagacctcggcatggaagcgatctacgagttcgacgtacaggacatgccggtgacggtcgcggtcgattcgcagggcacgtcggtccatcaaacggggccgaaggagtggcaggcgaagatcggcaagatccctgtcgcgagcgcgtaa

SEQ ID NO: 44321 - protein, 511 aa, Burkholderia mallei ATCC 23344
MTVIKQEDLIQSIADSLQYISYYHPLDYIQALGRAYELEQSPAAKDAIAQILTNSRMCAEGKRPICQDTGIVTIFVKVGMDVRWASENGAATMSVTDMINEGVRRGYTHPDNVLRASIVNPPEGARKNTKDNTPAVIHYEIVPGDKVDVQVAAKGGGSENKSKFVMLNPSDSIVDWVLKTVPTMGAGWCPPGMLGIGIGGTAEKAMLMAKESLMEPIDIQEIIARGPKDWVEELRVELHEKVNALGIGAQGLGGLATVLDVKILAAPTHAASKPVAMIPNCAATRHAHFVLDGSGAAKLEAPSLDAWPKVQWEPNTETSKRVDLNTLTPEEVASWKPGQTLLLSGKMLTGRDAAHKRIADMLAKGEPLPVDFKNRVIYYVGPVDPVRDEVVGPAGPTTATRMDKFTETMLAQTGLISMVGKAERGPVAIDAIKKHKAAYLMAVGGAAYLVSKAIRGAKVLAFEDLGMEAIYEFDVQDMPVTVAVDSQGTSVHQTGPKEWQAKIGKIPVASA

SEQ ID NO: 44322 - DNA, 1677 bp, Nocardia farcinica IFM 10152
  CDS (1)..(1677): transl_table=11
gtgaccgccccggagttccgctattcagatctgctgccgatcggcgccgacgacacgccgtaccggctgctgaccaccgagggcgtcagcaccttcgagcacaacggtcgcaccttcctgcaggtcgaccccgaggtgctgcggatgctcaccgccgaggcgatgcacgacatcagccactacctgcggcccgcgcacctggcgcagctgcgcaagatcatcgacgacccggagtcctccggcaacgaccgcttcgtcgcgctggacctgctcaaaaacgtcaacatctccgcgggcggcatcctgccgatgtgccaggacaccggcaccgcgatcgtgatgggcaagaagtccgagggcgtgctcaccggggtcgacgacgccgagtggatcagccgcggcgtcttcgacgcctacaccaagctgaacctgcgctactcccagctggccccgttgaccatgtgggaggagaagaacaccggcaccaacctgcccgcgcaggtcgagttgtactccacccagggcgatcccgcgcacccgtcctacaagttcctgttcatggccaagggcggcggctcggccaacaagtcgttcctgtaccaggagaccaaggccatcctgaaccccgagcggatgctggagttcctggacgagaagatccgttcgctgggcaccgcggcctgcccgccctaccacctggccgtggtgatcggcggcaccagcgccgaattcgcgctcaagaccgccaaatacgcctccgcgcactacctggacaatctgcccaccgagggctcgatgaccgcgcacgccttccgcgacctggcgctggaggaggaggtcttcaagctgacccagtccttcggcatcggcgcgcagttcggcggcaagtacttctgccacgacgtgcgcgtggtgcgcctgccccggcacggcgccagctgcccggtcgccatcgcggtgtcctgctcggccgaccgccaggcgttggccaagatcacccccgagggcgtgttcctcgagcagctcgagcgcgagcccgcccagtacctgcccgagcagaccgacgagatcctcggcggcgacgtggtgaagatcgacctgaaccggccgatgtcggagatccgcgccgaactgtcgaaatacccggtgaagacccgcctctcgctcaccggcccgctggtggtggcccgcgacatcgcgcacgccaagatcaaggaacgcctcgacgccggcgagccgatgccgcagtacatgcgcgacatggccgtctactacgcgggcccggccaagacgcccgagggctacgcctccggctcgttcggccccaccaccgccggacgcatggactcctacgtcgaccagttccaggcggcgggcggctcctacgtcatgctcgccaagggcaaccgctcggcgcaggtcaccaaggcgtgcaaggagcacggtggtttctacctcggctcgatcggcggcccggccgcgcggctggcgctggactgcatcaagaacgtcgaggtgctcgaataccccgagctcggcatggaggcggtctggaagatcgaggtcgaggacttcccggccttcatcgtcgtcgacgacaagggcaacgatttcttcgccgagacccagaagccgatcgcgctgcgcgtgcgcacccggtccaaggaacgggtctag

SEQ ID NO: 44323 - protein, 558 aa, Nocardia farcinica IFM 10152
MTAPEFRYSDLLPIGADDTPYRLLTTEGVSTFEHNGRTFLQVDPEVLRMLTAEAMHDISHYLRPAHLAQLRKIIDDPESSGNDRFVALDLLKNVNISAGGILPMCQDTGTAIVMGKKSEGVLTGVDDAEWISRGVFDAYTKLNLRYSQLAPLTMWEEKNTGTNLPAQVELYSTQGDPAHPSYKFLFMAKGGGSANKSFLYQETKAILNPERMLEFLDEKIRSLGTAACPPYHLAVVIGGTSAEFALKTAKYASAHYLDNLPTEGSMTAHAFRDLALEEEVFKLTQSFGIGAQFGGKYFCHDVRVVRLPRHGASCPVAIAVSCSADRQALAKITPEGVFLEQLEREPAQYLPEQTDEILGGDVVKIDLNRPMSEIRAELSKYPVKTRLSLTGPLVVARDIAHAKIKERLDAGEPMPQYMRDMAVYYAGPAKTPEGYASGSFGPTTAGRMDSYVDQFQAAGGSYVMLAKGNRSAQVTKACKEHGGFYLGSIGGPAARLALDCIKNVEVLEYPELGMEAVWKIEVEDFPAFIVVDDKGNDFFAETQKPIALRVRTRSKERV

SEQ ID NO: 44324 - DNA, 1509 bp, Photobacterium profundum SS9
  CDS (1)..(1509): transl_table=11
atgaccgtcatccgtaaagaagatgtgattagtagtgttgctgatgcattacagtacatatcttactaccatccacttgattttgttcaagcattggaaaaagcttataacaaagaacagagtcaagctgcgaaagatgctatcgcacagattttgatcaattcgcgtatgtctgcagaaggtaagcgtcctatctgtcaagatacgggtattgtgacctgtttcgttaaaatcggtatgaatgtgcagtgggagggtgatcttactgttcagcaaatggtcgatgaaggtgtccgtcaagcttataacaacccagacaaccccctacgagcgtctgttgttgccgatcctgctggcacgcgtaccaatacgaaagataatacgccagcagttgttcatattgatatggtgccaggtaataaagttgatattcaaattgcagctaaaggcggcggttctgaaaataaaaccaaaatggtgatgctaaacccttctgatgatgtagctgagtgggttgaaaaaacagtgccactaatgggcgcgggttggtgcccaccaggtatgttaggcataggcatcggtggtacggctgaaaaagcggcagtattagcaaaagagtcgttgatggactctattgatatccatgagctgcaagagcgtggcgcgcaaaatgctgaagaagaattacgtttagatatttataaccgtgtgaacaagttgggtattggtgcacaagggctgggtgggttaacaaccgttgttgatgtgaaaattaaaacagcaccaacacacgctgcgtctaagcctgtttgcatgatccctaactgtgcggctacgcgtcatgtgcattttacacttgacggtacaggccctgctgaattaaccccaccgaagctagaagactggccagaagtgacatgggaagtcggcgagagtgttcgccgtgttaacgttgatgaaattactaaagctgatgttcaggaatggaaatcaggcgaaacggttttattgtcaggtaaaatcttaacaggtcgtgatgctgcgcataaacgtattcaagatatgttggctcgcggcgaagatttccctgtagatttcaataaccgctttatttattacgtgggtccagtcgatgccgtccgtgatgaggtagtgggtcctgctggtccaacaacgtcaacgcgtatggataagtttaccgatatgatgttaggtcaagctggcttaatgggcatgattggtaaagctgaacgtggacctaaggcaattgagtcgattaaagcacacaacgcggtttatctaatggctgttggtggtgctgcttacttggttgcgaaggcgattaagaaagcacgtatagttgcatttgaagatctcggtatggaagctatctacgaatttgaagtcgaagatatgccagtgactgttgcggttgattctgcaggcactaacgcccatgagacaggtccagatacttggaaagtcaaaatagctgaaatggatgcttaa

SEQ ID NO: 44325 - protein, 502 aa, Photobacterium profundum SS9
MTVIRKEDVISSVADALQYISYYHPLDFVQALEKAYNKEQSQAAKDAIAQILINSRMSAEGKRPICQDTGIVTCFVKIGMNVQWEGDLTVQQMVDEGVRQAYNNPDNPLRASVVADPAGTRTNTKDNTPAVVHIDMVPGNKVDIQIAAKGGGSENKTKMVMLNPSDDVAEWVEKTVPLMGAGWCPPGMLGIGIGGTAEKAAVLAKESLMDSIDIHELQERGAQNAEEELRLDIYNRVNKLGIGAQGLGGLTTVVDVKIKTAPTHAASKPVCMIPNCAATRHVHFTLDGTGPAELTPPKLEDWPEVTWEVGESVRRVNVDEITKADVQEWKSGETVLLSGKILTGRDAAHKRIQDMLARGEDFPVDFNNRFIYYVGPVDAVRDEVVGPAGPTTSTRMDKFTDMMLGQAGLMGMIGKAERGPKAIESIKAHNAVYLMAVGGAAYLVAKAIKKARIVAFEDLGMEAIYEFEVEDMPVTVAVDSAGTNAHETGPDTWKVKIAEMDA

SEQ ID NO: 44326 - DNA, 1548 bp, Geobacillus kaustophilus HTA426
  CDS (1)..(1548): transl_table=11
atggaaaaattccagcaaagcatgtatgacttgatcgttgagacatcaacgaagctgccgaaggacgttcgccgagcgatcgctcgagcgaaagtgcgcgaaaacgccggcacgcgggcggccatggcgctcgatacgatcgtcgagaacattcaaatggcggacgaaaacgtgtcgccgatctgtcaggacaccggcttgccgacgtttaaaatcaaagtgccggtcggcgtgaatcaaatcgaaatgaaaaaagcgatccgcgccgccattgtcgaagcgacgaaaaacggcaagctgcgtccgaactcggtcgactcgctcaccggcaaaaacagcggcgacaacttaggggaaggcgtgccggtcatcaaatttgaacaatgggaaaacgattacattgacgttcgccttattttaaaaggcggcggttgtgaaaacaaaaacattcaatacagccttccgtgtgaactcgaggggctcggccgcgccggccgcgaccttgacggcatccgcaaatgcattttgcatgcggtgtaccaagcgcaagggcaaggatgcagcgccggctttatcggcgtcggcatcggcggcgaccgctcatcgggctatgagttggcgaaagagcagctgttccgtccggtcgatgatgtcaatccgattgaagaattgcgccaactcgaagaatacattatggaaaacgccaacaaacttggcatcggcacgatgggctttggcggcgaatcgacgctgcttggctgtaaaatcggcgttatgcaccgcatcccggcgagcttcttcgtttcggtcgcctacaactgctgggcgtttcggcgcatgggcgtgaaaatcgacccggcgaccggtgagatcatcgaatggctgtaccaagacggcgaagacgtcgattttgcaaaagagttggaaaaagcggaagcagccgcggcgcttgaacaaggcgacacacgcgtcatcgaccttgttccgccgctgtcggaagaacaagtgcgccagcttcgcgtcggcgacgtcgtccgcatcagcggcgtcatttacaccggccgcgatgccattcataaatatttgatggaccatgacgcgccggtcgacttgaacgggcaaatcatttatcattgcggcccggtcatgttaaaagatgaagaaggccgctggcacgccaaagctgccggcccgacgacaagcatccgtgaagagccgtaccaaggcgacatcatgaaaaaattcggtgtccgcgctgtcatcggcaaaggcggcatgggcgcgaagacgctgcaagcgttaaaagaacacggcggcgtgtatttgaacgccatcggcggcgcggcgcaatattacgccgattgcatcaaatccgtggaaggcgttgatttgctggagtttggcatccccgaagcgatgtggcatttgcgcgtcgaaaacttcactgctgttgtcacgatggattcgcacggcaacagcttgcatgaagatgtggaaaaatcgtcgcttgaaaagctggctcagttcaaagagccggtgttcaagtaa

SEQ ID NO: 44327 - protein, 515 aa, Geobacillus kaustophilus HTA426
MEKFQQSMYDLIVETSTKLPKDVRRAIARAKVRENAGTRAAMALDTIVENIQMADENVSPICQDTGLPTFKIKVPVGVNQIEMKKAIRAAIVEATKNGKLRPNSVDSLTGKNSGDNLGEGVPVIKFEQWENDYIDVRLILKGGGCENKNIQYSLPCELEGLGRAGRDLDGIRKCILHAVYQAQGQGCSAGFIGVGIGGDRSSGYELAKEQLFRPVDDVNPIEELRQLEEYIMENANKLGIGTMGFGGESTLLGCKIGVMHRIPASFFVSVAYNCWAFRRMGVKIDPATGEIIEWLYQDGEDVDFAKELEKAEAAAALEQGDTRVIDLVPPLSEEQVRQLRVGDVVRISGVIYTGRDAIHKYLMDHDAPVDLNGQIIYHCGPVMLKDEEGRWHAKAAGPTTSIREEPYQGDIMKKFGVRAVIGKGGMGAKTLQALKEHGGVYLNAIGGAAQYYADCIKSVEGVDLLEFGIPEAMWHLRVENFTAVVTMDSHGNSLHEDVEKSSLEKLAQFKEPVFK

SEQ ID NO: 44328 - DNA, 1524 bp, Idiomarina loihiensis L2TR
  CDS (1)..(1524): transl_table=11
atgaccaccattcgtcaggccgattttattgacagtattgccgatgcgttgcagtacatttcttattatcacccactggactttattaaagcactggacgaggcataccagcgtgaagagaacgaagcggcgaaaaacgccattgctcaggtgctgactaactcgcgtatgtctgcgcaagggcaccgtccaatttgccaggacaccggtattgtcacctgctttgtgaaagtgggcatgggcgtgcaatgggataaaaccgacctgaccgttcagcaaatggtggatgaaggtactcgtcgagcctacaacaacccggacaacccactgcgtgcttctattgtggctgacccggcgggcgctcgtaaaaacactggcgataacacgccagctgtggtgcatattgatatggtggcgggcaatgaaattgaagtgatgattgccgctaaaggtggtggttctgagaataaatcgaaaatggccatgttaaaccccagcgattcgattgccgattgggttgttgaaaccttgccgaagatgggcgctggctggtgtccgccgggtatgctgggtataggtattggtggtacagcggaaaagtctgcggtattggcaaaagaatctttaatggagtctgtcgatatccatgagcttattgagcgcggcccgcagaatgccgaagaagagctgcgtttagaaattttgaaccgcgttaacgcattaggtattggtgctcagggtttgggaggtttaacaacggtgctggatgtgaagattaagtcactaccaacccacgcagcctctaagcctgtcactttaattccgaactgtgcagccacccgtcacgttcactttacgttagacggcagcggagcagcagatttaaccccgccgaaactggaagattggccggatgtgacttttgaactgggtgatgatgcccgccgtgtgaacctggatgaagtgaccaaagaagacattcaggactggaaaatgggtgaaaccgtgctcttgtccggtaagttgctgaccggtcgtgatgcggcgcacaaacgcattaaaggtatgctggataacggtgaagagctgccagttgatttcaacaaccgctttatttactacgtagggccggtagatcctgtgggtgatgaagttgttggtccggcaggtcctacaacctctacgcgtatggataaattcactgatcagatgctcgaagaagccggtattattggtatggtaggcaaagcagagcgtggccctgaagctgtggaaagtattcgtaagcacaaagcggtttacctgatggccgtgggtggtgccgcgtatttggtcgctaaagccattaaaaaatcccgggttgttgcctttgaagacttaggtatggaagccatttatgagtttgaagtggaagacatgccggtcactgttgctgtggatagcgacggtcaaaacgcgcatacccaagggcctgctatctggaaagcgaaaattgctgacctcaatgaaaaattaggagcttaa

SEQ ID NO: 44329 - protein, 507 aa, Idiomarina loihiensis L2TR
MTTIRQADFIDSIADALQYISYYHPLDFIKALDEAYQREENEAAKNAIAQVLTNSRMSAQGHRPICQDTGIVTCFVKVGMGVQWDKTDLTVQQMVDEGTRRAYNNPDNPLRASIVADPAGARKNTGDNTPAVVHIDMVAGNEIEVMIAAKGGGSENKSKMAMLNPSDSIADWVVETLPKMGAGWCPPGMLGIGIGGTAEKSAVLAKESLMESVDIHELIERGPQNAEEELRLEILNRVNALGIGAQGLGGLTTVLDVKIKSLPTHAASKPVTLIPNCAATRHVHFTLDGSGAADLTPPKLEDWPDVTFELGDDARRVNLDEVTKEDIQDWKMGETVLLSGKLLTGRDAAHKRIKGMLDNGEELPVDFNNRFIYYVGPVDPVGDEVVGPAGPTTSTRMDKFTDQMLEEAGIIGMVGKAERGPEAVESIRKHKAVYLMAVGGAAYLVAKAIKKSRVVAFEDLGMEAIYEFEVEDMPVTVAVDSDGQNAHTQGPAIWKAKIADLNEKLGA

SEQ ID NO: 44330 - DNA, 1533 bp, Azoarcus sp. EbN1
  CDS (1)..(1533): transl_table=11
atgaccgtgattcgcgaagaagacctcattcagtccgtcgcggatgcctttcagttcatcagctattaccaccccctcgacttcatcgaggcgctcggtgaggcctggaagcacgaggagaacccggcggcgaaggacgccatcgcgcagatcctgaccaactcgcgcatgtgcgccgaaggccaccgcccgatctgccaggacactggcatcgcggtcgtcttcctcaaggtcggcatgaacgtgcagtgggacgcgaagatgagcgtccaggagatggtcaatgaaggcgtgcgccgcgcgtacaccaacgtcgacaacaagctgcgcgcctcggtgctgctcgacccggccggcaagcgtcagaattcgaaggacaacacgcccgctgtcgtgcattacgagatcgtccccggcgaccacgtcgaagtcacctgtgcggcgaagggcggcggctcggagaacaagtcgaagttctacgcgctgaacccgtccgactcgatcgtcgactgggtactgaagacgctgccgacgatgggtgccggctggtgcccgccgggcatcctcggcatcggcatcggcggcacgcccgagaaggcgatgctgctcgcgaaggaatcgctgatggcgccggtcgacatccacgaactacgcgcaaaagctgcttcgggggcgacgctcacgcgcgtcgaggaattgcgcctcgagctgatggacaaggtcaacgcactgggtatcggcgcgcagggtctcggcggcctcacgaccgtgctcgacgtcaagatcctcgactacccgacgcacgctgcgagcctgccggtcgcgatgattccgaactgcgcggcgacgcgccacgtgcatttcgagctcgacggctccgggccggcgaaactcgaggcgccgaagctcgaggactggccggacgtcacgtggcaggccgacaccaaggtcgccacgcgcgtcaatctcgacaccctgacgaaggaagaagtcgcgtcgtggaagcccggccaggtgctgctgctgaacggcaagatgctgaccggccgcgacgccgcacacaagcgcatcgccgacatgctcgcaaaaggcgagaagctgcccgtcgacttcacgaaccgcgtcatctactacgtcggcccggtcgacccggtgcgcgacgaagtcgtcggtccggccggcccgaccaccgcgacgcgcatggacaagttcacccgcatgatgctcgaacagaccggcctgatctcgatggtcggcaaggccgagcgcggcccggcggcgatcgacgcgatccgcgacaacaagtcggcctatctgatggcagtcggcggcgcagcctacctcgtcgcgaaagcgatcaagaccgccaaggtcgtcggcttcgccgatctgggcatggaagcgatctacgagttcgacgtgcaggacatgcccgtgaccgtcgccgtcgattcgaccggcaccagcgtccatgaaaccggcccgaagacgtggcaggcgaagatcggaaagatcccggtcgcgaccgcctga

SEQ ID NO: 44331 - protein, 510 aa, Azoarcus sp. EbN1
MTVIREEDLIQSVADAFQFISYYHPLDFIEALGEAWKHEENPAAKDAIAQILTNSRMCAEGHRPICQDTGIAVVFLKVGMNVQWDAKMSVQEMVNEGVRRAYTNVDNKLRASVLLDPAGKRQNSKDNTPAVVHYEIVPGDHVEVTCAAKGGGSENKSKFYALNPSDSIVDWVLKTLPTMGAGWCPPGILGIGIGGTPEKAMLLAKESLMAPVDIHELRAKAASGATLTRVEELRLELMDKVNALGIGAQGLGGLTTVLDVKILDYPTHAASLPVAMIPNCAATRHVHFELDGSGPAKLEAPKLEDWPDVTWQADTKVATRVNLDTLTKEEVASWKPGQVLLLNGKMLTGRDAAHKRIADMLAKGEKLPVDFTNRVIYYVGPVDPVRDEVVGPAGPTTATRMDKFTRMMLEQTGLISMVGKAERGPAAIDAIRDNKSAYLMAVGGAAYLVAKAIKTAKVVGFADLGMEAIYEFDVQDMPVTVAVDSTGTSVHETGPKTWQAKIGKIPVATA

SEQ ID NO: 44332 - DNA, 1524 bp, Zymomonas mobilis subsp. mobilis ZM4
  CDS (1)..(1524): transl_table=11
atgaccgttattcgccaaaatgacctgattgatagtgttgccgatgctttacagtttatcgcttgctatcatcctcgtgattttatccagtcgctttatgaagcctatcagcgcgaggaaaatccggcagcaaaagaggctctggcgcaaatccttatcaattcccgcctgtctgctatcggcaagcgccccatgtgtcaggataccggcattgtcaccgtttttgctgaaatcggtatgggagtgcgttttgaaggcgaaatgacgctggacgagatgatcaatgaaggcgtgagacgagcttatacctgcccttccaatcgtcttcgatattcagtggtggccgatcccgatggcagccggaagaataccggtgacaataccccagccattattcatcatcatttagtcgcaggcgatcaggtaaaattgcggctggcagcgaaaggcggaggcagcgaggcaaagacccgttttgcgatgctgaacccgtctgatagcgttgtggattgggtgttagaacaaattccccatttaggtgccggatggtgtccgcccggtattatcgggatcgggattgggggtaatcccgaaaaggctatggaaatggccaaatcccaagcgatggaatctattgatattcatcaattgcagggaagaggcgcacaaaatcacgaagaagccttgagattagaattatatcgtaagatcaatgaattggggattggtgcgcagggattgggcggattgaccacggttttggatgtcaaaattgaaagctatccaacccatgccgcgaataagcccattgccttggtaccgaattgtgccgcgacccgtcatattgaaatcactttggatgggcatggcgcagcgattatgccggaaattcatttagatgattggccagaaatcgccaagaaaagcgatggcgtggttagacgggtcaatattgatgacattaccaaagaagaaatggctgattggaaggccggtgacagcctattactgtccggtaaaatcctgaccggacgagatgctgcccataaaaggctggttgatttgttagaccaagggcaagccttgcctgtcgatcttgaaaatcgttttatctattatgtgggtcccgttgatccggttaaaggcgaagtgatgggccctgcgggcccgacgacggccacccgtatggataaattcaccccccgtttattagccgaaactggattaatcggcatgattggcaaagccgaaagaggtgaagccacgatcaaggccattcgtgacaataaggccgcttatttaattgcggtcgggggtgcggcttatctcatttcaaaagcaatcaaatccgcgagaattttggcttttgaagatttgggtatggaagctatttatgaatttgaggttgaggatatgcccgttacggtagcggtcgatagtgacggccaaaatatccataaaatagccccgaaaaaatggcaggcctatattcaagagaaagcttgttccgcctgtttaagctag

SEQ ID NO: 44333 - protein, 507 aa, Zymomonas mobilis subsp. mobilis ZM4
MTVIRQNDLIDSVADALQFIACYHPRDFIQSLYEAYQREENPAAKEALAQILINSRLSAIGKRPMCQDTGIVTVFAEIGMGVRFEGEMTLDEMINEGVRRAYTCPSNRLRYSVVADPDGSRKNTGDNTPAIIHHHLVAGDQVKLRLAAKGGGSEAKTRFAMLNPSDSVVDWVLEQIPHLGAGWCPPGIIGIGIGGNPEKAMEMAKSQAMESIDIHQLQGRGAQNHEEALRLELYRKINELGIGAQGLGGLTTVLDVKIESYPTHAANKPIALVPNCAATRHIEITLDGHGAAIMPEIHLDDWPEIAKKSDGVVRRVNIDDITKEEMADWKAGDSLLLSGKILTGRDAAHKRLVDLLDQGQALPVDLENRFIYYVGPVDPVKGEVMGPAGPTTATRMDKFTPRLLAETGLIGMIGKAERGEATIKAIRDNKAAYLIAVGGAAYLISKAIKSARILAFEDLGMEAIYEFEVEDMPVTVAVDSDGQNIHKIAPKKWQAYIQEKACSACLS

SEQ ID NO: 44334 - DNA, 1509 bp, Silicibacter pomeroyi DSS-3
  CDS (1)..(1509): transl_table=11
atgggcgtgatccgcgaaagcgacatgatcgaaagcatcgccgaggcgctgcaatatatctcgtattaccacccggccgatttcatcggcaccatgaccagcgcctgggagcgcgaggagaaccccggcgccaaggccgcgatggcgcagatcctggtcaattcgcgcatgtgcgccatgggccgccgcccgatctgtcaggacaccggcgccgccaatatccacgtcaaggtcggggtgcaggccaagaccgacttctcccgctcgctgcaggagatctgtgacgagggcacccgccaaggctatcagcgcgacaccaacccgctgcgcgccagcgtggtggtcgacccgttcggcgcccgcaagaactcgggcgacaacacgccctgcatgctgacggtcgagatggtcgccggcgacacgatcgaggtcgaggtcgcggccaagggcggcggatccgagaacaagtcgaaattcaccacgctcaacccctcgggcaatgtggccgactgggtggtgcagacggtcgagacgctgggcgcgggctggtgcccgccgggcgtgctgggcatcggcgtgggcggcaatgcggacaaggcgatggcgctggccaaacaggcgctgagcgaaccgctcgacatgtccgacctgctgcgtcgcggcccctcggacaagaccgaggagctgcggctggaaatctatgaccgcgtcaacgcgctgggcatcggcgcacagggcctgggtggcgtgaccaccgtgcttgacgtcaagatcaagagctttccgacccatgcggcctcgctgcccgtggggctgatccccaactgcgccgccacaaggcatgtgcatttcaccctcgacgggtcgggggctgcggaattcaccccgccctcgatggacctttatcccgacatcctgctggatgcggccggggcgcaggcgacgcggctggacctcgacgatctgaacgacacggtgctggcgtcgctggagccggggcagacactgctgctctcgggcacgctctatacgggccgtgacgccgcgcataagcggatggtcgacatgctcgacaagggtgagccgctgcccgtcgacctgaagggcaaggcgatctattacgtcggtcccgtcgatgcggtgggcgacgaggtgatcggcccggcgggcccgaccacctcgacccggatggacaagttcaccgaccgtatcctgggcgataccgggctcaaggtgatggtcggcaaggccgagcgcggcccggtcgccatcgaggccattgccaagcacaaggcggcctatctgatcgcggtgggcggtgcggcctatctggtgtccaaggcgatcaaggcggccaggccggtggcgttccaggacctggggatggaagccatctatgagctgagggtcgaggatatgccggtgagtgtcgcggtcgacacccagggcaactcgatccaccagaccggcccggccaagtggcgccgcgccactgccgcaggcagctga

SEQ ID NO: 44335 - protein, 502 aa, Silicibacter pomeroyi DSS-3
MGVIRESDMIESIAEALQYISYYHPADFIGTMTSAWEREENPGAKAAMAQILVNSRMCAMGRRPICQDTGAANIHVKVGVQAKTDFSRSLQEICDEGTRQGYQRDTNPLRASVVVDPFGARKNSGDNTPCMLTVEMVAGDTIEVEVAAKGGGSENKSKFTTLNPSGNVADWVVQTVETLGAGWCPPGVLGIGVGGNADKAMALAKQALSEPLDMSDLLRRGPSDKTEELRLEIYDRVNALGIGAQGLGGVTTVLDVKIKSFPTHAASLPVGLIPNCAATRHVHFTLDGSGAAEFTPPSMDLYPDILLDAAGAQATRLDLDDLNDTVLASLEPGQTLLLSGTLYTGRDAAHKRMVDMLDKGEPLPVDLKGKAIYYVGPVDAVGDEVIGPAGPTTSTRMDKFTDRILGDTGLKVMVGKAERGPVAIEAIAKHKAAYLIAVGGAAYLVSKAIKAARPVAFQDLGMEAIYELRVEDMPVSVAVDTQGNSIHQTGPAKWRRATAAGS

SEQ ID NO: 44336 - DNA, 1515 bp, Francisella tularensis subsp. tularensis Schu 4
  CDS (1)..(1515): transl_table=11
atggctgttatcaaagcagaagatctagtaaatagtgttgcagaagcattgcaatatatatcttattatcatccaaaagattttattgatgcaatgtatgaagcatatcagcgtgaagagtcaaaaccagctaaagatgcaatggtgcaaattctaataaactcgagaatgtctgctattggtaagcgtccgatctgccaagatacagggatggtatgcgcttttgtcaaagttggcatggatgcaaaacttgacaagactgatagaacaattacagaacttattaatgagggtgtgcgtcgtggctataatgatccgcataaccctttgagagcatctatggtttttccgccacatggatctagaaaaaacactaaagataatactccagcaattgttcatattgatttagttcatggtgataaaattgaggttgatattgctgcaaaaggtggtggatctgaatttaaatcaaaatttaaggtgttaaatcctagtgatagcataattgattgggttgaagagatgttgccaactatgggggctggctggtgtccacctggaattattggtataggtattggaggcactgcagaaaaagcgatacttttggctaaggaatctcttagtgaagagattaatatccaagatattatcaaaaatggcccacaaaatgaaacagagcaactaagattagatatctataatcgtgtcaatgctctgggtataggtgcacaaggcttaggtggtttgacaacagttttagatgtcaaaataaatgaatatccaacacatgctgcgtgtaagccagttgctttgattcctaactgtgcagctactcgccatgttcattttgttttagatggttctggtgccgttgatttaccagctcctaagatagaagactggccagtaattgagcaagcacaaaatgatgatgttaagagaataaatcttgatacagttactagagaagagattgaggcattaaggtcgggagataacgttttgattagcggtaaaatcttaactggtcgagatgctgcacataagcgtctacaagatatgtataatgctggagaagattttcctgttgatcttaacggtagatttatctactacgtaggtcctgttgatccagtaggtgatgaggtggttggtccagctggtccaactactgctacgcgtatggataagtttacgccatttatgttagagaaagctggtatcatgggaatgataggtaaatcagagcgtggtcaggcaacgattgattctatcaagaaaaataaagctatttacttcatgggtgtaggtggtgctgcttatctcatatctaaatctatcaaaaaagcagaagttgttgcatttgaagatcttggtatggaggcaatttatgagtttgaggttgaggatatgccagtaactgtggctgttgactctttaggtgtttctgctcatcagcaaggtcctaaactttggaaacaaaaaatagctgaaattaataaggtctaa

SEQ ID NO: 44337 - protein, 504 aa, Francisella tularensis subsp. tularensis Schu 4
MAVIKAEDLVNSVAEALQYISYYHPKDFIDAMYEAYQREESKPAKDAMVQILINSRMSAIGKRPICQDTGMVCAFVKVGMDAKLDKTDRTITELINEGVRRGYNDPHNPLRASMVFPPHGSRKNTKDNTPAIVHIDLVHGDKIEVDIAAKGGGSEFKSKFKVLNPSDSIIDWVEEMLPTMGAGWCPPGIIGIGIGGTAEKAILLAKESLSEEINIQDIIKNGPQNETEQLRLDIYNRVNALGIGAQGLGGLTTVLDVKINEYPTHAACKPVALIPNCAATRHVHFVLDGSGAVDLPAPKIEDWPVIEQAQNDDVKRINLDTVTREEIEALRSGDNVLISGKILTGRDAAHKRLQDMYNAGEDFPVDLNGRFIYYVGPVDPVGDEVVGPAGPTTATRMDKFTPFMLEKAGIMGMIGKSERGQATIDSIKKNKAIYFMGVGGAAYLISKSIKKAEVVAFEDLGMEAIYEFEVEDMPVTVAVDSLGVSAHQQGPKLWKQKIAEINKV

SEQ ID NO: 44338 - DNA, 1518 bp, Xanthomonas oryzae pv. oryzae KACC10331
  CDS (1)..(1518): transl_table=11
gtgacctcgatcaagcaggaagacctcatccagtccgtcgccgacgcgctgcagtacatcagctactaccacccggtcgactacatcaagaatttgtccgccgcgtatgagcgcgaggaatcgccggccgccaaggacgccatcgcgcagatcctgatcaattcgcgcatgtgcgccgaaggccaccgcccgatctgccaggacaccggcatcgtcaccgtgttcctggaaatcggcatgaacgtgcgctgggacgacgccacgatgggcgtggaagacatggtcaacgaaggcgtgcgccgcgcctacaaccaccccgacaacaagctgcgcgccagcgttctggccgacccggcgggaaagcgcgccaacaccaaggacaacacgccggcggtggtcaacaccaagatcgtgcccggcgaccatgtcgaggtgatcgtcgcagccaagggcggcggctcggaggccaagagcaagttcgccatgctcaatccctccgactccatcgtcgattgggtgctcaagaccgtgccgaccatgggcgccggctggtgcccgccgggcatgctcggcatcggcatcggcggcaccgccgaaaaggcgatgctgctggccaaggaagccttgatggagccgatcgacatcgtcgacctgcaggcgcgcggcgcgtccaaccgtgccgaagagctgcggcttgagctgtacgaaaaggtcaatgcactgggcatcggcgcgcaaggcctgggcggcctgaccaccgtgctggacatcaaggtcaaggattacccgacccacgcggcgaacctgccggtggcgttgattcccaactgcgcggcgactcgccacgcccacttcaccctggacggcagcggcccggtgatgctggatccgccgtcgctggaagactggcccacgctcacctacaacccgaccaatgcgcgccgggtcaatctggataccatcagcaaggaagaagtggccagcttcaagccgggcgaggtgattctgcttaacggcaagctgctgaccggccgcgatgccgcgcacaagcgcatgatcgacatgctcaaccgtggccaaacgctgccggtggatttcaccaatcgcttcatctactacgtcggtccggtcgacccggtgcgcgatgaagtggtcggcccggcgggcccgacgaccgccacgcgcatggacaagttcacccgccagatgctggagcagaccggcctgctgggcatggtcggtaagtccgagcgtggcgatgcggccatcgatgcgatccgcgacaacaaggccgtgtacctgatggcggtcggcggttcggcctacctggtgtccaaggcgatcaaggcggcccgcgtgcttgcgttcgaagatctcggcatggaggcgatctacgaattcgaggtcaaggacatgccagtcaccgtagcggtggattccactggcgaatcggtgcacaagactggcccacggctgtggcagtcgcgcatcggcaagatcccggtggtggtggaataa

SEQ ID NO: 44339 - protein, 505 aa, Xanthomonas oryzae pv. oryzae KACC10331
MTSIKQEDLIQSVADALQYISYYHPVDYIKNLSAAYEREESPAAKDAIAQILINSRMCAEGHRPICQDTGIVTVFLEIGMNVRWDDATMGVEDMVNEGVRRAYNHPDNKLRASVLADPAGKRANTKDNTPAVVNTKIVPGDHVEVIVAAKGGGSEAKSKFAMLNPSDSIVDWVLKTVPTMGAGWCPPGMLGIGIGGTAEKAMLLAKEALMEPIDIVDLQARGASNRAEELRLELYEKVNALGIGAQGLGGLTTVLDIKVKDYPTHAANLPVALIPNCAATRHAHFTLDGSGPVMLDPPSLEDWPTLTYNPTNARRVNLDTISKEEVASFKPGEVILLNGKLLTGRDAAHKRMIDMLNRGQTLPVDFTNRFIYYVGPVDPVRDEVVGPAGPTTATRMDKFTRQMLEQTGLLGMVGKSERGDAAIDAIRDNKAVYLMAVGGSAYLVSKAIKAARVLAFEDLGMEAIYEFEVKDMPVTVAVDSTGESVHKTGPRLWQSRIGKIPVVVE

SEQ ID NO: 44340 - DNA, 1530 bp, Vibrio fischeri ES114
  CDS (1)..(1530): transl_table=11
atgattaacgttcaccaagaaacattgattcgtaatgaagatgtgatcagttctgtagccgatgctctgcaatatatatcttattatcatccgctagattttgttcaagcacttgaaaaagcgtatcaccgagaagaaagccaagctgcaaaagatgcgcttgcacaaatcctaattaattcacgtatgtcagcagaggggcgtcgtcctatctgtcaagatacgggaattgtaacttgttttgttaatattggtatgaacgttaggtgggaaggagacttaacggttcaacaaatgattgatgaaggtactcgtcaagcttataccaatcctgacaatccattaagggcatccgtattgtctgatccggctggtaaacgtataaacacaaaagataatacgccagcagtggttcatattaatatggttccgggaaacaaagttgagattcaaattgctgcaaaaggtggcggctctgagaataaaactaaaatggtaatgttaaacccatcagatgatattgctgagtgggtagaaaagacgcttccaacaatgggtgcgggttggtgtcctccaggtatgcttggtataggtgttggcggtacggctgagaaagcagctgtattagcaaaagaagcactgatggaacacattgatattcaagaccttattgaacgaggtcctcagaatgcagaagaagaacttcgtcttgatatttttaaccgtgttaataaattaggtatcggagctcaaggtcttggcggacttactactgttgttgatgtaaaaatcaaatcagcaccaacgcacgcagcctctaaacctgtgtgtttaattcctaactgtgctgctactcgtcacgtacattttacccttgatggtacaggtcctgctgatcttcagccgccaaagttagaggaatggcctgatattacgtgggaagcgggagcaaatacacgccgagttaatcttgatgagataacaaaagaagacgttcaagagtggaaaacgggcgaaacgatcttgcttaatggtaaaattctaacaggacgtgacgcggcacataaacgtcttcaaggaatgatcgaaagcggtgaaggtttacctgatggtgttgattttaatggtaaattcatttactacgtaggccctgttgatgctgtaggtgatgaagcggtaggtcctgccggcccaacgacctctactcgcatggataaatttaccgatatgatgttagctacaggcttaacgggcatgataggtaaagcggaacgtggtccagcaaccgtggcatctattaaagaaaataaagcggtatatttaatggctgttggtggcgctgcttacttggttgctaaagcgattaaaaaagcacgtgttgttgcctttgaagatcttggaatggaagctatttatgagtttgaggttgaagatatgccagttactgtggccgttgattcaacaggtgtaaatgcgcatcaaattggtcctgatacatggaaggtaaaaattgctgaaatgagcaattaa

SEQ ID NO: 44341 - protein, 509 aa, Vibrio fischeri ES114
MINVHQETLIRNEDVISSVADALQYISYYHPLDFVQALEKAYHREESQAAKDALAQILINSRMSAEGRRPICQDTGIVTCFVNIGMNVRWEGDLTVQQMIDEGTRQAYTNPDNPLRASVLSDPAGKRINTKDNTPAVVHINMVPGNKVEIQIAAKGGGSENKTKMVMLNPSDDIAEWVEKTLPTMGAGWCPPGMLGIGVGGTAEKAAVLAKEALMEHIDIQDLIERGPQNAEEELRLDIFNRVNKLGIGAQGLGGLTTVVDVKIKSAPTHAASKPVCLIPNCAATRHVHFTLDGTGPADLQPPKLEEWPDITWEAGANTRRVNLDEITKEDVQEWKTGETILLNGKILTGRDAAHKRLQGMIESGEGLPDGVDFNGKFIYYVGPVDAVGDEAVGPAGPTTSTRMDKFTDMMLATGLTGMIGKAERGPATVASIKENKAVYLMAVGGAAYLVAKAIKKARVVAFEDLGMEAIYEFEVEDMPVTVAVDSTGVNAHQIGPDTWKVKIAEMSN

SEQ ID NO: 44342 - DNA, 1593 bp, Xylella fastidiosa Ann-1
  CDS (1)..(1593)
atgtttatcctatggctgatgtattcagggggattacaatggcaacgttttttagtcagccataagggccagccggtgtcattgatcaaacaagaagactttatccagtctatcgctgatgcgctgcaatacatcagttactaccatccggtcgattacatcaagaatctggctttggcgtatgagtgcgagaaatcgcccgccgctaaagatgcaatggcgcagattttgattaactcacgtatgtgtgctgaggggcgccgcccgatttgccaagatacagggattgtcacggtgttccttagcatcgggatggatgtacgttgggatgacgtcacgatggatgtggaagagatggtgaatgagggggttcgccgtgcctatcgtcatccggataacacgctacgtgcgtctgtgcttgctgatcctgccggcaagcgctgcaatacgagggacaatacgccagcagtcgttaacgtcaaggttgtttctgggggccatgttgaagtgattgttgctgccaagggagggggatcggaggccaagagcaaatttgcaatgctaaatccatcggattccatcgttgattgggttctggacactgtgcccaccatgggggctggctggtgcccaccagggatgcttgggattggtatcggtggtacggctgagaaagcgatgctgctcgctaaggaagcgttgatggaaccgattgacatccaggatttgatggtacgcggcccttccaatcgtgctgaagaattacgcttggagctgtacgagaaggtcaatgctttagggatcggtgctcagggggtgggcgggatgacgacggtattagacattaaagtcaaagattatccgacgcatgctgccaatttgccggtagcgatgatccctaattgtgcgtccacacgccatgcgcatttcacattggacggtagcggtcctgttgttctggaaccgccgtcattagaggattggcctaagttgagctatctcccggagtctgcacggcaggtggatttgaatacgatcaccagggatgaggtggcgcagttcaagccaggtgaggtgttgctactcagcggcaaattgttgacgggacgagatgctgcgcataagcgcatcgttgagatgctcaacaagggggagacattaccagttgatttcacgaatcgctttatctactacgtgggtccagtggatcctgtgcgtgatgaagtcgtcggtcctgcgggtccaaccacagcaacgcgtatggataagtttacgcgtcagatgctggagcagggcgggttgctcggtatggtgggcaaggccgagcgtggtcctactgccatcgctgcaatccgtgacaacaaagccgtgtatctgatggcggtgggaggggcggcttatcttgtctccaaggcgatcaaaacgagccggatactggcttttgaagaccttggcatggaggcaatttatgagtttgaagtcaaggagatgcctgtaacagtggcggttgattgcaacggtgagtcgatacatacaactgggccgcgtgagtggcgaagccggatcgggaaaattccggttgttgtggagtag

SEQ ID NO: 44343 - protein, 530 aa, Xylella fastidiosa Ann-1
MFILWLMYSGGLQWQRFLVSHKGQPVSLIKQEDFIQSIADALQYISYYHPVDYIKNLALAYECEKSPAAKDAMAQILINSRMCAEGRRPICQDTGIVTVFLSIGMDVRWDDVTMDVEEMVNEGVRRAYRHPDNTLRASVLADPAGKRCNTRDNTPAVVNVKVVSGGHVEVIVAAKGGGSEAKSKFAMLNPSDSIVDWVLDTVPTMGAGWCPPGMLGIGIGGTAEKAMLLAKEALMEPIDIQDLMVRGPSNRAEELRLELYEKVNALGIGAQGVGGMTTVLDIKVKDYPTHAANLPVAMIPNCASTRHAHFTLDGSGPVVLEPPSLEDWPKLSYLPESARQVDLNTITRDEVAQFKPGEVLLLSGKLLTGRDAAHKRIVEMLNKGETLPVDFTNRFIYYVGPVDPVRDEVVGPAGPTTATRMDKFTRQMLEQGGLLGMVGKAERGPTAIAAIRDNKAVYLMAVGGAAYLVSKAIKTSRILAFEDLGMEAIYEFEVKEMPVTVAVDCNGESIHTTGPREWRSRIGKIPVVVE

SEQ ID NO: 44344 - DNA, 1524 bp, Pseudomonas syringae pv. syringae B728a
  CDS (1)..(1524)
atgaccgtgatcaagcaagacgacctgattcagagcgttgcagacgcactgcagttcatttcctattaccaccccgtggacttcatccaggccatgcacgaggcgtatctgcgtgaagagtcgcctgccgctcgtgactccatcgcccagatcctgatcaactcgcgcatgtgcgcgaccggtcatcgcccgatctgccaggacaccggcatcgtcacggttttcgtgcgcgtggggatggatgttcgctgggacggcgccaccatgggcctggacgacatgatcaacgaaggcgtgcgtcgcgcgtacaacctgcctgaaaacgtgctgcgtgcctcgatccttgccgatccggcaggcgctcgcaaaaacaccaaggacaacaccccggccgtcattcactactccatcgtcccgggtaacaccgtggaagtggacgtcgcggcgaaaggcggcggttcggaaaacaaatcgaagatggcgatgctcaacccgtccgattcgatcgtcgactgggttctgaaaaccgtaccgaccatgggcgcaggctggtgcccgccgggcatgctcggcatcggcatcggcggtacggctgaaaaagccgccgttatggccaaggaagtgttgatggagtccatcgacattcatgaacttaaagcccgcggcccgcagaatcgtatcgaagagatgcgtctggagctgttcgagaaggtcaaccagctgggcattggcgctcagggcctgggcggtctgaccaccgtgctcgacgtcaagatcatggattacccgacccacgccgcgtcgctgccggtgtgcatgatccccaattgcgccgccacccgccacgcgcacttcgtgctcgacggcagcggccctgcttcgctggaggcgccatcgctggacgcctacccggaaatcgtctgggaagccggcccatcggcccgccgcgtcaacctcgatacgctgaccccggaagaagtacaaagctggaaaccgggcgaaaccgttttgctcaatggcaagatgctcaccggccgcgacgcggcgcacaagcgcatggtcgaaatgctcaaccggggtgaaaccctgccggtagacctcaagggtcgcttcatctactacgtcggcccggttgatccggtgcgcgaagaagtcgtcggcccggccggcccgaccacggccacccggatggacaagttcacccggcagatcctcgaccagaccggcctgctgggcatgatcggcaaatccgaacgcggcccgaccgccatcgaagcgatccgtgaccacaaggccgtgtacctgatggccgtcggtggtgctgcctatttggtggctcaggcgatcaagaaatcccgcgtcgtggccttcgccgagctgggcatggaagcgatctacgagttcgaggtcaaggacatgccggtgaccgtggccgtagacagcaacggtgagtccgtacacatcaccggcccgcagatctggcagaagaagatcagcgacagtctggcggtggaagtgcagtaa

SEQ ID NO: 44345 - protein, 507 aa, Pseudomonas syringae pv. syringae B728a
MTVIKQDDLIQSVADALQFISYYHPVDFIQAMHEAYLREESPAARDSIAQILINSRMCATGHRPICQDTGIVTVFVRVGMDVRWDGATMGLDDMINEGVRRAYNLPENVLRASILADPAGARKNTKDNTPAVIHYSIVPGNTVEVDVAAKGGGSENKSKMAMLNPSDSIVDWVLKTVPTMGAGWCPPGMLGIGIGGTAEKAAVMAKEVLMESIDIHELKARGPQNRIEEMRLELFEKVNQLGIGAQGLGGLTTVLDVKIMDYPTHAASLPVCMIPNCAATRHAHFVLDGSGPASLEAPSLDAYPEIVWEAGPSARRVNLDTLTPEEVQSWKPGETVLLNGKMLTGRDAAHKRMVEMLNRGETLPVDLKGRFIYYVGPVDPVREEVVGPAGPTTATRMDKFTRQILDQTGLLGMIGKSERGPTAIEAIRDHKAVYLMAVGGAAYLVAQAIKKSRVVAFAELGMEAIYEFEVKDMPVTVAVDSNGESVHITGPQIWQKKISDSLAVEVQ

SEQ ID NO: 44346 - DNA, 1533 bp, Dechloromonas aromatica RCB
  CDS (1)..(1533)
atgaccgccatcaaacaggaagacctgatccagtccgtcgccgatgccttccagtacatcagctactatcacccgctcgattacatcaaggcgctgggtgaagcctatgatcgcgaggaaagccccgctgcaaaggacgccatcgcccagatcctgaccaattcgcggatgtccgccgaaggccatcgcccgatctgtcaggacactggtatcggcatggttttcatcaaggtcggcatgcaggttacctggccggatgccaccatgagcatccagcagatgatcgacgaaggcgtgcgtcgcgcctacggcaacccggacaatccgctgcgcgcctcggtgctggccgacccggccggtgcccgcaagaacaccaaggacaacaccccggccgtcgtgcatttcgagatcgtccccggccaccatgttgaagtcatctgcgccgccaagggcggcggctcggaagccaagtccaaattcgccatgctcaacccttccgacgacctggtcgactgggtgctcaagaagatcccggaaatgggcgccggttggtgcccgcccggcatcatcggtatcgggatcggcggcacgccggaaaaggccatgctgctggccaaggaatcgatcatggcgccggtcgacatccatgaactgaaggccaaggcggccaccggcaccaagctgacccgtccggaagaattgcgcctcgaactgatggaaaagatcaacgcgctgggcgttggcgcccaaggcctcggcggcctgaccaccgtgctcgacgtcaaggtgctggattacccctgccacgctgccaacctgccggtcgccctggtcccgaactgtgctgcaacccgccactgccatttccacctcgacggctccggcccggccaagctggaagtgccgaagctcgaagactggccggccgtcacgtggacgccggatctcaagtcagccacgcaggtcaacctgaacaccctgaccaaggacgaagtcgcttcctggaagccgggccagaaactgctgctcaacggcaagatgctgactggccgcgatgccgcccacaagcgcattcaggacatgctggccaagggcgagaagctgccggtagatttcaccaaccgcgtcatctactacgtcggcccggtcgatccggtgcgtgacgaagtcgtcggcccggccggcccgaccaccggcacccgcatggacaagttcacccgcatgatgctggaacagaccggcctgatctcgatgatcggcaagtccgaacgcggtccggtcgccatcgaggcgatcaaggacaacaagtcggcctacctgatggctgtcggcggcgctgcctacctggttgccaaggcgatcaagtcggccaaggtcgtcggctttgccgatctgggcatggaagccatctacgagttcgatgtcgagaacatgccggtcacagtggccgtcgattcatcaggcatcagcgtgcacgaaaccggcccgaaggaatggcaggtcaagatcggcaagattccgctcaaggcctga

SEQ ID NO: 44347 - protein, 510 aa, Dechloromonas aromatica RCB
MTAIKQEDLIQSVADAFQYISYYHPLDYIKALGEAYDREESPAAKDAIAQILTNSRMSAEGHRPICQDTGIGMVFIKVGMQVTWPDATMSIQQMIDEGVRRAYGNPDNPLRASVLADPAGARKNTKDNTPAVVHFEIVPGHHVEVICAAKGGGSEAKSKFAMLNPSDDLVDWVLKKIPEMGAGWCPPGIIGIGIGGTPEKAMLLAKESIMAPVDIHELKAKAATGTKLTRPEELRLELMEKINALGVGAQGLGGLTTVLDVKVLDYPCHAANLPVALVPNCAATRHCHFHLDGSGPAKLEVPKLEDWPAVTWTPDLKSATQVNLNTLTKDEVASWKPGQKLLLNGKMLTGRDAAHKRIQDMLAKGEKLPVDFTNRVIYYVGPVDPVRDEVVGPAGPTTGTRMDKFTRMMLEQTGLISMIGKSERGPVAIEAIKDNKSAYLMAVGGAAYLVAKAIKSAKVVGFADLGMEAIYEFDVENMPVTVAVDSSGISVHETGPKEWQVKIGKIPLKA

SEQ ID NO: 44348 - DNA, 1524 bp, Methylobacillus flagellatus KT
  CDS (1)..(1524)
atggccttcatccgccaagaagattttatcgacagcatccaccaggcattgcaatacattgcctgctaccattcgccggacttcctcgctgccatgcacgatgcatggcagcgtgagccgtctccggcagcgcgggatgcgatcggtcaaatcctcatcaactcttatctctgcgcacaaggacaacgcccgctctgccaagacaccgggattgtcgtggccttcgtttccgtcggcatgaacgtgcagtggcaggccagcatgagcctgcaggagatggtggacgaaggtgtacgccgcgcctacctcgacccggacaaccgcctgcgcgcctccatcgtgcgcgaccccgcgggcaagcgcctcaatacccgcgacaacacgccgtctgtcgtacatgtggacatggtgcccggcgatacggtggaaatccatatcgccgccaaaggtggtggatcggaaaacaaatccaaactcgccatgctggaaccttccgacgacctcatcgaatgggtgctgaaaacagtaccggaaatgggtgccggctggtgcccacctggggtactcggcatcggcatcggcggcacggcggaaaaagccgtactgctcgccaagcaatccttgtttgctcccatcgacatccaggcattgagagccaggggacctcagacacgggcagaggagctacgcctggaaatctacgagaaagtcaaccggctcggcatcggcgctcaaggcctgggcggactcacaacggtactggatgtgaagatcctggaggccccgacccatgcgacttcgctaccagtcgccatcattcccaattgcgcagccacacgccatgtgcatttcacattggatggcactgggccagcacgcctgcctgcgccccggctggaagattggccacgagttgcgctggatgccagcacccccatgcgccgggtcgatctcggcaaggtaacacgagaagacgtgatcagctggcagccaggagaaaaactgctgctctcgggcaaactgctcaccgggcgcgatgccgcccataagcgcatcgtcgacctgatcgcccgcggtgagccgatgccggagggcctggacttcaccaaccgcttcatctattacgtcgggccggtcgacccggtaggcgatgaaatcattggcccagcgggccccaccaccgccacacgtatggaccgcttcacggagaccatgctgacccaaaccggcctgctcggcatgataggcaaggccgagcgcggcgaagccaccgtacagtccatcaagcggcatcaatcggtctacctgatcgcgatcggcggcgcagcctacctgatctcgcaggccatcaaggcatctcgtatcgtggcatttgccgacctgggcatggaagccatctacgaattcacggtggaggatatgcccgtgacggtggccgtggatagccgaggccacgctgtgcatgataccggcccggccgagtggcgtcccagaattgctaacatccccattttcagcgaatag

SEQ ID NO: 44349 - protein, 507 aa, Methylobacillus flagellatus KT
MAFIRQEDFIDSIHQALQYIACYHSPDFLAAMHDAWQREPSPAARDAIGQILINSYLCAQGQRPLCQDTGIVVAFVSVGMNVQWQASMSLQEMVDEGVRRAYLDPDNRLRASIVRDPAGKRLNTRDNTPSVVHVDMVPGDTVEIHIAAKGGGSENKSKLAMLEPSDDLIEWVLKTVPEMGAGWCPPGVLGIGIGGTAEKAVLLAKQSLFAPIDIQALRARGPQTRAEELRLEIYEKVNRLGIGAQGLGGLTTVLDVKILEAPTHATSLPVAIIPNCAATRHVHFTLDGTGPARLPAPRLEDWPRVALDASTPMRRVDLGKVTREDVISWQPGEKLLLSGKLLTGRDAAHKRIVDLIARGEPMPEGLDFTNRFIYYVGPVDPVGDEIIGPAGPTTATRMDRFTETMLTQTGLLGMIGKAERGEATVQSIKRHQSVYLIAIGGAAYLISQAIKASRIVAFADLGMEAIYEFTVEDMPVTVAVDSRGHAVHDTGPAEWRPRIANIPIFSE

SEQ ID NO: 44350 - DNA, 1509 bp, Mesorhizobium sp. BNC1
  CDS (1)..(1509)
atgacccgtatttccaacgcagcgatcgtcactaacatcgccgccgcgctgcagtacatctcggtcttccatccgcccgagtacatccgccaccttgcggctgcccacgcacaagaggagagcttgcccgcccgcgccgcaatcgagcagatcctgatcagttcgcgcatggccgcgctcgggcaacgtgccatttgtcaggacaccggcactgtcaacgcgcatatgaaagtgggcatgggggtgcggcttgatggtgattccagccttcagaacctgctcgacgaagcgatccggctagcctgggccgatgaccgcaacccgctgagggcctccatcgtcgccgacccgctgttcgcgcgccgcaatacccgcgacaacaccccgggcatgctgaccgtggaaatcgtgcccggagacggtatcgaaattgccctcatgtcgaagggcggcggctcggagaacaagagccgcttcaccacactcaggccttcagacagcgtcgaggactgggtaatcgatcagcttcccggcttgggcgccggctggtgccctccgggcatgctgggcatcggggtcggcggcagcgccgacatggccatgcggcttgccaaggagagcctttacgatgcgcccaacatggcatggttacgacagaaggcgaaccacaccgaagaggaggccttccgcgtccgcgtctgtgaccgggccaacgcactcggcattggtgcccaggggttgggtgggctgaccgcggtgctcgacgtaaagctacggaccgcgccaacgcatgcctctgcgctgccggtcgcgctgatcccgcaatgcgtggcaacgcgaatggtccgcttccgcatctcggcaaccgagggcttcgatctctcgccgcccgatcctgcgctttggccggagatcaccgcccccgccgttgacggagtccagcggatcaatctcgacaccttgaccgagtccgcgaagcagagttggaaagcaggcgacaccctgcttctgtcgggccgcatcctgactggccgtgatgcagcccacaagcgcctcgacgaaatgctggatcgcggcgatcccctgcccgtcgatttgcgcggccgcgcgatctattatgtcggtccggtcgatcccgctccgggcgagatcatcggcccggcgggacccaccacttccacccgaatggacaaattcactccccgtcttcttgcccaaaccggtctcggactgatgattgggaaggccgagcgtggaccagacgttattgaagcgatcgctcgccacaaggccccgtacctcatcgccgtcggcggcgcagccgttctcatctcccgcgcgatccgcaacgcccgcgtcgtcgccttcgaggacctcggcatggaagccatccacgaattcgaagtccaggacctgcccgtcatcgtcgcagtcgacaccgcgggtacatcgatacacgacacaggacccgcgcagtggcgtagaacgtcaaccagccggtcttcttaa

SEQ ID NO: 44351 - protein, 502 aa, Mesorhizobium sp. BNC1
MTRISNAAIVTNIAAALQYISVFHPPEYIRHLAAAHAQEESLPARAAIEQILISSRMAALGQRAICQDTGTVNAHMKVGMGVRLDGDSSLQNLLDEAIRLAWADDRNPLRASIVADPLFARRNTRDNTPGMLTVEIVPGDGIEIALMSKGGGSENKSRFTTLRPSDSVEDWVIDQLPGLGAGWCPPGMLGIGVGGSADMAMRLAKESLYDAPNMAWLRQKANHTEEEAFRVRVCDRANALGIGAQGLGGLTAVLDVKLRTAPTHASALPVALIPQCVATRMVRFRISATEGFDLSPPDPALWPEITAPAVDGVQRINLDTLTESAKQSWKAGDTLLLSGRILTGRDAAHKRLDEMLDRGDPLPVDLRGRAIYYVGPVDPAPGEIIGPAGPTTSTRMDKFTPRLLAQTGLGLMIGKAERGPDVIEAIARHKAPYLIAVGGAAVLISRAIRNARVVAFEDLGMEAIHEFEVQDLPVIVAVDTAGTSIHDTGPAQWRRTSTSRSS

SEQ ID NO: 44352 - DNA, 1524 bp, Burkholderia cepacia R18194
  CDS (1)..(1524)
atgaccgtcatcaaacaggaagacctgatccagagcatcgcggattcgctgcagtacatcagctactaccatccgctcgactacatccaggccctcggccgcgcgtacgagctggaagaaagcccggccgcgaaggatgcgatcgcgcagatcctcacgaacagccgcatgtgcgcggaaggcaagcgcccgatctgccaggacaccggcatcgtcacgatcttcgtgaaggtcggcatggacgtgcgctgggacggcgcgacgatgggcctgaccgacatgatcaacgaaggcgtgcgccgcggttacacgcacccggacaacgtactgcgcgcgtcgatcgtcaatccgccggaaggcgcccgcaagaacacgaaggacaacacgccggccgtgatccactacgagatcgtgccgggcgacaaggtcgacgtgcaggttgcggcgaagggcggcggctcggagaacaagtcgaagttcgtgatgctgaacccgtccgactcgatcgtcgactgggtgctgaagacggtcccgacgatgggtgcgggctggtgcccgcccggcatgctcgggatcggcatcggcggcaccgctgaaaaggcgatgctgatggcgaaggaatcgctgatggagccgatcgacatccaggaaatcatcgcacgcggtccgaaggactgggtcgaggaactgcgcgtcgaactgcacgagaaggtcaacgcgctcggcatcggcgcacagggcctcggcggcctggcaaccgtgctcgacgtgaagatcatggccgcaccgacgcacgcggcgtcgaagccggtcgcgctgatcccgaactgcgcagcaacgcgccacgcgcacttcgtgctcgacggctcgggcccggccaagcttgaagcaccgtcgctcgacgcgtggccgaaggtcaactgggaaccgaataccgaaaccagcaagcgcgtcgacctgaacacgctgacgccggaggaagttgcaagctgggcgccgggccagacgctgctgctgtcgggcaagatgctcaccggccgcgacgccgcgcacaagcgtatcgccgacatgctcgcgaagggcgagaagctgccggtcgacttcacgaaccgcgtgatctactacgtcggcccggtcgatccggtccgcgacgaagtggtcggcccggcaggcccgacgacggccacgcgcatggacaagttcaccgagacgatgctcgcgcaaaccggcctgatctcgatggtcggcaaggccgagcgcggcccggtcgcgatcgaagcgatcaagaagcacaaggcggcctacctgatggcggtcggcggggcggcttacctcgtgtcgaaggcgatccgcggcgcgaaggtgctcgcattcgaagacctcggcatggaagcgatctacgagttcgacgtgcaggacatgccggtgacggtggctgtcgattcgtcgggcacgtcggtgcaccagaccggtccgaaggagtggcaggcgaagatcggcaagatcccggtcgcagccgcttaa

SEQ ID NO: 44353 - protein, 507 aa, Burkholderia cepacia R18194
MTVIKQEDLIQSIADSLQYISYYHPLDYIQALGRAYELEESPAAKDAIAQILTNSRMCAEGKRPICQDTGIVTIFVKVGMDVRWDGATMGLTDMINEGVRRGYTHPDNVLRASIVNPPEGARKNTKDNTPAVIHYEIVPGDKVDVQVAAKGGGSENKSKFVMLNPSDSIVDWVLKTVPTMGAGWCPPGMLGIGIGGTAEKAMLMAKESLMEPIDIQEIIARGPKDWVEELRVELHEKVNALGIGAQGLGGLATVLDVKIMAAPTHAASKPVALIPNCAATRHAHFVLDGSGPAKLEAPSLDAWPKVNWEPNTETSKRVDLNTLTPEEVASWAPGQTLLLSGKMLTGRDAAHKRIADMLAKGEKLPVDFTNRVIYYVGPVDPVRDEVVGPAGPTTATRMDKFTETMLAQTGLISMVGKAERGPVAIEAIKKHKAAYLMAVGGAAYLVSKAIRGAKVLAFEDLGMEAIYEFDVQDMPVTVAVDSSGTSVHQTGPKEWQAKIGKIPVAAA

SEQ ID NO: 44354 - DNA, 1524 bp, Burkholderia cepacia R1808
  CDS (1)..(1524)
atgaccgtcatcaaacaggaagacctgatccagagcatcgcggattcgctgcagtacatcagctactaccacccgctcgactacatccaggcgctcggccgcgcgtacgagctcgagcagagcccggccgcgaaggacgcgatcgcgcagatcctcacgaacagccgcatgtgcgcggaaggcaagcgcccgatctgccaggacaccggcatcgtgacggtcttcgtgaaggtcggcatggacgtgcgctgggacggcgcgacgatgagcgtcaccgacatgatcaacgaaggcgtgcgccgcggttacacgcacccggacaacgtcctgcgcgcgtcgatcgtcaatccgccggaaggcgcccgcaagaacaccaaggacaacacgccggccgtgatccactacgagatcgtgccgggcgacaaggtcgacgtgcaggtggcggcgaagggcggcggctcggagaacaagtcgaagttcgtgatgctgaacccgtccgattcgatcgtcgactgggtgctgaagacggtcccgacgatgggcgcgggctggtgcccgccgggcatgctcgggatcggcatcggcggcaccgccgaaaaggcgatgctgatggcgaaggaatcgctgatggagccgatcgacatccaggaaatcatcgcgcgcggcccgaaggactggatcgaggaactgcgtgtcgagctgcacgagaaggtcaacgcgctcggcatcggcgcacagggcctcggcggcctggcgaccgtgctcgacgtgaagatcatggccgcgccgacgcacgcggcgtcgaagccggtcgccctgatcccgaactgcgcggcgacgcgccacgcgcacttcgtgctcgacggctcgggcgcggcgaagctcgaagcgccgtcgctcgacgcatggccgaaggtccagtgggaaccgaacaccgagacgagcaagcgcgtcgacctgaacacgctgacgccggaagaagtcgcgagctggacgccgggccagacgctgctgctgtcgggcaagatgctcacgggccgcgacgctgcgcacaagcgcatcgccgacatgctcgcgaagggcgagaagctgccggtcgacttcaccaaccgcgtgatctattacgtcggtccggtcgatccggtgcgtgacgaagtggtcggcccggccggcccgacgacggccacgcggatggacaagttcaccgagatgatgctcgcgcagacgggcctgatctcgatggtcggcaaggcggaacgcggcccggtcgcgatcgacgcgatcaagaagcacaaggccgcgtacctgatggcggtcggcggcgcggcatacctggtgtcgaaggcgatccgcggcgcgaaggtgctcgcattcgaagacctcggcatggaagcgatctacgagttcgacgtgcaggacatgccggtgacggtggcggtcgattcgtcgggcacgtcggtgcaccagaccggtccgaaggaatggcaggcgaagatcggcaagatcccggtcgcaaccgcttaa

SEQ ID NO: 44355 - protein, 507 aa, Burkholderia cepacia R1808
MTVIKQEDLIQSIADSLQYISYYHPLDYIQALGRAYELEQSPAAKDAIAQILTNSRMCAEGKRPICQDTGIVTVFVKVGMDVRWDGATMSVTDMINEGVRRGYTHPDNVLRASIVNPPEGARKNTKDNTPAVIHYEIVPGDKVDVQVAAKGGGSENKSKFVMLNPSDSIVDWVLKTVPTMGAGWCPPGMLGIGIGGTAEKAMLMAKESLMEPIDIQEIIARGPKDWIEELRVELHEKVNALGIGAQGLGGLATVLDVKIMAAPTHAASKPVALIPNCAATRHAHFVLDGSGAAKLEAPSLDAWPKVQWEPNTETSKRVDLNTLTPEEVASWTPGQTLLLSGKMLTGRDAAHKRIADMLAKGEKLPVDFTNRVIYYVGPVDPVRDEVVGPAGPTTATRMDKFTEMMLAQTGLISMVGKAERGPVAIDAIKKHKAAYLMAVGGAAYLVSKAIRGAKVLAFEDLGMEAIYEFDVQDMPVTVAVDSSGTSVHQTGPKEWQAKIGKIPVATA

SEQ ID NO: 44356 - DNA, 1521 bp, Bacillus cereus G9241
  CDS (1)..(1521): transl_table=11
atggaaaagcttcaagaaagcatgtatcaactaattgttgaaacgtcaacgaacttaccgaaagatgttcgtcgtgcgattcaacaagcgaaagagcgagaaaatgcagggactcgttctgcgatggcacttggcacaattacaaataatattaaaatggctgatgataacatctcaccaatttgccaagatacagggatgccaacgtttaaaatttatacaccagttggtgtgaatcaattaaagctgaaggaagctatctatcatgcgcttgagcgggcgacaaaagatggtaaacttcgtccaaattctgttgattctctttttggagacaatagtggaaataatttaggaccaggtacaccggttataaagtttgaacaatgggaaaaagattatattgatgcacgtttaatcttaaaaggtggtggctgtgagaataaaaatattcagtatagcttaccatgcgaattagaaggacttggacgagctggccgtgatttagaagggattcgtaaatgccttcttcatgccgtatatcaagcacaaggtcaaggatgtagtgcaggtgtaattggtgttggtatcgggggagaccgcacatcaggttacgaattagcaaaaaatcaattattccgtacattagatgatgtcaatccaatcccagagttacaacaacttgaagagtacgtattagaaaatgcaaataagcttggcattggtacgatgggatttggcggagaaacaactttacttggctgtaaaattggcgtgtataaccgtctgccagctagcttctacgtatctgtggcgtataactgctgggcatatcgccgccttggtgtaacaatccatcctgaaacaggtgaaattatggattggctatatcaagaaggtgacgatacactgaagcaagaagcacaagaaaaaacagagcaacgtgagattgtattacaagcgccaattacagaagagcaaattcgtgaacttcgcgttggtgatgttgtaacaattaatggcatgatgtatacaggtcgtgacgcaatccataagcatttaatggataacgattgtccagtagatctaaatgggcaaattatttaccactgtggtccagttgttgtgaaagatgaaaatgacaattggcaaattaaagcggcaggtccaacgacaagtattcgtgaagaaccgtaccaaggcgatattatgaagaaattcggcattcgcgctgttattggaaaaggcggtatgggtgcgaaaacattagcagctttagaagaacacggcggtgtatatttaaatgcaattggtggtgcagcacaatattatgctgaatgtattaaagaagtgaaagatgttgatttcttacaatttggtattccagaggcaatgtggcatttacgtatcgatggatttaaagcagttgtaacaatggattctcacggtaatagcttacatgcagatgttgataaaacatcacttgaaaaattagctagctttaaagagccagtatttaagtaa

SEQ ID NO: 44357 - protein, 506 aa, Bacillus cereus G9241
MEKLQESMYQLIVETSTNLPKDVRRAIQQAKERENAGTRSAMALGTITNNIKMADDNISPICQDTGMPTFKIYTPVGVNQLKLKEAIYHALERATKDGKLRPNSVDSLFGDNSGNNLGPGTPVIKFEQWEKDYIDARLILKGGGCENKNIQYSLPCELEGLGRAGRDLEGIRKCLLHAVYQAQGQGCSAGVIGVGIGGDRTSGYELAKNQLFRTLDDVNPIPELQQLEEYVLENANKLGIGTMGFGGETTLLGCKIGVYNRLPASFYVSVAYNCWAYRRLGVTIHPETGEIMDWLYQEGDDTLKQEAQEKTEQREIVLQAPITEEQIRELRVGDVVTINGMMYTGRDAIHKHLMDNDCPVDLNGQIIYHCGPVVVKDENDNWQIKAAGPTTSIREEPYQGDIMKKFGIRAVIGKGGMGAKTLAALEEHGGVYLNAIGGAAQYYAECIKEVKDVDFLQFGIPEAMWHLRIDGFKAVVTMDSHGNSLHADVDKTSLEKLASFKEPVFK

SEQ ID NO: 44358 - DNA, 1524 bp, Rubrivivax gelatinosus PM1
  CDS (1)..(1524)
atgaccacgatccgacacgccgatctcgttgacagcatcgctgccgcgctgcagtacatcagctactaccacccggcagactacatcacgcacctggcgcgtgcctacgaacaggagcagagcccggccgccaaggacgcgatcgcgcagatcctcaccaactccaagatgtgcgccgaaggacgccggccgatctgccaggacaccggcatcgtcaacgtgttcctgaagatcggcatggacgtgcgcttcgagggcttcgccggctcgatcgaggatgccgtcaacgagggcgtgcgtcgcggctacctgaaccccgagaacaccctgcgcgccagcatcgtggccgatccccacttcgagcgcaagaacaccaaggacaacaccccggccgtcgtgcacatgacggtcgtgccgggcaacacggtcgacgtgcaggtggccgccaagggcggcggctccgagaacaagagcaagttcgtgatgctcaaccccagcgacagcctggtcgactgggtattgaaaacggtgccgacgatgggcgccggctggtgcccgccgggcatgctgggcatcggcatcggcggctcggcggagaaggccatgctgatggccaaggagtcgctgatgggcgacatcgacatgtacgagctcaagcagcgcggcccgcagaacaagctggaggagctgcgcatcgagctgtgcgacaagatcaacgccctcggcatcggcgcccagggcctgggcggcctgaccacggtgctcgacgtgaagatctcgaccttcccgacgcacgcggccagcaaacccgtggcaatgatcccgaactgcgccgccacgcgccacgcacacttcgtgctcgacggctccggcccgtcctacctcgagccgccgagcctggacctctggcccgacgtgaaatgggctcccgattacaacaagagcaagtcggtcaatctcgacacgctgacgcgcgaggaggtggcgagctggaagccgggcgacacgctgctgctcaacggcaagatgctcaccggccgcgacgccgcgcacaagcgcatccaggacatgctggccaagggcgagaagctgccggtggacttcaccaaccgcgtcatctactacgtcggcccggtcgatccggtgcgcgacgaggtggtcggcccggctggcccgaccaccgccacgcgcatggacaagttcaccgagatgatgctggcccagaccggcctgatcggcatgatcggcaaggccgagcgcggcccggccggcatcgaggcgatccgcaagcacaagagcgcctacctgatggccgtcggcggcgccgcctacctggtggccaaggcgatcaagcaggccaaggtgctgggcttcgccgaccttggcatggaggcgatctacgagttcgacgtcaaggacatgccggtgacggtggccgtcgactcgaccggcagctcggtgcaccagacgggaccggccgaatggcaggcgaagatcggcaagattccggtcgccatcgcctga

SEQ ID NO: 44359 - protein, 507 aa, Rubrivivax gelatinosus PM1
MTTIRHADLVDSIAAALQYISYYHPADYITHLARAYEQEQSPAAKDAIAQILTNSKMCAEGRRPICQDTGIVNVFLKIGMDVRFEGFAGSIEDAVNEGVRRGYLNPENTLRASIVADPHFERKNTKDNTPAVVHMTVVPGNTVDVQVAAKGGGSENKSKFVMLNPSDSLVDWVLKTVPTMGAGWCPPGMLGIGIGGSAEKAMLMAKESLMGDIDMYELKQRGPQNKLEELRIELCDKINALGIGAQGLGGLTTVLDVKISTFPTHAASKPVAMIPNCAATRHAHFVLDGSGPSYLEPPSLDLWPDVKWAPDYNKSKSVNLDTLTREEVASWKPGDTLLLNGKMLTGRDAAHKRIQDMLAKGEKLPVDFTNRVIYYVGPVDPVRDEVVGPAGPTTATRMDKFTEMMLAQTGLIGMIGKAERGPAGIEAIRKHKSAYLMAVGGAAYLVAKAIKQAKVLGFADLGMEAIYEFDVKDMPVTVAVDSTGSSVHQTGPAEWQAKIGKIPVAIA

SEQ ID NO: 44360 - DNA, 1524 bp, Pseudomonas fluorescens PfO-1
  CDS (1)..(1524)
atgaccgtgatcaagcaagacgacctgattcagagcgttgccgacgccctgcagttcatttcctactaccaccccgtggacttcatccaggcgatgcacgaagcctacctgcgcgaagaatcgccagcggcccgtgactcgatggcgcagatcctgatcaactcgcgcatgtgcgccacgggccaccggccgatctgccaggacaccggcatcgtgaccgtgttcgtgcgtgtgggcatggacgtgcgttgggatggcgcgaccatgagcctggacgacatgatcaacgaaggcgtgcgccgcgcctacaacctgccggaaaacgtcctgcgtgcctcgatcctcgccgacccggcgggcgctcgtaaaaacaccaaggacaacaccccggcggtcatccactactccatcgttccgggtaacaccgtggaagtggacgtagcggccaagggcggcggttccgagaacaagtcgaagatggccatgctcaacccgtccgactcgatcgtcgactgggtactcaagaccgttccgaccatgggcgccggctggtgcccgccgggcatgctgggcatcggcatcggcggtaccgccgagaaagccgctgtcatggccaaggaagtgttgatggaatccatcgacattcacgagctcaaggcccgtggcccgcagaaccgcatcgaagaaatgcgtctggagctgttcgagaaggtcaaccagctgggcatcggcgcccagggcctcggtggcctgaccaccgtcctcgacgtgaagatcatggactacccgacccacgccgcttccttgccggtgtgcatgatcccgaactgcgccgccacccgtcacgcgcacttcgtattggacggctccggcccggcctcgctggaagcgccaccgctggacgcctacccggaaatcgtctgggaagccggcccgtcggcccgtcgcgtcaacctcgacaccctgaccccggaagacgtgcagagctggaagccgggcgaaaccgtcctgctcaatggcaagatgctcaccggtcgcgacgctgcgcacaaacgcatggtcgagatgctgaacaagggtgaaaccctgccggttgatctgaagggccgcttcatctactacgtcggcccggttgatccggtcggtgacgaagtggttggcccggcgggtccgaccaccgccacgcggatggacaagttcacccgtcagatccttgagcagaccggcctgttgggcatgatcggcaagtccgagcgcggcccgaccgccatcgacgcgatcaaggacaacaaggctgtgtacctgatggccgtcggcggtgccgcttacctggtggcgcaagcgatcaagaagtccaaggttctggcgttctccgaactgggcatggaagcgatctacgagttcgaggtcaaggacatgccggtcaccgttgcggtggacagcaaaggtgaatcggtgcacatcaccggtcctgcgatctggcaacagaagatcagcgaaagcctggcggtggaagtgcagtaa

SEQ ID NO: 44361 - protein, 507 aa, Pseudomonas fluorescens PfO-1
MTVIKQDDLIQSVADALQFISYYHPVDFIQAMHEAYLREESPAARDSMAQILINSRMCATGHRPICQDTGIVTVFVRVGMDVRWDGATMSLDDMINEGVRRAYNLPENVLRASILADPAGARKNTKDNTPAVIHYSIVPGNTVEVDVAAKGGGSENKSKMAMLNPSDSIVDWVLKTVPTMGAGWCPPGMLGIGIGGTAEKAAVMAKEVLMESIDIHELKARGPQNRIEEMRLELFEKVNQLGIGAQGLGGLTTVLDVKIMDYPTHAASLPVCMIPNCAATRHAHFVLDGSGPASLEAPPLDAYPEIVWEAGPSARRVNLDTLTPEDVQSWKPGETVLLNGKMLTGRDAAHKRMVEMLNKGETLPVDLKGRFIYYVGPVDPVGDEVVGPAGPTTATRMDKFTRQILEQTGLLGMIGKSERGPTAIDAIKDNKAVYLMAVGGAAYLVAQAIKKSKVLAFSELGMEAIYEFEVKDMPVTVAVDSKGESVHITGPAIWQQKISESLAVEVQ

SEQ ID NO: 44362 - DNA, 1617 bp, Rhodospirillum rubrum
  CDS (1)..(1617)
atgatcgatcgcgctttcgcggacgtctttcccttggcggaggataaaaccctctaccgcgctctcgaagggacggaggggttggtttcggtggagcggttccgcggcgaggagatgctggtcgtcgcccccgaggccctgacccgtctggcgcaagaggccttccgcgacatcgcccatctgctgcgcccggcccatctttcccagctgcgcgccatcatggacgatcccgaggcttcggccaacgaccgcttcgtcgccctggaactgctgaaaaacgccaatatctcggccggcatggtcttgccgatgtgccaggacaccggcacggcgatcattcagggcaagaagggccagcgggtgttttcgggcgacgacgacgccctcgccctgtcggaaggcgtggcccggacctatcagaccctgaacctgcgctattcgcagatggcggcgctgtcggttttcgacgaggtcaataccggcaacaacctgcccgcccagatcgacctctacgccacgccgggcgacgcctataaattcctcttcatggccaaaggcggcggctcggccaataaggtcttcctttaccagcagaccaaggccctgctcaatcccgagagcctcgcccgcttccttgacgcccaggtgcgcacgctgggcaccgccgcctgcccgccctatcacctgtcgatcgccatcggcggcaccagcgccgaggcctgcctgaaggcggtgaaactggccagcgccaagtatctcgatggcctgccgaccaccgggggcaaggatggccacgccttccgcgatctggcgctcgaggccgaggttctggcgatgacccgggccatgggcatcggcgcccagttcggcggcaagtatttctgccacgacgtgcgcgttgtccgcctgccccgccacggcgcgagctgcccggtgggcatcggcgtctcctgctcggccgaccgccagatgctgggcaagatcaccgccgaagggctgttcctcgaacagcttgaaaccaatcccgcccattacctgcccgacgtgcgcaccgagaagctgtcggccgaggtggtcaagatcgacctgtcgcggccgatggcggaaatccgcgcgacgctcagcggctatccgatcaagacccgggtctcgctgtcggggccgatgatcgtcgcccgcgacatcgcccacgccaagctcaaggaacggctggatcgcggcgagggcctgcccgagtacttcaagaacggcgcggtctattacgccggcccggccaagaccccggccaattacgcctcgggctcctttggcccgaccaccgccggccgcatggacgcctatgtcgatctattccaagagaacggcggctcgatggtgatgatcgccaagggcaaccgttccaaggcggtgaccgaggcctgcaagaagcacggcgggttctatctgggctcgatcggcggcgccgccgcccaactggccctcaacagcatccgcaaggtcgaggttctggaatacccggaactgggcatggaagccatctggcgcatcgaggtcgaggattttccggccttcatcatcgtcgatgacaagggcaacgacttcttccagcagctttga

SEQ ID NO: 44363 - protein, 538 aa, Rhodospirillum rubrum
MIDRAFADVFPLAEDKTLYRALEGTEGLVSVERFRGEEMLVVAPEALTRLAQEAFRDIAHLLRPAHLSQLRAIMDDPEASANDRFVALELLKNANISAGMVLPMCQDTGTAIIQGKKGQRVFSGDDDALALSEGVARTYQTLNLRYSQMAALSVFDEVNTGNNLPAQIDLYATPGDAYKFLFMAKGGGSANKVFLYQQTKALLNPESLARFLDAQVRTLGTAACPPYHLSIAIGGTSAEACLKAVKLASAKYLDGLPTTGGKDGHAFRDLALEAEVLAMTRAMGIGAQFGGKYFCHDVRVVRLPRHGASCPVGIGVSCSADRQMLGKITAEGLFLEQLETNPAHYLPDVRTEKLSAEVVKIDLSRPMAEIRATLSGYPIKTRVSLSGPMIVARDIAHAKLKERLDRGEGLPEYFKNGAVYYAGPAKTPANYASGSFGPTTAGRMDAYVDLFQENGGSMVMIAKGNRSKAVTEACKKHGGFYLGSIGGAAAQLALNSIRKVEVLEYPELGMEAIWRIEVEDFPAFIIVDDKGNDFFQQL

SEQ ID NO: 44364 - DNA, 1524 bp, Ralstonia metallidurans CH34
  CDS (1)..(1524)
atgacagtcatcaagcaagaagacctcatccagagcgtcgccgattccctgcagtacatcagctactaccatccgatggactacatcaccagcctgggccgcgcctatgagctggaaaagagtccggccgccaaggatgcgatcgcgcagatcctgaccaacagccgcatgtgcgccgaaggcaagcgcccgctgtgccaggacaccggcatcgtgacggtcttcctgaaggtgggcatgaacgtgcgctgggatggcgccacgatgagcctggaagacatggtcaacgaaggcgtgcgccgcgcgtacaacgacgtggacaacaagctgcgcgccagcgtgctggccgatccggccggcaagcgcaccaatacgaaggacaacaccccggcggtgatcaacatgtcgatcgttccgggcgatacggtggacgtgatcgtcgcagccaagggcggcggttccgaagccaagtcgaagttcgtgatgctcaacccgtctgactcgatcgtcgactgggtgctcaagactgtcccgaccatgggcgccggctggtgcccgccgggcatgctgggcatcggcattggcggcacggctgaaaaggccatgctgctggccaaggaagccctgatggagccgatcgacattcaggacctgctcgcccgcggcccgagcaaccgcgccgaagaactgcgcatcgagctgtacgagaaggtcaacgcactgggcatcggcgcgcagggcctgggcggcctggctaccgtgctcgacgtgaaggtgctggactacccgacccacgcggccaacctgcctgtggccatgatcccgaactgcgcggccacccgccacgcgcacttcacgctggacggcagcggcgtcgccaagctggaagcgccggacctgtcgcaatggccgaaggtcgagtgggcaccgaacaccgaaacgtcgaaaagcgttgacctgaacacgctgacgccggaagaagtcgcctcgtggaagcccggccagacgctgctgctgaacggcaagatgctgaccggccgtgatgccgcgcacaagcgcatcgccgacatgctggccaagggcgagaagctgccgatcgacttcacgaaccgcgtgatctactacgtaggccccgtggatccggtacgtgacgaagtggttggcccggctggccccaccaccgccacccgcatggacaagttcaccgagacgatgctgtcgcagactggcctgatcgcgatgatcggcaaggccgagcgtggccccaccgcaatcgaatcgatccagaagcacaagtcggcctacctgatggccgtgggtggcgctgcctacctcgtgtcgaaggcgatccgtggcgccaaggtcctcgccttcgaagacctcggcatggaagccatctacgagttcgacgtcaaggacatgccggtgacggtggccgtggatagctcgggcacgtccgtccacaagaccggccccgccgagtggcaggccaagatcggcaagattccggtcgcgacggcctaa

SEQ ID NO: 44365 - protein, 507 aa, Ralstonia metallidurans CH34
MTVIKQEDLIQSVADSLQYISYYHPMDYITSLGRAYELEKSPAAKDAIAQILTNSRMCAEGKRPLCQDTGIVTVFLKVGMNVRWDGATMSLEDMVNEGVRRAYNDVDNKLRASVLADPAGKRTNTKDNTPAVINMSIVPGDTVDVIVAAKGGGSEAKSKFVMLNPSDSIVDWVLKTVPTMGAGWCPPGMLGIGIGGTAEKAMLLAKEALMEPIDIQDLLARGPSNRAEELRIELYEKVNALGIGAQGLGGLATVLDVKVLDYPTHAANLPVAMIPNCAATRHAHFTLDGSGVAKLEAPDLSQWPKVEWAPNTETSKSVDLNTLTPEEVASWKPGQTLLLNGKMLTGRDAAHKRIADMLAKGEKLPIDFTNRVIYYVGPVDPVRDEVVGPAGPTTATRMDKFTETMLSQTGLIAMIGKAERGPTAIESIQKHKSAYLMAVGGAAYLVSKAIRGAKVLAFEDLGMEAIYEFDVKDMPVTVAVDSSGTSVHKTGPAEWQAKIGKIPVATA

SEQ ID NO: 44366 - DNA, 1524 bp, Burkholderia fungorum LB400
  CDS (1)..(1524)
atgaccgtcatcaaacaggaagatctgattcagagcattgctgattcgcttcagtacatcagctattaccatccgctcgactacatccaggccttgggccgcgcgtacgaactcgaacagagcccggccgcgaaagacgccatcgcgcagattctcaccaacagccgcatgtgcgccgaaggcaagcgcccgatctgccaggataccggcatcgtcacggtgttcgtgaaagtcggcatggacgtgcgttgggacggcgcgacgatgggtgtcaccgacatgatcaacgaaggtgtgcgccgcggttatctgaacccggacaacgtgctgcgcgcgtcgatcgtgagcccgcccgaaggcggccgcaagaacacgaaggacaacacgccggccgtgatccactacgagatcgtgccgggcaatacggtcgacgtgcaggtcgcggccaagggcggcggctcggaaaacaagtcgaagttcgcgatgctgaacccgtcggattcgatcgtcgactggatcctgaagaccgtgccgaccatgggcgcgggctggtgcccgccgggcatgctcggcatcggcattggcggcaccgccgagaaagcgatggtgatggcgaaggaatcgctgatggatccgatcgacattcaggacgtgatcgcgcgcggcccgaaggactggatcgaagaactgcgcgtggaactgcacgagaaggtcaacgcgctcgggatcggcgcgcagggtctcggcggtctcgccaccgtgctcgacgtgaagatcatggccgcgccgactcacgccgcgtccaagccggttgcgatcatcccgaactgcgcggccacgcgccacgcgcacttcacgctggacggctcgggcgccgccagactcgaggcgccttcgctcgacgcatggccgaaggtgcattggcagccggacacggagaagagcaagcgggtcgatctgaacacgctcacgccggaagaagtcgcggcgtggacgccgggccagacgctgctgctgtcgggcaagatgctgacgggccgcgacgccgctcacaagcgcattgccgacatgctggcaaagggcgaaaagctgccggtcgacttcacgaaccgcgtgatctactacgtcggcccggtcgatccggtgcgcgatgaagccgtcggtcccgcaggcccgaccacggcaacccgcatggacaagttcaccgagatgatgctggcgcaaaccggcctgatttcgatgatcggcaaagccgagcgcggccctgtcgcgatcgaggcgatcaggaagcacaaggccgcttatctgatggccgtgggcggcgcggcgtatctcgtgtcgaaggcgattcgcagcgccaaggttctcgcattcgaagacctcggcatggaagcgatctacgagttcgacgtgcaggacatgccggtcaccgtggccgtcgattcgaacggcacctccgttcaccagaccggcccgaaggaatggcaggccagaatcggcaagattccggtcgcgaccgtttga

SEQ ID NO: 44367 - protein, 507 aa, Burkholderia fungorum LB400
MTVIKQEDLIQSIADSLQYISYYHPLDYIQALGRAYELEQSPAAKDAIAQILTNSRMCAEGKRPICQDTGIVTVFVKVGMDVRWDGATMGVTDMINEGVRRGYLNPDNVLRASIVSPPEGGRKNTKDNTPAVIHYEIVPGNTVDVQVAAKGGGSENKSKFAMLNPSDSIVDWILKTVPTMGAGWCPPGMLGIGIGGTAEKAMVMAKESLMDPIDIQDVIARGPKDWIEELRVELHEKVNALGIGAQGLGGLATVLDVKIMAAPTHAASKPVAIIPNCAATRHAHFTLDGSGAARLEAPSLDAWPKVHWQPDTEKSKRVDLNTLTPEEVAAWTPGQTLLLSGKMLTGRDAAHKRIADMLAKGEKLPVDFTNRVIYYVGPVDPVRDEAVGPAGPTTATRMDKFTEMMLAQTGLISMIGKAERGPVAIEAIRKHKAAYLMAVGGAAYLVSKAIRSAKVLAFEDLGMEAIYEFDVQDMPVTVAVDSNGTSVHQTGPKEWQARIGKIPVATV

SEQ ID NO: 44368 - DNA, 1608 bp, Magnetococcus sp. MC-1
  CDS (1)..(1608)
atggctgaatttcgccacgtagaagtgctcaaccccggtaaagataccacaacttaccgcctgctgagcaaagcttatgtgcagctggaaaaggtgggtgagcgtaatctgctacgggttgatccccaggcgttgaccttgttggctcaagaggccatccgagacgtttcgcacctttttcgcaccagccatttgcagcagctcgcccaaattttaaaggatcctgaggcgtcagacaatgatcgctatgtggccaccgagatgctaaaaaatgccagtgtctcagcgggcatggtgttgccaagctgtcaagatactggaacggccaccatccttgccaaaaaaggggagcaggtttggaccgggggcggtgatcgcgaagcgctctcccgtggggtgttccgtatctaccatgacaccaatttacgttattcgcaggtggccccgatcacgctgtttgacgaaaaaaataccggtaccaatctgcccgcccagattgatattgaggcggtggatggcgagagctacaagtttatgtttgtggtcaagggtgggggtagcgccaataagaccttcctctatcaagagaccaaggcgctgcttaacccagaacgtttccgcagctttattaccgaaaaggtcaaaagtttgggtacctccgcctgcccgccctatcatttggccattgtggtgggggggagctcgccggagatgaacctgaaaacggttaagttggccagtacccgctatctggatggattgcccactcgtggctcgggtttgggtgaagggattcgtgatctggagtgggagcaggaggtccataaaattacccaacagctaggcattggcgcccaatttggcggtaaatattttgcccatgatgtgcggattatccgcctgccccggcatggggcttcgtgtccggtggggattggggtgagctgttcggcggatcggcagatcttgggcaaaattgataaagagggcgtttggcttgaggatctggatcgggatcccgcccgttttctgcccgaaataagcggtacagagctaaccgaagaggtggtgcatctggatcttaaccgctcgatggctgagatccgcgccgagttaacacgctacccgatcaagacccgctttatgcttaccggccccattgtggtggcgcgggacatcgcccatgctaaaatcaatgaacgtctggatgccggtgagggtatgccagagtacctgaaaaatcatattgtttattatgcgggtcctgctaaaacccccgagggctacgcatctggcagctttggccccaccaccgctggccgcatggatagctatgtagaccgattccaaaaagaggggggctcgttggttatgctcgccaagggcaaccgcagcccgcaggtgaccgaggcctgtcgtagcaatgggggcttttacctgggttctattggtggcgttgctgcccagttggcgaaagagtcgatccgcaaggtcgagattatcgactatcccgaactgggtatggaagcggtctaccgcattgaagtcgagaacttccccgcctttattatcgtggatgataaaggcaatgacttttttacgccatga

SEQ ID NO: 44369 - protein, 535 aa, Magnetococcus sp. MC-1
MAEFRHVEVLNPGKDTTTYRLLSKAYVQLEKVGERNLLRVDPQALTLLAQEAIRDVSHLFRTSHLQQLAQILKDPEASDNDRYVATEMLKNASVSAGMVLPSCQDTGTATILAKKGEQVWTGGGDREALSRGVFRIYHDTNLRYSQVAPITLFDEKNTGTNLPAQIDIEAVDGESYKFMFVVKGGGSANKTFLYQETKALLNPERFRSFITEKVKSLGTSACPPYHLAIVVGGSSPEMNLKTVKLASTRYLDGLPTRGSGLGEGIRDLEWEQEVHKITQQLGIGAQFGGKYFAHDVRIIRLPRHGASCPVGIGVSCSADRQILGKIDKEGVWLEDLDRDPARFLPEISGTELTEEVVHLDLNRSMAEIRAELTRYPIKTRFMLTGPIVVARDIAHAKINERLDAGEGMPEYLKNHIVYYAGPAKTPEGYASGSFGPTTAGRMDSYVDRFQKEGGSLVMLAKGNRSPQVTEACRSNGGFYLGSIGGVAAQLAKESIRKVEIIDYPELGMEAVYRIEVENFPAFIIVDDKGNDFFTP

SEQ ID NO: 44370 - DNA, 1626 bp, Geobacter metallireducens GS-15
  CDS (1)..(1626)
atgtccaccaagccgttcgtttaccaggaacccttccccctcgagaaagatgagacgtcgtactacaagattcccgactcggagaagtatgtcagcgtcgcaactttcgaagggaaagaggtcctcaaggtcgatcccgaggcactcaccgtcctggccaacacggccatgagggacgtctccttcctgctccgccccgagcacaacgagtcggtggccaagatcctccgggatccggaagcctcccagaacgacaagggggttgccctggcattcctgcggaacgccgagatcgccgccaacttcgagctccccctctgccaggacaccggcaccgccaccgtcgtggccaagaaagggcagcaggtttggaccggcggaaaggacgaggagtttctctccaagggggtctacaagacctacaccgaggaaaatctccgctactcccagaccgtggccctggacatgtacaaggaagtcaacaccggcaccaacctgccggcccagatcgacatccaggctgtggacggcgattactacaagttcctcttcatggccaaaggggggggctccgccaacaagaccatgctctaccaggagaccaaggcactccttaccccggacagcctgctcaagttcctggtgggcaagatgaagtacctgggaaccgccgcctgcccgccgtaccacatcgccgtcgtggtcggcggtacctcggccgacgcctgcatgaaggcggtcaagctcgcctccgccaagtaccttgacgccctccccaccacggggaacgagcacggccgggccttccgcgacgtggaactggaggagaagcttctccaagaggcctacaagctcggcatcggcgcccagttcggcggcaagtacttcgcccatgacgtacgggtcatccggcttccccgccacggcgcctcctgccccgtggggatggcggtctcctgttccgccgaccgcaacatcaaggccaagatcacccaaaacggcctcttcgtcgaggaactggaccgcaatccgagccgactcattcccgagcagtaccgcggcaagcatgagcacggggtcaagatcgacctgaaccgccccatgaaggagatcctggccgaactgagcaagcacccggtttccacgccgctgctgctgaatggcaccatcgtggtggggcgcgacatcgcccacgccaagttcaaagagattctcgacagcggcaaaccgctccccgactatctcaagaatcatccgatctactacgccggaccggccaagaccccggctggcaagccttccggctccttcggccccaccactgccggccgcatggactcctacgtggatcttctccaggcgaacggcggctccatgatcatgatcgccaaggggaaccggagccagcaggtgaccgatgcctgcaagaagcacggcggcttctacctgggctccatcggcggccctgccgcggtcctggccgaggagaacatcaagaaggtcgagtgcatcgacttccccgaactggggatggaagcggtctggaagatcgaggtcgagaacttcccggccttcatcctggtggatgacaaggggaatgacttcttcaagcagttgggtctgtag

SEQ ID NO: 44371 - protein, 541 aa, Geobacter metallireducens GS-15
MSTKPFVYQEPFPLEKDETSYYKIPDSEKYVSVATFEGKEVLKVDPEALTVLANTAMRDVSFLLRPEHNESVAKILRDPEASQNDKGVALAFLRNAEIAANFELPLCQDTGTATVVAKKGQQVWTGGKDEEFLSKGVYKTYTEENLRYSQTVALDMYKEVNTGTNLPAQIDIQAVDGDYYKFLFMAKGGGSANKTMLYQETKALLTPDSLLKFLVGKMKYLGTAACPPYHIAVVVGGTSADACMKAVKLASAKYLDALPTTGNEHGRAFRDVELEEKLLQEAYKLGIGAQFGGKYFAHDVRVIRLPRHGASCPVGMAVSCSADRNIKAKITQNGLFVEELDRNPSRLIPEQYRGKHEHGVKIDLNRPMKEILAELSKHPVSTPLLLNGTIVVGRDIAHAKFKEILDSGKPLPDYLKNHPIYYAGPAKTPAGKPSGSFGPTTAGRMDSYVDLLQANGGSMIMIAKGNRSQQVTDACKKHGGFYLGSIGGPAAVLAEENIKKVECIDFPELGMEAVWKIEVENFPAFILVDDKGNDFFKQLGL

SEQ ID NO: 44372 - DNA, 1524 bp, Novosphingobium aromaticivorans DSM 12444
  CDS (1)..(1524)
atggcggaaatggtgacgatcaaggaagcggacctgatcgaaagcgttgcggatgcgcttcaatacatcagctatttccacccgatggactacatccgcgcgctgggtgaggcctacaaggccgagcaggggccagcggccaaggacgccatcgcccagatcctcaccaacagccgcatgtgcgccgaagggcatcgcccgatctgccaggacaccggcatcgtcaacgtcttcatcgagtggggccaggactgccgcctcgaaagcgacctttcgttgcaggatgtggtcgatgagggcgtgcgccgtgcctacaacaatcccgacaacaagctgcgcgcgtcggttcttgccgatcccgcattcacccgccgcaacacccgcgacaacacgccctgtgtgctgcacgtggaaatggtcaagggcaacaaggtgacggtcgatgttgccgccaagggaggcgggtcggagaacaagtcgaagttcaagatgatgaaccccagcgattcgatcgtcgactgggtgatcgagatgctgccccagatgggcgccggctggtgcccgccgggcatgctcggcattggcatcggcggcaccgcggaacactgcgtgctgctcgccaagaaggcgctgatggagccgatcgatatggcccagctcaagcagcgcgggccgcagaccgacatcgaacgcctgcgcatcgagatcttcgacaaggtcaacgcgcttggcatcggcgcgcaggggctgggcgggctttccaccatcctcgacgtcaagatcatggacgcgccgtgccatgccgccggcaagccggtggcgatgatccccaattgcgcggcaacccgccatgcgcacttcacgctcgacgggtcggggccgaccttcctcgagcgacccaagctcgatgaatggccggaagtgcactgggcgccggactcggcggcaaggcgcgtcgatctcgatacgctgacgcaggaagaggtgcagagctggaaggcgggcgaccgcctgctcctgaacggcaagatgctgacgggccgcgatgccgcgcacaagcggatcaaggacatgctcgccaagggcgaggaactgcccgtcgatttcaagggccgcgtgatctactacgtcggcccggtcgatccggtgcgcgacgaagtcgtcggcccggccggccccaccacggccacccgcatggacagcttctccgacaccatgctcgacctcggcctgctcgccagcgtcggcaaggccgagcgtggccctgccgcgacccagtccatcgccaaccacaagagcgcctatctgatggcggtgggcggagcggcctatcttgtcgcccgcgcgatcaaggaggcgaaggtcgtcggcttcgaggacctcggcatggaggcgatctacgaattcaccgtcgaggacatgccggtgaccgtggccgtcgattccgggggccagaacgttcaccagctcgcgccgctggtgtggaagaagaagatcgccgaggaacacctccttccggcctga

SEQ ID NO: 44373 - protein, 507 aa, Novosphingobium aromaticivorans DSM 12444
MAEMVTIKEADLIESVADALQYISYFHPMDYIRALGEAYKAEQGPAAKDAIAQILTNSRMCAEGHRPICQDTGIVNVFIEWGQDCRLESDLSLQDVVDEGVRRAYNNPDNKLRASVLADPAFTRRNTRDNTPCVLHVEMVKGNKVTVDVAAKGGGSENKSKFKMMNPSDSIVDWVIEMLPQMGAGWCPPGMLGIGIGGTAEHCVLLAKKALMEPIDMAQLKQRGPQTDIERLRIEIFDKVNALGIGAQGLGGLSTILDVKIMDAPCHAAGKPVAMIPNCAATRHAHFTLDGSGPTFLERPKLDEWPEVHWAPDSAARRVDLDTLTQEEVQSWKAGDRLLLNGKMLTGRDAAHKRIKDMLAKGEELPVDFKGRVIYYVGPVDPVRDEVVGPAGPTTATRMDSFSDTMLDLGLLASVGKAERGPAATQSIANHKSAYLMAVGGAAYLVARAIKEAKVVGFEDLGMEAIYEFTVEDMPVTVAVDSGGQNVHQLAPLVWKKKIAEEHLLPA

SEQ ID NO: 44374 - DNA, 1605 bp, Cytophaga hutchinsonii
  CDS (1)..(1605)
atgcctgaatttaattatcaaaaagcgtttcctctaaagaaagaccctacgccgtataaattgatcagtacggattatgtttcaaccattgaagttgatggccgtaaaattcttaaaattgatcccaaagcactggaattagtggcggagaaagcattggctgatgtatcattttatctgcgctcctcgcatttagaaaaacttgcaaaaattattaaagatccggaagcaacggataacgatcgtttcgtagcatataccttattgcagaatgcatctactgccggtgaaggtaagctcccttcctgccaggatacaggtactgccattgtaatggggaaaaaaggtgaaaacgtttggacaggtgctaatgatgaagaagctttgtcaaaaggaatttacaatacatatcaggaaaaaaatctgcgttactctcaggtagtgccgatcacgatgttcgaagaaaaaaattccggcacaaacctgcctgctcagattgacatttatgccgaacagggaaacgaatataagtttttgtttatggcaaagggcggaggctctgcaaacaaaacatatttgtatcagcaaacgaaagcgttactgaatgaaaacagtttagccgagtttgttaaaaataaaatcaaagacctgggtacgtctgcctgccctccatatcacctggcattagtgattggcggtacatcggccgaagcgaacctgaaagctgttaaattggcatcagcaggttattacgatgaacttccaacagaaggtaacatgggcggacaggcattccgtgatcttgaatgggaagagaaagtacaattgatctgccaggagagtttgatcggtgcgcagtttggcggtaaatattttacacacgatgtaaaagtgatccgtttaccacgtcacgcggcgtcttgtccggttggtattggtgtaagctgttctgctgatcgaaacatcaaagcaaaaattacggaagaaggtattttcatcgaagcattggagaccaatccggagaaatttttaccggcacaggcgccacatctggaaaaggctgtagaagttgatctgaatcagccgatggcagatgtattgaaactgctttctcagtatccgattaaaacccgtttgaaattaaaaggcacattaatcgttgcgcgtgatattgcacacgcgaagatcaaagaattgcttgatgcaggaaaaccaatgccggagtatttcaaaaatcatccggtatattatgccggcccggcgaaaacaccggaaggtatgccatccggaagctttggtccgacaacagccggccgtatggattcctatgtgaatttattccagagccagggcggctccatgatcatgcttgcaaaaggaaaccgttctaaagcagtaacagatgcatgcaaagaattcggtgggttctatctgggctctatcggcggaccagcagcgatattagcaaaagaaaatattaaatcggttgaagtagttgacttcgaagagttgggtatggaagccgtacgtaagattgaagtcgttgattttccggctttcattatttgcgatgataagggaaatgacttcttcgcgaatctgtaa

SEQ ID NO: 44375 - protein, 534 aa, Cytophaga hutchinsonii
MPEFNYQKAFPLKKDPTPYKLISTDYVSTIEVDGRKILKIDPKALELVAEKALADVSFYLRSSHLEKLAKIIKDPEATDNDRFVAYTLLQNASTAGEGKLPSCQDTGTAIVMGKKGENVWTGANDEEALSKGIYNTYQEKNLRYSQVVPITMFEEKNSGTNLPAQIDIYAEQGNEYKFLFMAKGGGSANKTYLYQQTKALLNENSLAEFVKNKIKDLGTSACPPYHLALVIGGTSAEANLKAVKLASAGYYDELPTEGNMGGQAFRDLEWEEKVQLICQESLIGAQFGGKYFTHDVKVIRLPRHAASCPVGIGVSCSADRNIKAKITEEGIFIEALETNPEKFLPAQAPHLEKAVEVDLNQPMADVLKLLSQYPIKTRLKLKGTLIVARDIAHAKIKELLDAGKPMPEYFKNHPVYYAGPAKTPEGMPSGSFGPTTAGRMDSYVNLFQSQGGSMIMLAKGNRSKAVTDACKEFGGFYLGSIGGPAAILAKENIKSVEVVDFEELGMEAVRKIEVVDFPAFIICDDKGNDFFANL

SEQ ID NO: 44376 - DNA, 1554 bp, Polaromonas sp. JS666
  CDS (1)..(1554)
atgacgaccatcatcaaacaagccgacctgattgaatccgttgccgccgccctgcagtacatcagctactaccaccccaccgactacatcgcccatctggcccgtgcctacgagcgcgagcaaagcccggcggccaaggatgccattgcgcaaatcctgaccaacagcaagatgagcgccacgggccagcggccaatctgccaggacaccggcatcgtcaacgtgtttttgaaggtcggcatggacgtgcgctgggaaggctttaccggcagcatcgacgacgccatcaacgaaggcgtgcgccgcggctacaaccaccccgacaacacgctgcgcgcctccgtggtggccgatccgcagttcgaccgcaagaacaccaaggacaatacgcccgccgtgatctttacagagctggtgaccggcaacacggttgaagtcacggtggcagccaaaggcggcggcagtgaaaacaagagcaagatggtgatgctcaaccccggcgactcggtggtcgactgggtgctcaaaaccgtgcccaccatgggcgccggctggtgcccgcccggcatgctgggcatcggcattggcggcaccgctgaaaaagccgtgctgatggccaaggaaagcctgatggacgacctggacatgtacgagctgcaggccaagtcgtctgcgggtgccaaactgaccaaaaccgaagagctgcgcctcgaactgttcgagaaagtcaacgcgctcggcattggcgcgcagggcctgggtggtctcaccaccgtgctcgacatcaagatcaagatgtacccgacgcacgcggccagcaagcctgtcgccatgatcccgaactgcgcggccacgcgccatgcacactttgtgctcgacggcaacggcccggtctacctggacccgccttcgctggacctctggcccaatgtgaactgggagcccgactacaacaagagcaaaaaggtcaacctcaacaccctgaccaaggcagaagtcgccagctggaagcccggcgacaccctgctgctcaatggcaagatgctgaccggtcgcgacgccgcgcacaaacgcattgccgacatgctgctcaagggtgaaaagctgccggtcgacttcaccaaccgcgtgatctactacgtcggcccggtggacccggtcaagggcgaggccgttggcccggccggcccaaccaccgcgacccgcatggacggcttcaccgaaatgatgctggcgcaaaccggcttgatctcgatggtgggcaaggccgagcgcggccccgtcgcgattgaggccatcaagaagcaccagagcgcttacctgatggccgtgggcggcgccgcctacctggtatccaaagccatcaagcacgccgaagtggtgggctttgccgacctgggcatggaagccatttacgagttcgacgtggtggacatgccggtgacggtggcggtggatgccggcggcaccagcgcgcacatcaccggcccggccgagtggcagaaaaaaattgccacgggcgagttcaagcaaatcccggtcaccagcgcttga

SEQ ID NO: 44377 - protein, 517 aa, Polaromonas sp. JS666
MTTIIKQADLIESVAAALQYISYYHPTDYIAHLARAYEREQSPAAKDAIAQILTNSKMSATGQRPICQDTGIVNVFLKVGMDVRWEGFTGSIDDAINEGVRRGYNHPDNTLRASVVADPQFDRKNTKDNTPAVIFTELVTGNTVEVTVAAKGGGSENKSKMVMLNPGDSVVDWVLKTVPTMGAGWCPPGMLGIGIGGTAEKAVLMAKESLMDDLDMYELQAKSSAGAKLTKTEELRLELFEKVNALGIGAQGLGGLTTVLDIKIKMYPTHAASKPVAMIPNCAATRHAHFVLDGNGPVYLDPPSLDLWPNVNWEPDYNKSKKVNLNTLTKAEVASWKPGDTLLLNGKMLTGRDAAHKRIADMLLKGEKLPVDFTNRVIYYVGPVDPVKGEAVGPAGPTTATRMDGFTEMMLAQTGLISMVGKAERGPVAIEAIKKHQSAYLMAVGGAAYLVSKAIKHAEVVGFADLGMEAIYEFDVVDMPVTVAVDAGGTSAHITGPAEWQKKIATGEFKQIPVTSA

SEQ ID NO: 44378 - DNA, 1698 bp, Schistosoma japonicum
  CDS (1)..(1698)
atgttggctcaaggtatatttgcgcacatctgctgtcggcttttacggcggaatttgggatcacaggcggtgaaaccttttttttatcaagatatattgcagttggataaacctccgtatgcagagacaccatttcgaaagctaacgggtgatttcgtttctctcaaaaaaattgatgacaaagaaattttgaaaattgattctaaggcactgattttgttgagtcagcaagccatgatagatgtcgctcatcttttaagacctgcacacctacaatctctttctaacatcctgagggatcctgaagcatctaacaacgataagtttgttgcacttgagcttttgaaaaatgcaaatgtggctgctggaatggttctacctggttgtcaggatactggcaccgctatatgcatggcgaaaaagggccagtttgtctggacagatgggaatgacgctgaagctatctcgcaaggtatatataacacatatacttctagttatcttcgttactcccaagttgcggcacttgatatgtttacggaaaaaaatactggtactaacctgccagcacaaattgaaatatattcaactggtggtaacgaatatagctttttgtttattgctaagggtggagggtcagcgaataaaactttcctgtatcaacagacaaaagctcttctcaatcccactagtctatattcatttgttaatgaaaaaattaaaaccttaggaactgcagcttgtcccccttatcacttggctgttgtcgttggtgggacgtcagctgaatttactctgaaaactgtgaagcttgcatcatgcaagtatttggatcaccttccatcgactggtaatgaacatggaagagcttttcgtgaccgggaagctgaagaaaaaatattacatttaactcagaaggttgggatcggagcacagttcggaggaaaatacttctgtcatgatgtacgagtaatccgcttgcctaggcatggtgcatcatgtcctgttggtattggtgtctcttgttctgcagacagacagattctggggagaataactaacgatggagtttttcttgaacagttagagactgatccatctcaatatttacctgacccttctttaaatcaactcccaacagatgttgtcaaagtgaatctcaatcttccaatgaaagaaattctagctgaactttctaagtatccaatcaaaactcgtttgtcactgactggaactttagtcgttgcacgtgatatcgcacatgcaaagattaaggaacgtcttgattctggtcaaccaatgcctgactatttttgtaatcacccggtatattacgctggcccagctaaaacacctatgaattatgctagtggatcttttggacctaccacggctggtcgcatggattcttatgttggtcaattccagcaggctgggggtagtttgattatgctagctaaaggtaacagatcaaaagctgtaacaaatgcttgcagaaaacatggtggattctatctaggttcgatcggcggtccagctgcaatccttgctcagaattgtataaagaaagttgaagtactcgagtatccggaattaggaatggaggctatctggcgtgttgaagttgaggattttcctgcttttatagttgtcgatgataaaggcaatgacttctttaaggaatggcaagtagaataa

SEQ ID NO: 44379 - protein, 565 aa, Schistosoma japonicum
MLAQGIFAHICCRLLRRNLGSQAVKPFFYQDILQLDKPPYAETPFRKLTGDFVSLKKIDDKEILKIDSKALILLSQQAMIDVAHLLRPAHLQSLSNILRDPEASNNDKFVALELLKNANVAAGMVLPGCQDTGTAICMAKKGQFVWTDGNDAEAISQGIYNTYTSSYLRYSQVAALDMFTEKNTGTNLPAQIEIYSTGGNEYSFLFIAKGGGSANKTFLYQQTKALLNPTSLYSFVNEKIKTLGTAACPPYHLAVVVGGTSAEFTLKTVKLASCKYLDHLPSTGNEHGRAFRDREAEEKILHLTQKVGIGAQFGGKYFCHDVRVIRLPRHGASCPVGIGVSCSADRQILGRITNDGVFLEQLETDPSQYLPDPSLNQLPTDVVKVNLNLPMKEILAELSKYPIKTRLSLTGTLVVARDIAHAKIKERLDSGQPMPDYFCNHPVYYAGPAKTPMNYASGSFGPTTAGRMDSYVGQFQQAGGSLIMLAKGNRSKAVTNACRKHGGFYLGSIGGPAAILAQNCIKKVEVLEYPELGMEAIWRVEVEDFPAFIVVDDKGNDFFKEWQVE

SEQ ID NO: 44380 - DNA, 1545 bp, Rhizobium loti
  CDS (1)..(1545): transl_table=11
gtgggcagtagaacacggaccatcgccggcaaggacatcataaggagcgtggccgacgcccttcagtacatctcgtactaccatcctccagattacatccgctctctttcgcaagcgtacgcgcgcgaacagagcccagcggcaaaaaacgcaatagggcagattctgctgaactcccgcatggcggccttcgggcggcggccgatctgccaggacaccggccttgtggtggtcttcgcaaaagtcggcatggacgcccggatcaaatcaacggccagtttcgcagagctcgtgaatgaaggcgtccgtcaggcctatctcgacccggacaacccccttcgggcatcgatcgttgccgatccgctcgccggacgagtcaatactcgtgacaacacgccggcggtcgtccacgtcgaccttgtactaggtaaccagattgacatcaccattgccgcaaaaggcggcgggtcagagaacaaggcacgttttaccaccttgaaccccagcgcctccgtttccgactgggtggttgacacagtcgcgacgcttggcagtgggtggtgtccacccggcctgatctcgattggcatcggtggcagcgctgaaaaggcgatgctgctggccaaggaggccatgaaccagcccatcgatatggcggaattgattgccaggcggccttcaagcgcggaagaggcactgcggattgaactttatgaccggattaacgcactgggcatcggcgcccaaggccttggtggcctgacgacagtcgtcgacgtcaaggttgcgacctatcctactcatgccgcgtccaagcccgtggcgctcattccgcaatgcgccgccaaccggcacctgaagtttaccttggatggctctggaccaatcatgctggagccgcccgatttgcgcgaatggcccgacattggaacggacgaattgagtccagccggcgtacgaagagtgaacctcgatgcgctgaccaaggaacagacggcgtcgtggcgttgcggggaaacgctccttttgtccggaaaaatgctgacgggccgtgacgccgcccacaagcgaatggtcgagttgatcgacgccggcaagccgcttccgttcgatctgcaggggcgcgtaatctactacgttggacccgtccgcgccgtgagagatgaggtcgtcggaccggccggcccaacaacgtccagccgcttggacgattttacggacaaggtgctcgccgaaaccgggcttttcgcgatggtaggcaaagcggagagaggacgggcggccatcgagtcgattgtaaggcacaaaacgccgtatctcatcgcagtgggtggggctgcctacctgatatcaaaatcaatcaagtcagcgcggctcattgccttcgaagacctgggcatggaagcagtctatgaattcgaggtgcaggatatgcctgtcatcatggctgtcgatgttgagggaaactcaattcacaattctgggcctcttgagtggcgcaagcgcatggcggcggacagcatcgcacgcaacatcggcgtttga

SEQ ID NO: 44381 - protein, 514 aa, Rhizobium loti
MGSRTRTIAGKDIIRSVADALQYISYYHPPDYIRSLSQAYAREQSPAAKNAIGQILLNSRMAAFGRRPICQDTGLVVVFAKVGMDARIKSTASFAELVNEGVRQAYLDPDNPLRASIVADPLAGRVNTRDNTPAVVHVDLVLGNQIDITIAAKGGGSENKARFTTLNPSASVSDWVVDTVATLGSGWCPPGLISIGIGGSAEKAMLLAKEAMNQPIDMAELIARRPSSAEEALRIELYDRINALGIGAQGLGGLTTVVDVKVATYPTHAASKPVALIPQCAANRHLKFTLDGSGPIMLEPPDLREWPDIGTDELSPAGVRRVNLDALTKEQTASWRCGETLLLSGKMLTGRDAAHKRMVELIDAGKPLPFDLQGRVIYYVGPVRAVRDEVVGPAGPTTSSRLDDFTDKVLAETGLFAMVGKAERGRAAIESIVRHKTPYLIAVGGAAYLISKSIKSARLIAFEDLGMEAVYEFEVQDMPVIMAVDVEGNSIHNSGPLEWRKRMAADSIARNIGV

SEQ ID NO: 44382 - DNA, 1545 bp, Bacillus stearothermophilus
  CDS (1)..(1545): transl_table=11
atggaaaaattatatgagagtatgtatcaattaattgtggaaacgtctacaaaattgccgaaggatgtccgccgcgctattttgaaggcgaagcagcgtgaaaatgctggtacaagagctgcgatgtcgcttgccacgataaccgaaaatattaaaatggcagatgaaaatgtatcgccgatctgccaagataccggattgccgacatttaaaattaaagtgccagtcggtatcaatcaaattcaaataaaggaaacaataaaaaaagcgatcgctcaagcgacgaaggacgggaagcttcgcccgaactcggtcgattcactcactggagaaaattccggcgataacttgggcgaagggcttccagtcgtaaaatttgaacaatgggaaaaagattatatggatgttcgcttaatattaaaaggcggcggctgcgaaaacaaaaatattcaatacagcctgccgtgcgaactagaaggattgggaagagccggcagagatttggatggaatccgcaaatgtattttgcatgcggtatatcaagcacagggccaaggatgcagcgcaggattcattggagttggaatcggtggagaccgttcagcggggtacgatttagcgaaagaacaattattccgcgaagtcgatgacgtaaatccgaacgaagaattgcggcaattggaagaatatattatggaaaatgcaaacaagcttggcattggaacgatgggatttggcggggaaaccactttattaggctgcaaagtcggcgcaatgcacagaattcctgcgagcttttttgtttctgtcgcatacaactgctgggcattccgccgtttaggtgtgcatatcgatccaaatacgggtgaaatcataaaatggctttatcaagatggagaagatgttgattttcaagaaaatgctgcacaagaagaacatttagcatcaacggactctgaaagacgtgtcatcacgctgcaagcgccaattacagaagaacaaatccgcgagctgaaagtcggcgacgttgttcgcatcaacggaatcatttacacaggaagggatgccatccataaatatttaatggatcatgatgcgccggttgatttaaacggtcaaattatttaccactgcggacctgtcatgttaaaagatgaaaacggcaattgggaagtgaaagcggccgggccgaccacttccattcgcgaagagccttatcaaggggatattatgaaaaaatttggcatccgtgcggtaatgggcaaaggcggcatggggcaaaaaacgctgcaagctttaaaagagcatggcggagtatacttgaatgcgattggcggtgctgctcaatattatgcggattgcatcgaagcggttgaaggtgttgacttgctggagtttggaattccagaagctatgtggcatttgcgcgtaaaagacttcacggccgttgtcacaatggattcacacggcaacagcctgcatgaagacattgaaaaatcgtcattagaaaagctttctcaatttaaagagccggtatttagctaa

SEQ ID NO: 44383 - protein, 514 aa, Bacillus stearothermophilus
MEKLYESMYQLIVETSTKLPKDVRRAILKAKQRENAGTRAAMSLATITENIKMADENVSPICQDTGLPTFKIKVPVGINQIQIKETIKKAIAQATKDGKLRPNSVDSLTGENSGDNLGEGLPVVKFEQWEKDYMDVRLILKGGGCENKNIQYSLPCELEGLGRAGRDLDGIRKCILHAVYQAQGQGCSAGFIGVGIGGDRSAGYDLAKEQLFREVDDVNPNEELRQLEEYIMENANKLGIGTMGFGGETTLLGCKVGAMHRIPASFFVSVAYNCWAFRRLGVHIDPNTGEIIKWLYQDGEDVDFQENAAQEEHLASTDSERRVITLQAPITEEQIRELKVGDVVRINGIIYTGRDAIHKYLMDHDAPVDLNGQIIYHCGPVMLKDENGNWEVKAAGPTTSIREEPYQGDIMKKFGIRAVMGKGGMGQKTLQALKEHGGVYLNAIGGAAQYYADCIEAVEGVDLLEFGIPEAMWHLRVKDFTAVVTMDSHGNSLHEDIEKSSLEKLSQFKEPVFS

SEQ ID NO: 44384 - DNA, 25 bp, Artificial sequence
  Primer sequence
atgtcaaacaaaccctttatctacc

SEQ ID NO: 44385 - DNA, 22 bp, Artificial sequence
  Primer sequence
ttacttagtgcagttcgcgcac

SEQ ID NO: 44386 - protein, 520 aa, Artificial sequence
  Consensus
  Variant (2)..(10): Xaa in position 2 to 10 is any amino acid
  Variant (12)..(18): Xaa in position 12 to 18 is any amino acid
  Variant (20)..(35): Xaa in position 20 to 35 is any amino acid
  Variant (36)..(44): Xaa in position 36 to 44 is any or no amino acid
  Variant (46)..(46): Xaa in position 46 is any amino acid
  Variant (48)..(51): Xaa in position 48 to 51 is any amino acid
  Variant (53)..(56): Xaa in position 53 to 56 is any amino acid
  Variant (58)..(58): Xaa in position 58 is any amino acid
  Variant (64)..(71): Xaa in position 64 to 71 is any amino acid
  Variant (73)..(74): Xaa in position 73 to 74 is any amino acid
  Variant (76)..(86): Xaa in position 76 to 86 is any amino acid
  Variant (87)..(94): Xaa in position 87 to 94 is any or no amino acid
  Variant (96)..(99): Xaa in position 96 to 99 is any amino acid
  Variant (101)..(119): Xaa in position 101 to 119 is any amino acid
  Variant (120)..(120): Xaa in position 120 is any or no amino acid
  Variant (123)..(124): Xaa in position 123 to 124 is any amino acid
  Variant (126)..(126): Xaa in position 126 is any amino acid
  Variant (129)..(136): Xaa in position 129 to 136 is any amino acid
  Variant (138)..(144): Xaa in position 138 to 144 is any amino acid
  Variant (145)..(149): Xaa in position 145 to 149 is any or no amino acid
  Variant (156)..(156): Xaa in position 156 is any amino acid
  Variant (159)..(181): Xaa in position 159 to 181 is any amino acid
  Variant (182)..(192): Xaa in position 182 to 192 is any or no amino acid
  Variant (194)..(196): Xaa in position 194 to 196 is any amino acid
  Variant (200)..(205): Xaa in position 200 to 205 is any amino acid
  Variant (209)..(236): Xaa in position 209 to 236 is any amino acid
  Variant (237)..(245): Xaa in position 237 to 245 is any or no amino acid
  Variant (247)..(256): Xaa in position 247 to 256 is any amino acid
  Variant (263)..(264): Xaa in position 263 to 264 is any amino acid
  Variant (267)..(271): Xaa in position 267 to 271 is any amino acid
  Variant (273)..(278): Xaa in position 273 to 278 is any amino acid
  Variant (280)..(280): Xaa in position 280 is any amino acid
  Variant (282)..(282): Xaa in position 282 is any amino acid
  Variant (285)..(285): Xaa in position 285 is any amino acid
  Variant (288)..(292): Xaa in position 288 to 292 is any amino acid
  Variant (294)..(294): Xaa in position 294 is any amino acid
  Variant (296)..(296): Xaa in position 296 is any amino acid
  Variant (298)..(306): Xaa in position 298 to 306 is any amino acid
  Variant (308)..(309): Xaa in position 308 to 309 is any amino acid
  Variant (310)..(314): Xaa in position 310 to 314 is any or no amino acid
  Variant (316)..(323): Xaa in position 316 to 323 is any amino acid
  Variant (325)..(334): Xaa in position 325 to 334 is any amino acid
  Variant (335)..(345): Xaa in position 335 to 345 is any or no amino acid
  Variant (347)..(364): Xaa in position 347 to 364 is any amino acid
  Variant (365)..(367): Xaa in position 365 to 367 is any or no amino acid
  Variant (369)..(369): Xaa in position 369 is any amino acid
  Variant (371)..(374): Xaa in position 371 to 374 is any amino acid
  Variant (378)..(378): Xaa in position 378 is any amino acid
  Variant (381)..(396): Xaa in position 381 to 396 is any amino acid
  Variant (397)..(403): Xaa in position 397 to 403 is any or no amino acid
  Variant (407)..(407): Xaa in position 407 is any amino acid
  Variant (410)..(418): Xaa in position 410 to 418 is any amino acid
  Variant (419)..(421): Xaa in position 419 to 421 is any or no amino acid
  Variant (423)..(424): Xaa in position 423 to 424 is any amino acid
  Variant (429)..(430): Xaa in position 429 to 430 is any amino acid
  Variant (434)..(443): Xaa in position 434 to 443 is any amino acid
  Variant (445)..(447): Xaa in position 445 to 447 is any amino acid
  Variant (449)..(450): Xaa in position 449 to 450 is any amino acid
  Variant (452)..(453): Xaa in position 452 to 453 is any amino acid
  Variant (455)..(468): Xaa in position 455 to 468 is any amino acid
  Variant (471)..(473): Xaa in position 471 to 473 is any amino acid
  Variant (476)..(476): Xaa in position 476 is any or no amino acid
  Variant (479)..(479): Xaa in position 479 is any amino acid
  Variant (481)..(484): Xaa in position 481 to 484 is any amino acid
  Variant (486)..(495): Xaa in position 486 to 495 is any amino acid
  Variant (499)..(499): Xaa in position 499 is any or no amino acid
  Variant (502)..(506): Xaa in position 502 to 506 is any amino acid
  Variant (508)..(508): Xaa in position 508 is any amino acid
  Variant (510)..(510): Xaa in position 510 is any amino acid
  Variant (512)..(515): Xaa in position 512 to 515 is any amino acid
  Variant (518)..(519): Xaa in position 518 to 519 is any amino acid
LXXXXXXXXXDXXXXXXXAXXXXXXXXXXXXXXXXXXXXXXXXXLXNXXXXAXXXXPXCQDTGXXXXXXXXGXXVXXXXXXXXXXXXXXXXXXXGXXXXYXXXXXXXXXXXXXXXXXXXXNTXXNXPAXXXXXXXXGXXXXXXXXXXXXAKGGGSXNKXXXXXXXXXXXXXXXXXXXXXXXXXXXXXXXXXXGXXXCPPXXXXXXIGGXXXXXXXXXXXXXXXXXXXXXXXXXXXXXXXXXXXXXLXXXXXXXXXXLGIGAQXXGGXXXXXDXXXXXXPXHXASXPVXXXXXCXAXRXXXXXXXXXGXXXXXXXLXXXXXXXXPXXXXXXXXXXXXXXXXXXXXXLXXXXXXXXXXXXXXXXXXXXXLXGXXXXGRDXAHXXXXXXXXXXXXXXXXXXXXXXXIYYXGPXXXXXXXXXXXXGXXGPTTXXRMDXXXXXXXXXXGXXXMXXKXXRXXXXXXXXXXXXXXYLXXXGGXAAXLXXXXIXXXXXXXXXXLGMXEAXXXXXVXDXPXXXXVDXXG

SEQ ID NO: 44387 - protein, 109 aa, Artificial sequence
  Consensus
  Variant (1)..(1): Xaa in position 1 is Met, Ile, Val, Leu or Thr
  Variant (2)..(2): Xaa in position 2 is any amino acid
  Variant (3)..(3): Xaa in position 3 is Ala, Asp, Gly or Val
  Variant (4)..(7): Xaa in position 4 to 7 is any amino acid
  Variant (8)..(8): Xaa in position 8 is Pro or Ala
  Variant (9)..(9): Xaa in position 9 is any amino acid
  Variant (15)..(34): Xaa in position 15 to 34 is any amino acid
  Variant (35)..(42): Xaa in position 35 to 42 is any or no amino acid
  Variant (43)..(43): Xaa in position 43 is Ile, Leu, Val or Cys
  Variant (44)..(45): Xaa in position 44 to 45 is any amino acid
  Variant (46)..(46): Xaa in position 46 is Gly or Ala
  Variant (47)..(47): Xaa in position 47 is Val, Ile, Thr, Ala or Leu
  Variant (48)..(50): Xaa in position 48 to 50 is any amino acid
  Variant (51)..(51): Xaa in position 51 is Tyr, Thr, Phe or Trp
  Variant (52)..(70): Xaa in position 52 to 70 is any amino acid
  Variant (71)..(71): Xaa in position 71 is any or no amino acid
  Variant (73)..(73): Xaa in position 73 is Thr, Leu or Ser
  Variant (74)..(75): Xaa in position 74 to 75 is any amino acid
  Variant (76)..(76): Xaa in position 76 is Asn, Gly or His
  Variant (77)..(77): Xaa in position 77 is any amino acid
  Variant (79)..(96): Xaa in position 79 to 96 is any amino acid
  Variant (97)..(101): Xaa in position 97 to 101 is any or no amino acid
  Variant (106)..(106): Xaa in position 106 is Ser or Cys
  Variant (107)..(108): Xaa in position 107 to 108 is any amino acid
XXXXXXXXXCQDTGXXXXXXXXXXXXXXXXXXXXXXXXXXXXXXXXXXXXXXXXXXXXXXXXXXXXXXXXXNXXXXXPXXXXXXXXXXXXXXXXXXXXXXXKGGGXXXK

SEQ ID NO: 44388 - protein, 28 aa, Artificial sequence
  Consensus
  Variant (1)..(1): Xaa in position 1 is Ile, Leu, Val, Met or Phe
  Variant (2)..(3): Xaa in position 2 to 3 is any amino acid
  Variant (4)..(4): Xaa in position 4 is Trp, Phe or Tyr
  Variant (5)..(5): Xaa in position 5 is Val, Leu or Ile
  Variant (6)..(8): Xaa in position 6 to 8 is any amino acid
  Variant (9)..(9): Xaa in position 9 is Val, Met, Ile or Leu
  Variant (10)..(11): Xaa in position 10 to 11 is any amino acid
  Variant (12)..(12): Xaa in position 12 is Met or Leu
  Variant (14)..(14): Xaa in position 14 is Ala, Thr or Ser
  Variant (15)..(15): Xaa in position 15 is Gly, Ala or Ser
  Variant (16)..(16): Xaa in position 16 is any amino acid
  Variant (20)..(21): Xaa in position 20 to 21 is any amino acid
  Variant (22)..(22): Xaa in position 22 is Leu or Ile
  Variant (23)..(23): Xaa in position 23 is Gly, Ala or Ser
  Variant (24)..(24): Xaa in position 24 is Ile, Val, Phe or Leu
  Variant (25)..(25): Xaa in position 25 is any amino acid
  Variant (26)..(26): Xaa in position 26 is Ile or Val
XXXXXXXXXXXXGXXXCPPXXXXXXXGG

SEQ ID NO: 44389 - protein, 58 aa, Artificial sequence
  Consensus
  Variant (1)..(1): Xaa in position 1 is Leu, Met, Phe or Ile
  Variant (2)..(2): Xaa in position 2 is Arg or Glu
  Variant (3)..(4): Xaa in position 3 to 4 is any amino acid
  Variant (5)..(5): Xaa in position 5 is Leu, Ile or Val
  Variant (6)..(9): Xaa in position 6 to 9 is any amino acid
  Variant (10)..(10): Xaa in position 10 is Asn, Gln or Arg
  Variant (11)..(11): Xaa in position 11 is any amino acid
  Variant (12)..(12): Xaa in position 12 is Leu, Ile, Phe, Met or Val
  Variant (13)..(13): Xaa in position 13 is Gly or Asn
  Variant (14)..(14): Xaa in position 14 is Ile, Leu or Val
  Variant (16)..(16): Xaa in position 16 is Ala or Thr
  Variant (17)..(17): Xaa in position 17 is Gln or Met
  Variant (18)..(18): Xaa in position 18 is any or no amino acid
  Variant (19)..(19): Xaa in position 19 is Leu, Phe or Val
  Variant (20)..(20): Xaa in position 20 is Gly or Ala
  Variant (22)..(26): Xaa in position 22 to 26 is any amino acid
  Variant (28)..(28): Xaa in position 28 is Val or Ile
  Variant (29)..(29): Xaa in position 29 is Lys or Arg
  Variant (30)..(30): Xaa in position 30 is Ile, Val or Leu
  Variant (31)..(33): Xaa in position 31 to 33 is any amino acid
  Variant (35)..(35): Xaa in position 35 is any amino acid
  Variant (37)..(37): Xaa in position 37 is Ala or Gly
  Variant (38)..(38): Xaa in position 38 is Ala, Ser or Thr
  Variant (39)..(39): Xaa in position 39 is Ser, Asn or Gly
  Variant (40)..(40): Xaa in position 40 is any amino acid
  Variant (42)..(42): Xaa in position 42 is Val or Ile
  Variant (43)..(43): Xaa in position 43 is any amino acid
  Variant (44)..(44): Xaa in position 44 is Met, Leu, Ile or Val
  Variant (45)..(46): Xaa in position 45 to 46 is any amino acid
  Variant (47)..(47): Xaa in position 47 is Asn, Ser or Gln
  Variant (49)..(49): Xaa in position 49 is any amino acid
  Variant (50)..(50): Xaa in position 50 is Ala or Ser
  Variant (51)..(51): Xaa in position 51 is any amino acid
  Variant (53)..(57): Xaa in position 53 to 57 is any amino acid
  Variant (58)..(58): Xaa in position 58 is Leu or Ile
XXXXXXXXXXXXXXGXXXXXGXXXXXDXXXXXXPXHXXXXPXXXXXXCXXXRXXXXXX

SEQ ID NO: 44390 - protein, 89 aa, Artificial sequence
  Consensus
  Variant (1)..(1): Xaa in position 1 is Leu, Val, Ile or Phe
  Variant (2)..(2): Xaa in position 2 is any amino acid
  Variant (3)..(3): Xaa in position 3 is Leu, Ile, Met or Val
  Variant (4)..(4): Xaa in position 4 is any amino acid
  Variant (6)..(6): Xaa in position 6 is any amino acid
  Variant (7)..(7): Xaa in position 7 is Met, Ile or Leu
  Variant (8)..(9): Xaa in position 8 to 9 is any amino acid
  Variant (10)..(10): Xaa in position 10 is Gly or Ala
  Variant (13)..(13): Xaa in position 13 is any amino acid
  Variant (14)..(14): Xaa in position 14 is Ala, Ile or Phe
  Variant (16)..(16): Xaa in position 16 is any amino acid
  Variant (17)..(17): Xaa in position 17 is Arg, Lys, His or Tyr
  Variant (18)..(18): Xaa in position 18 is Ile, Leu, Met or Phe
  Variant (19)..(24): Xaa in position 19 to 24 is any or no amino acid
  Variant (25)..(25): Xaa in position 25 is Gly or Pro
  Variant (26)..(26): Xaa in position 26 is any amino acid
  Variant (27)..(28): Xaa in position 27 to 28 is any or no amino acid
  Variant (29)..(29): Xaa in position 29 is Pro, Cys or Asp
  Variant (30)..(38): Xaa in position 30 to 38 is any amino acid
  Variant (39)..(39): Xaa in position 39 is Ile or Val
  Variant (41)..(41): Xaa in position 41 is Tyr or His
  Variant (42)..(42): Xaa in position 42 is any amino acid
  Variant (45)..(53): Xaa in position 45 to 53 is any amino acid
  Variant (54)..(56): Xaa in position 54 to 56 is any or no amino acid
  Variant (57)..(57): Xaa in position 57 is Gly, Lys or Val
  Variant (58)..(59): Xaa in position 58 to 59 is any amino acid
  Variant (64)..(64): Xaa in position 64 is Ala, Ser or Gly
  Variant (65)..(65): Xaa in position 65 is any amino acid
  Variant (67)..(67): Xaa in position 67 is Met, Glu or Leu
  Variant (68)..(68): Xaa in position 68 is Asp or Glu
  Variant (69)..(69): Xaa in position 69 is any amino acid
  Variant (70)..(70): Xaa in position 70 is Phe or Tyr
  Variant (71)..(77): Xaa in position 71 to 77 is any amino acid
  Variant (78)..(78): Xaa in position 78 is any or no amino acid
  Variant (79)..(79): Xaa in position 79 is Gly, Asp or Ala
  Variant (80)..(82): Xaa in position 80 to 82 is any amino acid
  Variant (83)..(83): Xaa in position 83 is Met, Val or Ser
  Variant (84)..(84): Xaa in position 84 is Ile, Val, Leu or Met
  Variant (85)..(85): Xaa in position 85 is Gly or Ala
  Variant (87)..(88): Xaa in position 87 to 88 is any amino acid
  Variant (89)..(89): Xaa in position 89 is Arg or Met
XXXXGXXXXXRDXXHXXXXXXXXXXXXXXXXXXXXXXXXYXXGPXXXXXXXXXXXXXXXGPTTXXRXXXXXXXXXXXXXXXXXXXKXXX

SEQ ID NO: 44391 - protein, 60 aa, Artificial sequence
  Consensus
  Variant (1)..(1): Xaa in position 1 is Ala, Ser or Gly
  Variant (2)..(8): Xaa in position 2 to 8 is any amino acid
  Variant (10)..(10): Xaa in position 10 is Leu or Phe
  Variant (11)..(11): Xaa in position 11 is any amino acid
  Variant (12)..(12): Xaa in position 12 is Ala, Ser or Gly
  Variant (13)..(13): Xaa in position 13 is Val or Ile
  Variant (16)..(16): Xaa in position 16 is any or no amino acid
  Variant (17)..(17): Xaa in position 17 is Ala or Ser
  Variant (18)..(18): Xaa in position 18 is Ala or Gln
  Variant (19)..(19): Xaa in position 19 is any amino acid
  Variant (20)..(20): Xaa in position 20 is Leu or Tyr
  Variant (21)..(24): Xaa in position 21 to 24 is any amino acid
  Variant (25)..(25): Xaa in position 25 is Ile, Glu or Val
  Variant (26)..(26): Xaa in position 26 is Lys, Arg, Glu or Thr
  Variant (27)..(30): Xaa in position 27 to 30 is any amino acid
  Variant (31)..(31): Xaa in position 31 is Val, Leu, Ile or Asp
  Variant (32)..(32): Xaa in position 32 is any amino acid
  Variant (33)..(33): Xaa in position 33 is Phe, Tyr or Leu
  Variant (34)..(34): Xaa in position 34 is any amino acid
  Variant (35)..(35): Xaa in position 35 is Glu, Asp or Gln
  Variant (36)..(36): Xaa in position 36 is Leu, Phe or Met
  Variant (38)..(38): Xaa in position 38 is Met, Ile or Val
  Variant (39)..(39): Xaa in position 39 is any or no amino acid
  Variant (41)..(41): Xaa in position 41 is Ala or Ser
  Variant (42)..(42): Xaa in position 42 is Ile, Val or Met
  Variant (43)..(43): Xaa in position 43 is Tyr, Trp, His or Arg
  Variant (44)..(46): Xaa in position 44 to 46 is any amino acid
  Variant (47)..(47): Xaa in position 47 is Val, Ile or Ala
  Variant (48)..(50): Xaa in position 48 to 50 is any amino acid
  Variant (51)..(51): Xaa in position 51 is Pro, Lys, Thr or Ala
  Variant (52)..(53): Xaa in position 52 to 53 is any amino acid
  Variant (54)..(54): Xaa in position 54 is Val, Ile or Met
  Variant (55)..(55): Xaa in position 55 is any amino acid
  Variant (56)..(56): Xaa in position 56 is Val, Met, Ile or Cys
  Variant (58)..(59): Xaa in position 58 to 59 is any amino acid
XXXXXXXXYXXXXGGXXXXXXXXXXXXXXXXXXXXXGXXEXXXXXXXXXXXXXXXXDXXG

SEQ ID NO: 44392 - DNA, 2280 bp, Escherichia coli K12; identical to SEQ ID NO: 11018
  CDS (470)..(1951)

SEQ ID NO: 44393 - protein, 493 aa, Escherichia coli K12; identical to SEQ ID NO: 11019

SEQ ID NO: 44394 - DNA, 1770 bp, Arabidopsis thaliana; identical to SEQ ID NO: 11020
  CDS (84)..(1559)

SEQ ID NO: 44395 - protein, 491 aa, Arabidopsis thaliana; identical to SEQ ID NO: 11021

SEQ ID NO: 44396 - DNA, 1512 bp, Arabidopsis thaliana; identical to SEQ ID NO: 11022
  CDS (1)..(1479)

SEQ ID NO: 44397 - protein, 492 aa, Arabidopsis thaliana; identical to SEQ ID NO: 11023

SEQ ID NO: 44398 - DNA, 1500 bp, Arabidopsis thaliana; identical to SEQ ID NO: 11024
  CDS (1)..(1500)

SEQ ID NO: 44399 - protein, 499 aa, Arabidopsis thaliana; identical to SEQ ID NO: 11025

SEQ ID NO: 44400 - DNA, 1865 bp, Solanum tuberosum; identical to SEQ ID NO: 11026
  CDS (66)..(1547)

SEQ ID NO: 44401 - protein, 493 aa, Solanum tuberosum; identical to SEQ ID NO: 11027

SEQ ID NO: 44402 - DNA, 1616 bp, Arabidopsis thaliana; identical to SEQ ID NO: 11028
  CDS (44)..(1576)

SEQ ID NO: 44403 - protein, 510 aa, Arabidopsis thaliana; identical to SEQ ID NO: 11029

SEQ ID NO: 44404 - DNA, 1416 bp, Nostoc sp. PCC 7120; identical to SEQ ID NO: 11030
  CDS (1)..(1416)

SEQ ID NO: 44405 - protein, 471 aa, Nostoc sp. PCC 7120; identical to SEQ ID NO: 11031

SEQ ID NO: 44406 - DNA, 1437 bp, Salmonella enterica subsp. enterica serovar Typhi; identical to SEQ ID NO: 11032
  CDS (1)..(1437)

SEQ ID NO: 44407 - protein, 478 aa, Salmonella enterica subsp. enterica serovar Typhi; identical to SEQ ID NO: 11033

SEQ ID NO: 44408 - DNA, 1452 bp, Brucella melitensis; identical to SEQ ID NO: 11034
  CDS (1)..(1452)

SEQ ID NO: 44409 - protein, 483 aa, Brucella melitensis; identical to SEQ ID NO: 11035

SEQ ID NO: 44410 - DNA, 1416 bp, Bacillus halodurans; identical to SEQ ID NO: 11036
  CDS (1)..(1416)

SEQ ID NO: 44411 - protein, 471 aa, Bacillus halodurans; identical to SEQ ID NO: 11037

SEQ ID NO: 44412 - DNA, 1428 bp, Haemophilus influenzae; identical to SEQ ID NO: 11038
  CDS (1)..(1428)

SEQ ID NO: 44413 - protein, 475 aa, Haemophilus influenzae; identical to SEQ ID NO: 11039

SEQ ID NO: 44414 - DNA, 1398 bp, Neisseria meningitidis; identical to SEQ ID NO: 11040
  CDS (1)..(1398)

SEQ ID NO: 44415 - protein, 465 aa, Neisseria meningitidis; identical to SEQ ID NO: 11041

SEQ ID NO: 44416 - DNA, 1425 bp, Pseudomonas aeruginosa; identical to SEQ ID NO: 11042
  CDS (1)..(1425)

SEQ ID NO: 44417 - protein, 474 aa, Pseudomonas aeruginosa; identical to SEQ ID NO: 11043

SEQ ID NO: 44418 - DNA, 1398 bp, Clostridium acetobutylicum; identical to SEQ ID NO: 11044
  CDS (1)..(1398)

SEQ ID NO: 44419 - protein, 465 aa, Clostridium acetobutylicum; identical to SEQ ID NO: 11045

SEQ ID NO: 44420 - DNA, 1446 bp, Agrobacterium tumefaciens; identical to SEQ ID NO: 11046
  CDS (1)..(1446)

SEQ ID NO: 44421 - protein, 481 aa, Agrobacterium tumefaciens; identical to SEQ ID NO: 11047

SEQ ID NO: 44422 - DNA, 1377 bp, Thermotoga maritima; identical to SEQ ID NO: 11048
  CDS (1)..(1377)

SEQ ID NO: 44423 - protein, 458 aa, Thermotoga maritima; identical to SEQ ID NO: 11049

SEQ ID NO: 44424 - DNA, 1407 bp, Campylobacter jejuni; identical to SEQ ID NO: 11050
  CDS (1)..(1407)

SEQ ID NO: 44425 - protein, 468 aa, Campylobacter jejuni; identical to SEQ ID NO: 11051

SEQ ID NO: 44426 - DNA, 1452 bp, Vibrio cholerae; identical to SEQ ID NO: 11052
  CDS (1)..(1452)

SEQ ID NO: 44427 - protein, 483 aa, Vibrio cholerae; identical to SEQ ID NO: 11053

SEQ ID NO: 44428 - DNA, 1413 bp, Clostridium acetobutylicum; identical to SEQ ID NO: 11054
  CDS (1)..(1413)

SEQ ID NO: 44429 - protein, 470 aa, Clostridium acetobutylicum; identical to SEQ ID NO: 11055

SEQ ID NO: 44430 - DNA, 1407 bp, Helicobacter pylori; identical to SEQ ID NO: 11056
  CDS (1)..(1407)

SEQ ID NO: 44431 - protein, 468 aa, Helicobacter pylori; identical to SEQ ID NO: 11057

SEQ ID NO: 44432 - DNA, 2867 bp, Serratia marcescens; identical to SEQ ID NO: 11058
  CDS (787)..(2223)

SEQ ID NO: 44433 - protein, 478 aa, Serratia marcescens; identical to SEQ ID NO: 11059

SEQ ID NO: 44434 - DNA, 1428 bp, Bacillus subtilis; identical to SEQ ID NO: 11060
  CDS (1)..(1428)

SEQ ID NO: 44435 - protein, 475 aa, Bacillus subtilis; identical to SEQ ID NO: 11061

SEQ ID NO: 44436 - DNA, 2066 bp, Pseudomonas fluorescens; identical to SEQ ID NO: 11062
  CDS (323)..(1759)

SEQ ID NO: 44437 - protein, 478 aa, Pseudomonas fluorescens; identical to SEQ ID NO: 11063

SEQ ID NO: 44438 - DNA, 1437 bp, Bacillus cereus; identical to SEQ ID NO: 11064
  CDS (1)..(1437)

SEQ ID NO: 44439 - protein, 478 aa, Bacillus cereus; identical to SEQ ID NO: 11065

SEQ ID NO: 44440 - DNA, 1419 bp, Acinetobacter sp; identical to SEQ ID NO: 11066
  CDS (1)..(1419)

SEQ ID NO: 44441 - protein, 472 aa, Acinetobacter sp; identical to SEQ ID NO: 11067

SEQ ID NO: 44442 - DNA, 1431 bp, Bacillus anthracis str; identical to SEQ ID NO: 11068
  CDS (1)..(1431)

SEQ ID NO: 44443 - protein, 476 aa, Bacillus anthracis str; identical to SEQ ID NO: 11069

SEQ ID NO: 44444 - DNA, 1461 bp, Photobacterium profundum; identical to SEQ ID NO: 11070
  CDS (1)..(1461)

SEQ ID NO: 44445 - protein, 486 aa, Photobacterium profundum; identical to SEQ ID NO: 11071

SEQ ID NO: 44446 - DNA, 1431 bp, Bdellovibrio bacteriovorus; identical to SEQ ID NO: 11072
  CDS (1)..(1431)

SEQ ID NO: 44447 - protein, 476 aa, Bdellovibrio bacteriovorus; identical to SEQ ID NO: 11073

SEQ ID NO: 44448 - DNA, 1575 bp, Corynebacterium diphtheriae; identical to SEQ ID NO: 11074
  CDS (1)..(1575)

SEQ ID NO: 44449 - protein, 524 aa, Corynebacterium diphtheriae; identical to SEQ ID NO: 11075

SEQ ID NO: 44450 - DNA, 1407 bp, Desulfovibrio vulgaris; identical to SEQ ID NO: 11076
  CDS (1)..(1407)

SEQ ID NO: 44451 - protein, 468 aa, Desulfovibrio vulgaris; identical to SEQ ID NO: 11077

SEQ ID NO: 44452 - DNA, 1413 bp, Desulfovibrio vulgaris; identical to SEQ ID NO: 11078
  CDS (1)..(1413)

SEQ ID NO: 44453 - protein, 470 aa, Desulfovibrio vulgaris; identical to SEQ ID NO: 11079

SEQ ID NO: 44454 - DNA, 1434 bp, Bacillus cereus; identical to SEQ ID NO: 11080
  CDS (1)..(1434)

SEQ ID NO: 44455 - protein, 477 aa, Bacillus cereus; identical to SEQ ID NO: 11081

SEQ ID NO: 44456 - DNA, 1392 bp, Treponema denticola; identical to SEQ ID NO: 11082
  CDS (1)..(1392)

SEQ ID NO: 44457 - protein, 463 aa, Treponema denticola; identical to SEQ ID NO: 11083

SEQ ID NO: 44458 - DNA, 1392 bp, Geobacter sulfurreducens; identical to SEQ ID NO: 11084
  CDS (1)..(1392)

SEQ ID NO: 44459 - protein, 463 aa, Geobacter sulfurreducens; identical to SEQ ID NO: 11085

SEQ ID NO: 44460 - DNA, 1437 bp, Yersinia pestis; identical to SEQ ID NO: 11086
  CDS (1)..(1437)

SEQ ID NO: 44461 - protein, 478 aa, Yersinia pestis; identical to SEQ ID NO: 11087

SEQ ID NO: 44462 - DNA, 1401 bp, Bradyrhizobium japonicum USDA 110; identical to SEQ ID NO: 11088
  CDS (1)..(1401)

SEQ ID NO: 44463 - protein, 466 aa, Bradyrhizobium japonicum USDA 110; identical to SEQ ID NO: 11089

SEQ ID NO: 44464 - DNA, 1416 bp, Wolinella succinogenes; identical to SEQ ID NO: 11090
  CDS (1)..(1416)

SEQ ID NO: 44465 - protein, 471 aa, Wolinella succinogenes; identical to SEQ ID NO: 11091

SEQ ID NO: 44466 - DNA, 1452 bp, Vibrio vulnificus; identical to SEQ ID NO: 11092
  CDS (1)..(1452)

SEQ ID NO: 44467 - protein, 483 aa, Vibrio vulnificus; identical to SEQ ID NO: 11093

SEQ ID NO: 44468 - DNA, 1428 bp, Porphyromonas gingivalis W83; identical to SEQ ID NO: 11094
  CDS (1)..(1428)

SEQ ID NO: 44469 - protein, 475 aa, Porphyromonas gingivalis W83; identical to SEQ ID NO: 11095

SEQ ID NO: 44470 - DNA, 1425 bp, Photorhabdus luminescens subsp; identical to SEQ ID NO: 11096
  CDS (1)..(1425)

SEQ ID NO: 44471 - protein, 474 aa, Photorhabdus luminescens subsp; identical to SEQ ID NO: 11097

SEQ ID NO: 44472 - DNA, 1410 bp, Gloeobacter violaceus PCC 7421; identical to SEQ ID NO: 11098
  CDS (1)..(1410)

SEQ ID NO: 44473 - protein, 469 aa, Gloeobacter violaceus PCC 7421; identical to SEQ ID NO: 11099

SEQ ID NO: 44474 - DNA, 1404 bp, Chromobacterium violaceum ATCC 12472; identical to SEQ ID NO: 11100
  CDS (1)..(1404)

SEQ ID NO: 44475 - protein, 467 aa, Chromobacterium violaceum ATCC 12472; identical to SEQ ID NO: 11101

SEQ ID NO: 44476 - DNA, 1440 bp, Helicobacter hepaticus ATCC 51449; identical to SEQ ID NO: 11102
  CDS (1)..(1440)

SEQ ID NO: 44477 - protein, 479 aa, Helicobacter hepaticus ATCC 51449; identical to SEQ ID NO: 11103

SEQ ID NO: 44478 - DNA, 1428 bp, Haemophilus ducreyi 35000HP; identical to SEQ ID NO: 11104
  CDS (1)..(1428)

SEQ ID NO: 44479 - protein, 475 aa, Haemophilus ducreyi 35000HP; identical to SEQ ID NO: 11105

SEQ ID NO: 44480 - DNA, 1413 bp, Streptomyces avermitilis; identical to SEQ ID NO: 11106
  CDS (1)..(1413)

SEQ ID NO: 44481 - protein, 470 aa, Streptomyces avermitilis; identical to SEQ ID NO: 11107

SEQ ID NO: 44482 - DNA, 1395 bp, Eikenella corrodens; identical to SEQ ID NO: 11108
  CDS (1)..(1395)

SEQ ID NO: 44483 - protein, 464 aa, Eikenella corrodens; identical to SEQ ID NO: 11109

SEQ ID NO: 44484 - DNA, 1452 bp, Vibrio parahaemolyticus; identical to SEQ ID NO: 11110
  CDS (1)..(1452)

SEQ ID NO: 44485 - protein, 483 aa, Vibrio parahaemolyticus; identical to SEQ ID NO: 11111

SEQ ID NO: 44486 - DNA, 1425 bp, Pseudomonas syringae pv; identical to SEQ ID NO: 11112
  CDS (1)..(1425)

SEQ ID NO: 44487 - protein, 474 aa, Pseudomonas syringae pv; identical to SEQ ID NO: 11113

SEQ ID NO: 44488 - DNA, 1437 bp, Pseudomonas putida; identical to SEQ ID NO: 11114
  CDS (1)..(1437)

SEQ ID NO: 44489 - protein, 478 aa, Pseudomonas putida; identical to SEQ ID NO: 11115

SEQ ID NO: 44490 - DNA, 1401 bp, Lactobacillus plantarum WCFS1; identical to SEQ ID NO: 11116
  CDS (1)..(1401)

SEQ ID NO: 44491 - protein, 466 aa, Lactobacillus plantarum WCFS1; identical to SEQ ID NO: 11117

SEQ ID NO: 44492 - DNA, 1413 bp, Clostridium tetani E88; identical to SEQ ID NO: 11118
  CDS (1)..(1413)

SEQ ID NO: 44493 - protein, 470 aa, Clostridium tetani E88; identical to SEQ ID NO: 11119

SEQ ID NO: 44494 - DNA, 1461 bp, Bacteroides thetaiotaomicron VPI; identical to SEQ ID NO: 11120
  CDS (1)..(1461)

SEQ ID NO: 44495 - protein, 486 aa, Bacteroides thetaiotaomicron VPI; identical to SEQ ID NO: 11121

SEQ ID NO: 44496 - DNA, 1440 bp, Wigglesworthia glossinidia brevipalpis; identical to SEQ ID NO: 11122
  CDS (1)..(1440)

SEQ ID NO: 44497 - protein, 479 aa, Wigglesworthia glossinidia brevipalpis; identical to SEQ ID NO: 11123

SEQ ID NO: 44498 - DNA, 1617 bp, Corynebacterium efficiens YS; identical to SEQ ID NO: 11124
  CDS (1)..(1617)

SEQ ID NO: 44499 - protein, 538 aa, Corynebacterium efficiens YS; identical to SEQ ID NO: 11125

SEQ ID NO: 44500 - DNA, 1473 bp, Bifidobacterium longum; identical to SEQ ID NO: 11126
  CDS (1)..(1473)

SEQ ID NO: 44501 - protein, 490 aa, Bifidobacterium longum; identical to SEQ ID NO: 11127

SEQ ID NO: 44502 - DNA, 1410 bp, Cytophaga sp; identical to SEQ ID NO: 11128
  CDS (1)..(1410)

SEQ ID NO: 44503 - protein, 469 aa, Cytophaga sp; identical to SEQ ID NO: 11129

SEQ ID NO: 44504 - DNA, 1386 bp, Thermoanaerobacter tengcongensis; identical to SEQ ID NO: 11130
  CDS (1)..(1386)

SEQ ID NO: 44505 - protein, 461 aa, Thermoanaerobacter tengcongensis; identical to SEQ ID NO: 11131

SEQ ID NO: 44506 - DNA, 1419 bp, Pasteurella multocida; identical to SEQ ID NO: 11132
  CDS (1)..(1419)

SEQ ID NO: 44507 - protein, 472 aa, Pasteurella multocida; identical to SEQ ID NO: 11133

SEQ ID NO: 44508 - DNA, 1374 bp, Thermoplasma acidophilum; identical to SEQ ID NO: 11134
  CDS (1)..(1374)

SEQ ID NO: 44509 - protein, 457 aa, Thermoplasma acidophilum; identical to SEQ ID NO: 11135

SEQ ID NO: 44510 - DNA, 2106 bp, Bacillus sp; identical to SEQ ID NO: 11136
  CDS (349)..(1755)

SEQ ID NO: 44511 - protein, 468 aa, Bacillus sp; identical to SEQ ID NO: 11137

SEQ ID NO: 44512 - DNA, 1428 bp, Rhizobium etli; identical to SEQ ID NO: 11138
  CDS (1)..(1428)

SEQ ID NO: 44513 - protein, 475 aa, Rhizobium etli; identical to SEQ ID NO: 11139

SEQ ID NO: 44514 - DNA, 1581 bp, Corynebacterium glutamicum; identical to SEQ ID NO: 11140
  CDS (1)..(1581)

SEQ ID NO: 44515 - protein, 526 aa, Corynebacterium glutamicum; identical to SEQ ID NO: 11141

SEQ ID NO: 44516 - DNA, 26 bp, Artificial sequence
  Primer sequence
atgtgtttaaagcaaatcattggcag

SEQ ID NO: 44517 - DNA, 25 bp, Artificial sequence
  Primer sequence
ttactgttcgctttcatcagtatag

SEQ ID NO: 44518 - protein, 465 aa, Artificial sequence; identical to SEQ ID NO: 33375
  Consensus
  Variant (2)..(2): Xaa in position 2 is any amino acid
  Variant (4)..(4): Xaa in position 4 is any amino acid
  Variant (6)..(7): Xaa in position 6 to 7 is any amino acid
  Variant (9)..(12): Xaa in position 9 to 12 is any amino acid
  Variant (14)..(16): Xaa in position 14 to 16 is any amino acid
  Variant (18)..(18): Xaa in position 18 is any amino acid
  Variant (20)..(21): Xaa in position 20 to 21 is any amino acid
  Variant (23)..(23): Xaa in position 23 is any amino acid
  Variant (26)..(27): Xaa in position 26 to 27 is any amino acid
  Variant (30)..(30): Xaa in position 30 is any amino acid
  Variant (32)..(49): Xaa in position 32 to 49 is any amino acid
  Variant (51)..(51): Xaa in position 51 is any amino acid
  Variant (53)..(53): Xaa in position 53 is any amino acid
  Variant (55)..(56): Xaa in position 55 to 56 is any amino acid
  Variant (58)..(70): Xaa in position 58 to 70 is any amino acid
  Variant (72)..(73): Xaa in position 72 to 73 is any amino acid
  Variant (75)..(88): Xaa in position 75 to 88 is any amino acid
  Variant (90)..(91): Xaa in position 90 to 91 is any amino acid
  Variant (93)..(94): Xaa in position 93 to 94 is any amino acid
  Variant (102)..(102): Xaa in position 102 is any amino acid
  Variant (106)..(106): Xaa in position 106 is any amino acid
  Variant (110)..(110): Xaa in position 110 is any amino acid
  Variant (113)..(113): Xaa in position 113 is any amino acid
  Variant (115)..(115): Xaa in position 115 is any amino acid
  Variant (117)..(118): Xaa in position 117 to 118 is any amino acid
  Variant (120)..(122): Xaa in position 120 to 122 is any amino acid
  Variant (124)..(124): Xaa in position 124 is any amino acid
  Variant (126)..(129): Xaa in position 126 to 129 is any amino acid
  Variant (132)..(133): Xaa in position 132 to 133 is any amino acid
  Variant (136)..(137): Xaa in position 136 to 137 is any amino acid
  Variant (143)..(144): Xaa in position 143 to 144 is any amino acid
  Variant (147)..(159): Xaa in position 147 to 159 is any amino acid
  Variant (161)..(166): Xaa in position 161 to 166 is any amino acid
  Variant (168)..(173): Xaa in position 168 to 173 is any amino acid
  Variant (175)..(176): Xaa in position 175 to 176 is any amino acid
  Variant (179)..(182): Xaa in position 179 to 182 is any amino acid
  Variant (184)..(184): Xaa in position 184 is any amino acid
  Variant (188)..(188): Xaa in position 188 is any amino acid
  Variant (195)..(197): Xaa in position 195 to 197 is any amino acid
  Variant (202)..(226): Xaa in position 202 to 226 is any amino acid
  Variant (228)..(228): Xaa in position 228 is any amino acid
  Variant (230)..(230): Xaa in position 230 is any amino acid
  Variant (233)..(233): Xaa in position 233 is any amino acid
  Variant (237)..(237): Xaa in position 237 is any amino acid
  Variant (239)..(242): Xaa in position 239 to 242 is any amino acid
  Variant (244)..(250): Xaa in position 244 to 250 is any amino acid
  Variant (252)..(261): Xaa in position 252 to 261 is any amino acid
  Variant (263)..(264): Xaa in position 263 to 264 is any amino acid
  Variant (266)..(267): Xaa in position 266 to 267 is any amino acid
  Variant (270)..(281): Xaa in position 270 to 281 is any amino acid
  Variant (284)..(285): Xaa in position 284 to 285 is any amino acid
  Variant (287)..(290): Xaa in position 287 to 290 is any amino acid
  Variant (292)..(293): Xaa in position 292 to 293 is any amino acid
  Variant (300)..(300): Xaa in position 300 is any amino acid
  Variant (305)..(305): Xaa in position 305 is any amino acid
  Variant (307)..(308): Xaa in position 307 to 308 is any amino acid
  Variant (310)..(311): Xaa in position 310 to 311 is any amino acid
  Variant (314)..(315): Xaa in position 314 to 315 is any amino acid
  Variant (317)..(317): Xaa in position 317 is any amino acid
  Variant (324)..(324): Xaa in position 324 is any amino acid
  Variant (330)..(331): Xaa in position 330 to 331 is any amino acid
  Variant (333)..(334): Xaa in position 333 to 334 is any amino acid
  Variant (337)..(340): Xaa in position 337 to 340 is any amino acid
  Variant (342)..(342): Xaa in position 342 is any amino acid
  Variant (346)..(350): Xaa in position 346 to 350 is any amino acid
  Variant (352)..(354): Xaa in position 352 to 354 is any amino acid
  Variant (358)..(358): Xaa in position 358 is any amino acid
  Variant (361)..(363): Xaa in position 361 to 363 is any amino acid
  Variant (365)..(372): Xaa in position 365 to 372 is any amino acid
  Variant (374)..(387): Xaa in position 374 to 387 is any amino acid
  Variant (389)..(390): Xaa in position 389 to 390 is any amino acid
  Variant (393)..(394): Xaa in position 393 to 394 is any amino acid
  Variant (396)..(405): Xaa in position 396 to 405 is any amino acid
  Variant (407)..(410): Xaa in position 407 to 410 is any amino acid
  Variant (412)..(412): Xaa in position 412 is any amino acid
  Variant (416)..(417): Xaa in position 416 to 417 is any amino acid
  Variant (419)..(432): Xaa in position 419 to 432 is any amino acid
  Variant (434)..(447): Xaa in position 434 to 447 is any amino acid
  Variant (449)..(464): Xaa in position 449 to 464 is any amino acid

SEQ ID NO: 44519 - protein, 50 aa, Artificial sequence; identical to SEQ ID NO: 13505
  Consensus
  Variant (2)..(2): Xaa in position 2 is any amino acid
  Variant (4)..(4): Xaa in position 4 is any amino acid
  Variant (6)..(6): Xaa in position 6 is any amino acid
  Variant (7)..(7): Xaa in position 7 is Leu, Ile, Phe, Met or Val
  Variant (9)..(11): Xaa in position 9 to 11 is any amino acid
  Variant (12)..(12): Xaa in position 12 is Val, Ile or Leu
  Variant (13)..(13): Xaa in position 13 is Pro, Ser, Glu or Ala
  Variant (14)..(16): Xaa in position 14 to 16 is any amino acid
  Variant (17)..(17): Xaa in position 17 is Tyr, Leu or Phe
  Variant (18)..(18): Xaa in position 18 is Tyr, Trp, Phe or His
  Variant (20)..(20): Xaa in position 20 is Ile, Val or Ala
  Variant (21)..(21): Xaa in position 21 is Gln, His or Asn
  Variant (22)..(22): Xaa in position 22 is Thr or Ser
  Variant (23)..(23): Xaa in position 23 is any amino acid
  Variant (25)..(25): Xaa in position 25 is Ala, Ser or Gly
  Variant (26)..(27): Xaa in position 26 to 27 is any amino acid
  Variant (29)..(29): Xaa in position 29 is Phe, Tyr or Val
  Variant (30)..(30): Xaa in position 30 is any amino acid
  Variant (31)..(31): Xaa in position 31 is Ile, Leu or Val
  Variant (32)..(32): Xaa in position 32 is Ser, Thr or Gly
  Variant (33)..(40): Xaa in position 33 to 40 is any amino acid
  Variant (41)..(42): Xaa in position 41 to 42 is any or no amino acid
  Variant (43)..(43): Xaa in position 43 is Ile, Val or Met
  Variant (44)..(44): Xaa in position 44 is any amino acid
  Variant (45)..(45): Xaa in position 45 is Ala, Gly or Ser
  Variant (46)..(48): Xaa in position 46 to 48 is any amino acid
  Variant (49)..(49): Xaa in position 49 is Val, Thr, Ile or Leu

SEQ ID NO: 44520 - protein, 57 aa, Artificial sequence; identical to SEQ ID NO: 13506
  Consensus
  Variant (1)..(1): Xaa in position 1 is Gln or Ser
  Variant (2)..(2): Xaa in position 2 is Gly, Thr or Ala
  Variant (4)..(4): Xaa in position 4 is Ala or Ser
  Variant (7)..(7): Xaa in position 7 is Ser, Gln or Thr
  Variant (8)..(8): Xaa in position 8 is any amino acid
  Variant (9)..(9): Xaa in position 9 is Asn or His
  Variant (12)..(12): Xaa in position 12 is any amino acid
  Variant (16)..(16): Xaa in position 16 is Ile, Leu or Val
  Variant (17)..(17): Xaa in position 17 is Ala, Ser, Thr or Gly
  Variant (19)..(19): Xaa in position 19 is Arg, Ile, Leu or Val
  Variant (20)..(20): Xaa in position 20 is Ala, Gly or Leu
  Variant (21)..(21): Xaa in position 21 is any amino acid
  Variant (22)..(22): Xaa in position 22 is Glu, Ile, Gln, Thr or Arg
  Variant (23)..(23): Xaa in position 23 is any amino acid
  Variant (24)..(24): Xaa in position 24 is Leu, Met, Arg, Ala or Ile
  Variant (25)..(25): Xaa in position 25 is Gly, Asn or Pro
  Variant (26)..(27): Xaa in position 26 to 27 is any or no amino acid
  Variant (28)..(28): Xaa in position 28 is Lys, Arg, Ala or Pro
  Variant (29)..(29): Xaa in position 29 is Gly or Val
  Variant (30)..(30): Xaa in position 30 is any amino acid
  Variant (31)..(31): Xaa in position 31 is Tyr, Phe or no amino acid
  Variant (32)..(33): Xaa in position 32 to 33 is any or no amino acid
  Variant (34)..(34): Xaa in position 34 is Leu, Val, Ile or Cys
  Variant (35)..(35): Xaa in position 35 is His, Asn, Ser or Asp
  Variant (37)..(37): Xaa in position 37 is Asn, Met, Ile or Leu
  Variant (38)..(38): Xaa in position 38 is any amino acid
  Variant (39)..(39): Xaa in position 39 is His or Asp
  Variant (40)..(40): Xaa in position 40 is Val or Leu
  Variant (42)..(42): Xaa in position 42 is any amino acid
  Variant (43)..(43): Xaa in position 43 is Ser, Ala, Cys, Gly or His
  Variant (46)..(46): Xaa in position 46 is Thr, Ser or Gln
  Variant (48)..(48): Xaa in position 48 is Asp or Cys
  Variant (49)..(49): Xaa in position 49 is Ala, Val, Thr or Ser
  Variant (50)..(50): Xaa in position 50 is Tyr, Phe or Ile
  Variant (51)..(51): Xaa in position 51 is Pro or Ser
  Variant (52)..(52): Xaa in position 52 is Thr, Ser or Ala
  Variant (53)..(53): Xaa in position 53 is Ala, Gly, Val, Ser or Met
  Variant (54)..(54): Xaa in position 54 is any amino acid
  Variant (55)..(55): Xaa in position 55 is Arg, His, Lys or Asn
  Variant (56)..(56): Xaa in position 56 is Ile, Leu, Val or Met
  Variant (57)..(57): Xaa in position 57 is Ala, Gly, Ser or Thr

SEQ ID NO: 44521 - protein, 56 aa, Artificial sequence; identical to SEQ ID NO: 13507
  Consensus
  Variant (1)..(1): Xaa in position 1 is Leu, Ile or Val
  Variant (2)..(2): Xaa in position 2 is Lys or Arg
  Variant (3)..(3): Xaa in position 3 is any amino acid
  Variant (4)..(4): Xaa in position 4 is Gly or Ala
  Variant (7)..(7): Xaa in position 7 is Gln or His
  Variant (8)..(8): Xaa in position 8 is Leu, Thr or Met
  Variant (9)..(9): Xaa in position 9 is Gln, Glu or Met
  Variant (11)..(11): Xaa in position 11 is Ala or Gly
  Variant (12)..(12): Xaa in position 12 is Val, Thr, Leu, Ala or Pro
  Variant (14)..(14): Xaa in position 14 is Met, Ile, Leu or Val
  Variant (15)..(15): Xaa in position 15 is Thr, Arg, Ser, Met or Leu
  Variant (16)..(16): Xaa in position 16 is Leu, Val, Met, Phe or Tyr
  Variant (18)..(18): Xaa in position 18 is any amino acid
  Variant (19)..(19): Xaa in position 19 is Glu or Thr
  Variant (21)..(21): Xaa in position 21 is any amino acid
  Variant (22)..(22): Xaa in position 22 is Ala, Gly, Thr or Ser
  Variant (23)..(23): Xaa in position 23 is Phe, Tyr or Trp
  Variant (24)..(26): Xaa in position 24 to 26 is any amino acid
  Variant (27)..(27): Xaa in position 27 is Leu, Val, Ile, Met or Phe
  Variant (28)..(29): Xaa in position 28 to 29 is any amino acid
  Variant (30)..(30): Xaa in position 30 is Asp, Glu, Gly, His or Asn
  Variant (31)..(33): Xaa in position 31 to 33 is any amino acid
  Variant (34)..(34): Xaa in position 34 is Leu, Ile, Val or Phe
  Variant (35)..(38): Xaa in position 35 to 38 is any amino acid
  Variant (39)..(39): Xaa in position 39 is Pro or no amino acid
  Variant (40)..(41): Xaa in position 40 to 41 is any amino acid
  Variant (42)..(42): Xaa in position 42 is Leu, Ile, Met, Val or Phe
  Variant (43)..(44): Xaa in position 43 to 44 is any amino acid
  Variant (45)..(45): Xaa in position 45 is Val, Ile, Leu or Met
  Variant (46)..(46): Xaa in position 46 is Asn, Ala, Gly or Ser
  Variant (47)..(47): Xaa in position 47 is Leu, Met, Ile or Gln
  Variant (49)..(49): Xaa in position 49 is Ala or Gly
  Variant (50)..(50): Xaa in position 50 is Thr or Ser
  Variant (51)..(51): Xaa in position 51 is Ala or Val
  Variant (52)..(52): Xaa in position 52 is Ile, Val or Ala
  Variant (55)..(55): Xaa in position 55 is Gly, Arg, Ala, Ser or Lys
  Variant (56)..(56): Xaa in position 56 is Leu, Ile, Val or Met

SEQ ID NO: 44522 - protein, 105 aa, Artificial sequence; identical to SEQ ID NO: 13508
  Consensus
  Variant (1)..(1): Xaa in position 1 is Lys or Arg
  Variant (2)..(2): Xaa in position 2 is any amino acid
  Variant (3)..(3): Xaa in position 3 is Cys, Ala, Ser or Gly
  Variant (4)..(4): Xaa in position 4 is Asn, Ser, His, Asp or Gly
  Variant (6)..(6): Xaa in position 6 is Leu or Ile
  Variant (8)..(8): Xaa in position 8 is Leu, Phe or Ile
  Variant (9)..(9): Xaa in position 9 is Leu or Met
  Variant (10)..(10): Xaa in position 10 is any amino acid
  Variant (14)..(15): Xaa in position 14 to 15 is any amino acid
  Variant (16)..(16): Xaa in position 16 is Gly or Val
  Variant (17)..(17): Xaa in position 17 is Leu, Ile or Phe
  Variant (18)..(18): Xaa in position 18 is any amino acid
  Variant (19)..(19): Xaa in position 19 is Glu or Asp
  Variant (20)..(20): Xaa in position 20 is Ile, Leu, Phe or Val
  Variant (21)..(21): Xaa in position 21 is any amino acid
  Variant (22)..(22): Xaa in position 22 is Leu, Val or Ile
  Variant (23)..(23): Xaa in position 23 is Pro or Glu
  Variant (24)..(25): Xaa in position 24 to 25 is any amino acid
  Variant (26)..(26): Xaa in position 26 is Gln, Glu or Ala
  Variant (27)..(27): Xaa in position 27 is Pro, Ala, Asn or Gln
  Variant (34)..(34): Xaa in position 34 is Gly or Ala
  Variant (36)..(36): Xaa in position 36 is Val, Ile or Tyr
  Variant (39)..(39): Xaa in position 39 is Val, Thr or Ser
  Variant (40)..(40): Xaa in position 40 is Ile, Met, Val, Gln or Leu
  Variant (41)..(41): Xaa in position 41 is Pro, Cys, Ala or Ser
  Variant (43)..(43): Xaa in position 43 is any amino acid
  Variant (44)..(44): Xaa in position 44 is Val, Ile, Leu, Met or Thr
  Variant (45)..(45): Xaa in position 45 is any amino acid
  Variant (46)..(46): Xaa in position 46 is Gln, Met, Thr or Leu
  Variant (47)..(47): Xaa in position 47 is Val, Ile, Thr, Ala or Cys
  Variant (48)..(48): Xaa in position 48 is Cys, Ala or Ser
  Variant (49)..(49): Xaa in position 49 is Phe, Tyr, Ala, His or Met
  Variant (50)..(50): Xaa in position 50 is any amino acid
  Variant (51)..(51): Xaa in position 51 is Val, Ile or Ala
  Variant (52)..(52): Xaa in position 52 is any amino acid
  Variant (53)..(53): Xaa in position 53 is Gly, Ala or Ser
  Variant (54)..(54): Xaa in position 54 is any amino acid
  Variant (55)..(55): Xaa in position 55 is Asp, His, Gln or Asn
  Variant (56)..(56): Xaa in position 56 is any amino acid
  Variant (57)..(57): Xaa in position 57 is Thr, Ala, Cys, Ser or Ile
  Variant (58)..(58): Xaa in position 58 is Val, Ile or Leu
  Variant (59)..(60): Xaa in position 59 to 60 is any amino acid
  Variant (61)..(61): Xaa in position 61 is Ala, Gly or Ser
  Variant (62)..(62): Xaa in position 62 is Ala, Ser, Gly, Val or Cys
  Variant (63)..(63): Xaa in position 63 is Glu, Ser, Gln, Ala or Asp
  Variant (64)..(64): Xaa in position 64 is any amino acid
  Variant (65)..(65): Xaa in position 65 is Gly or Ala
  Variant (66)..(66): Xaa in position 66 is Gln, His or Asn
  Variant (67)..(67): Xaa in position 67 is Leu, Phe or Met
  Variant (68)..(68): Xaa in position 68 is Gln or Glu
  Variant (71)..(71): Xaa in position 71 is Val, Ala or Gln
  Variant (72)..(72): Xaa in position 72 is Met or Phe
  Variant (73)..(73): Xaa in position 73 is any amino acid
  Variant (75)..(75): Xaa in position 75 is any amino acid
  Variant (76)..(76): Xaa in position 76 is Ile, Leu, Met, Thr or Val
  Variant (77)..(79): Xaa in position 77 to 79 is any amino acid
  Variant (80)..(80): Xaa in position 80 is Leu, Met, Ile or Cys
  Variant (81)..(82): Xaa in position 81 to 82 is any amino acid
  Variant (83)..(83): Xaa in position 83 is Ser, Gly or Thr
  Variant (84)..(86): Xaa in position 84 to 86 is any amino acid
  Variant (87)..(87): Xaa in position 87 is Leu, Met or Ile
  Variant (88)..(89): Xaa in position 88 to 89 is any amino acid
  Variant (90)..(90): Xaa in position 90 is Ala, Gly, Thr or Val
  Variant (91)..(93): Xaa in position 91 to 93 is any amino acid
  Variant (94)..(94): Xaa in position 94 is Leu or Phe
  Variant (95)..(96): Xaa in position 95 to 96 is any amino acid
  Variant (97)..(97): Xaa in position 97 is any or no amino acid
  Variant (98)..(98): Xaa in position 98 is Cys, Ala, Tyr or Leu
  Variant (99)..(99): Xaa in position 99 is Ile, Val or Leu
  Variant (100)..(101): Xaa in position 100 to 101 is any amino acid
  Variant (102)..(102): Xaa in position 102 is Ile, Leu, Met or Val
  Variant (103)..(103): Xaa in position 103 is any amino acid
  Variant (104)..(104): Xaa in position 104 is Ala, Val, Ile, Pro or Gly
  Variant (105)..(105): Xaa in position 105 is Asn, Asp or Gln

SEQ ID NO: 44523 - DNA, 1791 bp, Saccharomyces cerevisiae; identical to SEQ ID NO: 7248
  CDS (2)..(1504)

SEQ ID NO: 44524 - protein, 500 aa, Saccharomyces cerevisiae; identical to SEQ ID NO: 7249

SEQ ID NO: 44525 - DNA, 1461 bp, Vibrio cholerae; identical to SEQ ID NO: 7250
  CDS (1)..(1461)

SEQ ID NO: 44526 - protein, 486 aa, Vibrio cholerae; identical to SEQ ID NO: 7251

SEQ ID NO: 44527 - DNA, 1455 bp, Chlamydophila pneumoniae, Chlamydia pneumoniae; identical to SEQ ID NO: 7252
  CDS (1)..(1455)

SEQ ID NO: 44528 - protein, 484 aa, Chlamydophila pneumoniae, Chlamydia pneumoniae; identical to SEQ ID NO: 7253

SEQ ID NO: 44529 - DNA, 1419 bp, Clostridium acetobutylicum; identical to SEQ ID NO: 7254
  CDS (1)..(1419)

SEQ ID NO: 44530 - protein, 472 aa, Clostridium acetobutylicum; identical to SEQ ID NO: 7255

SEQ ID NO: 44531 - DNA, 1413 bp, Yersinia pestis; identical to SEQ ID NO: 7256
  CDS (1)..(1413)

SEQ ID NO: 44532 - protein, 470 aa, Yersinia pestis; identical to SEQ ID NO: 7257

SEQ ID NO: 44533 - DNA, 1413 bp, Salmonella enterica subsp. enterica serovar Typhi; identical to SEQ ID NO: 7258
  CDS (1)..(1413)

SEQ ID NO: 44534 - protein, 470 aa, Salmonella enterica subsp. enterica serovar Typhi; identical to SEQ ID NO: 7259

SEQ ID NO: 44535 - DNA, 1758 bp, Listeria innocua; identical to SEQ ID NO: 7260
  CDS (1)..(1758)

SEQ ID NO: 44536 - protein, 585 aa, Listeria innocua; identical to SEQ ID NO: 7261

SEQ ID NO: 44537 - DNA, 1431 bp, Nostoc sp. PCC 7120; identical to SEQ ID NO: 7262
  CDS (1)..(1431)

SEQ ID NO: 44538 - protein, 476 aa, Nostoc sp. PCC 7120; identical to SEQ ID NO: 7263

SEQ ID NO: 44539 - DNA, 1440 bp, Agrobacterium tumefaciens; identical to SEQ ID NO: 7264
  CDS (1)..(1440)

SEQ ID NO: 44540 - protein, 479 aa, Agrobacterium tumefaciens; identical to SEQ ID NO: 7265

SEQ ID NO: 44541 - DNA, 1770 bp, Nostoc sp. PCC 7120; identical to SEQ ID NO: 7266
  CDS (1)..(1770)

SEQ ID NO: 44542 - protein, 589 aa, Nostoc sp. PCC 7120; identical to SEQ ID NO: 7267

SEQ ID NO: 44543 - DNA, 1401 bp, Thermotoga maritima; identical to SEQ ID NO: 7268
  CDS (1)..(1401)

SEQ ID NO: 44544 - protein, 466 aa, Thermotoga maritima; identical to SEQ ID NO: 7269

SEQ ID NO: 44545 - DNA, 1377 bp, Aeropyrum pernix; identical to SEQ ID NO: 7270
  CDS (1)..(1377)

SEQ ID NO: 44546 - protein, 458 aa, Aeropyrum pernix; identical to SEQ ID NO: 7271

SEQ ID NO: 44547 - DNA, 1449 bp, Deinococcus radiodurans; identical to SEQ ID NO: 7272
  CDS (1)..(1449)

SEQ ID NO: 44548 - protein, 482 aa, Deinococcus radiodurans; identical to SEQ ID NO: 7273

SEQ ID NO: 44549 - DNA, 1446 bp, Vibrio cholerae; identical to SEQ ID NO: 7274
  CDS (1)..(1446)

SEQ ID NO: 44550 - protein, 481 aa, Vibrio cholerae; identical to SEQ ID NO: 7275

SEQ ID NO: 44551 - DNA, 1740 bp, Halobacterium sp. NRC-1; identical to SEQ ID NO: 7276
  CDS (1)..(1740)

SEQ ID NO: 44552 - protein, 579 aa, Halobacterium sp. NRC-1; identical to SEQ ID NO: 7277

SEQ ID NO: 44553 - DNA, 1437 bp, Haemophilus influenzae; identical to SEQ ID NO: 7278
  CDS (1)..(1437)

SEQ ID NO: 44554 - protein, 478 aa, Haemophilus influenzae; identical to SEQ ID NO: 7279

SEQ ID NO: 44555 - DNA, 1434 bp, Borrelia burgdorferi (Lyme disease spirochete); identical to SEQ ID NO: 7280
  CDS (1)..(1434)

SEQ ID NO: 44556 - protein, 477 aa, Borrelia burgdorferi (Lyme disease spirochete); identical to SEQ ID NO: 7281

SEQ ID NO: 44557 - DNA, 1413 bp, Vibrio cholerae; identical to SEQ ID NO: 7282
  CDS (1)..(1413)

SEQ ID NO: 44558 - protein, 470 aa, Vibrio cholerae; identical to SEQ ID NO: 7283

SEQ ID NO: 44559 - DNA, 1755 bp, Bacillus halodurans; identical to SEQ ID NO: 7284
  CDS (1)..(1755)

SEQ ID NO: 44560 - protein, 584 aa, Bacillus halodurans; identical to SEQ ID NO: 7285

SEQ ID NO: 44561 - DNA, 1443 bp, Buchnera sp; identical to SEQ ID NO: 7286
  CDS (1)..(1443)

SEQ ID NO: 44562 - protein, 480 aa, Buchnera sp; identical to SEQ ID NO: 7287

SEQ ID NO: 44563 - DNA, 1344 bp, Methanococcus jannaschii; identical to SEQ ID NO: 7288
  CDS (1)..(1344)

SEQ ID NO: 44564 - protein, 447 aa, Methanococcus jannaschii; identical to SEQ ID NO: 7289

SEQ ID NO: 44565 - DNA, 1413 bp, Escherichia coli; identical to SEQ ID NO: 7290
  CDS (1)..(1413)

SEQ ID NO: 44566 - protein, 470 aa, Escherichia coli; identical to SEQ ID NO: 7291

SEQ ID NO: 44567 - DNA, 1434 bp, Pseudomonas aeruginosa; identical to SEQ ID NO: 7292
  CDS (1)..(1434)

SEQ ID NO: 44568 - protein, 477 aa, Pseudomonas aeruginosa; identical to SEQ ID NO: 7293

SEQ ID NO: 44569 - DNA, 1509 bp, Lactococcus lactis subsp. lactis; identical to SEQ ID NO: 7294
  CDS (1)..(1509)

SEQ ID NO: 44570 - protein, 502 aa, Lactococcus lactis subsp. lactis; identical to SEQ ID NO: 7295

SEQ ID NO: 44571 - DNA, 1431 bp, Caulobacter crescentus; identical to SEQ ID NO: 7296
  CDS (1)..(1431)

SEQ ID NO: 44572 - protein, 476 aa, Caulobacter crescentus; identical to SEQ ID NO: 7297

SEQ ID NO: 44573 - DNA, 1452 bp, Pseudomonas aeruginosa; identical to SEQ ID NO: 7298
  CDS (1)..(1452)

SEQ ID NO: 44574 - protein, 483 aa, Pseudomonas aeruginosa; identical to SEQ ID NO: 7299

SEQ ID NO: 44575 - DNA, 1437 bp, Pyrococcus horikoshii; identical to SEQ ID NO: 7300
  CDS (1)..(1437)

SEQ ID NO: 44576 - protein, 478 aa, Pyrococcus horikoshii; identical to SEQ ID NO: 7301

SEQ ID NO: 44577 - DNA, 1443 bp, Campylobacter jejuni; identical to SEQ ID NO: 7302
  CDS (1)..(1443)

SEQ ID NO: 44578 - protein, 480 aa, Campylobacter jejuni; identical to SEQ ID NO: 7303

SEQ ID NO: 44579 - DNA, 1446 bp, Chlamydia muridarum, Chlamydia trachomatis MoPn; identical to SEQ ID NO: 7304
  CDS (1)..(1446)

SEQ ID NO: 44580 - protein, 481 aa, Chlamydia muridarum, Chlamydia trachomatis MoPn; identical to SEQ ID NO: 7305

SEQ ID NO: 44581 - DNA, 1704 bp, Arabidopsis thaliana (mouse-ear cress); identical to SEQ ID NO: 7306
  CDS (1)..(1704)

SEQ ID NO: 44582 - protein, 567 aa, Arabidopsis thaliana (mouse-ear cress); identical to SEQ ID NO: 7307

SEQ ID NO: 44583 - DNA, 1758 bp, Staphylococcus aureus; identical to SEQ ID NO: 7308
  CDS (1)..(1758)

SEQ ID NO: 44584 - protein, 585 aa, Staphylococcus aureus; identical to SEQ ID NO: 7309

SEQ ID NO: 44585 - DNA, 1758 bp, Bacillus subtilis; identical to SEQ ID NO: 7310
  CDS (1)..(1758)

SEQ ID NO: 44586 - protein, 585 aa, Bacillus subtilis; identical to SEQ ID NO: 7311

SEQ ID NO: 44587 - DNA, 1419 bp, Mycobacterium tuberculosis; identical to SEQ ID NO: 7312
  CDS (1)..(1419)

SEQ ID NO: 44588 - protein, 472 aa, Mycobacterium tuberculosis; identical to SEQ ID NO: 7313

SEQ ID NO: 44589 - DNA, 1458 bp, Chlamydia trachomatis; identical to SEQ ID NO: 7314
  CDS (1)..(1458)

SEQ ID NO: 44590 - protein, 485 aa, Chlamydia trachomatis; identical to SEQ ID NO: 7315

SEQ ID NO: 44591 - DNA, 1437 bp, Pyrococcus abyssi; identical to SEQ ID NO: 7316
  CDS (1)..(1437)

SEQ ID NO: 44592 - protein, 478 aa, Pyrococcus abyssi; identical to SEQ ID NO: 7317

SEQ ID NO: 44593 - DNA, 1473 bp, Neisseria meningitidis; identical to SEQ ID NO: 7318
  CDS (1)..(1473)

SEQ ID NO: 44594 - protein, 490 aa, Neisseria meningitidis; identical to SEQ ID NO: 7319

SEQ ID NO: 44595 - DNA, 1506 bp, Streptococcus pneumoniae; identical to SEQ ID NO: 7320
  CDS (1)..(1506)

SEQ ID NO: 44596 - protein, 501 aa, Streptococcus pneumoniae; identical to SEQ ID NO: 7321

SEQ ID NO: 44597 - DNA, 1422 bp, Clostridium acetobutylicum; identical to SEQ ID NO: 7322
  CDS (1)..(1422)

SEQ ID NO: 44598 - protein, 473 aa, Clostridium acetobutylicum; identical to SEQ ID NO: 7323

SEQ ID NO: 44599 - DNA, 1359 bp, Sulfolobus solfataricus; identical to SEQ ID NO: 7324
  CDS (1)..(1359)

SEQ ID NO: 44600 - protein, 452 aa, Sulfolobus solfataricus; identical to SEQ ID NO: 7325

SEQ ID NO: 44601 - DNA, 1428 bp, Mycoplasma pulmonis; identical to SEQ ID NO: 7326
  CDS (1)..(1428): transl_table=4

SEQ ID NO: 44602 - protein, 475 aa, Mycoplasma pulmonis; identical to SEQ ID NO: 7327

SEQ ID NO: 44603 - DNA, 1533 bp, Solanum tuberosum (potato); identical to SEQ ID NO: 7328
  CDS (1)..(1533)

SEQ ID NO: 44604 - protein, 510 aa, Solanum tuberosum (potato); identical to SEQ ID NO: 7329

SEQ ID NO: 44605 - DNA, 2083 bp, Bacillus psychrophilus; identical to SEQ ID NO: 7330
  CDS (271)..(2031)

SEQ ID NO: 44606 - protein, 586 aa, Bacillus psychrophilus; identical to SEQ ID NO: 7331

SEQ ID NO: 44607 - DNA, 2054 bp, Bacillus licheniformis; identical to SEQ ID NO: 7332
  CDS (132)..(1889)

SEQ ID NO: 44608 - protein, 585 aa, Bacillus licheniformis; identical to SEQ ID NO: 7333

SEQ ID NO: 44609 - DNA, 1617 bp, Trichoderma reesei; identical to SEQ ID NO: 7334
  CDS (1)..(1617)

SEQ ID NO: 44610 - protein, 538 aa, Trichoderma reesei; identical to SEQ ID NO: 7335

SEQ ID NO: 44611 - DNA, 1725 bp, Rattus norvegicus (Norway rat); identical to SEQ ID NO: 7336
  CDS (1)..(1725)

SEQ ID NO: 44612 - protein, 574 aa, Rattus norvegicus (Norway rat); identical to SEQ ID NO: 7337

SEQ ID NO: 44613 - DNA, 1596 bp, Trypanosoma brucei; identical to SEQ ID NO: 7338
  CDS (59)..(1558)

SEQ ID NO: 44614 - protein, 499 aa, Trypanosoma brucei; identical to SEQ ID NO: 7339

SEQ ID NO: 44615 - DNA, 1581 bp, Aspergillus niger; identical to SEQ ID NO: 7340
  CDS (1)..(1581)

SEQ ID NO: 44616 - protein, 526 aa, Aspergillus niger; identical to SEQ ID NO: 7341

SEQ ID NO: 44617 - DNA, 1636 bp, Bacillus stearothermophilus; identical to SEQ ID NO: 7342
  CDS (114)..(1598)

SEQ ID NO: 44618 - protein, 494 aa, Bacillus stearothermophilus; identical to SEQ ID NO: 7343

SEQ ID NO: 44619 - DNA, 1581 bp, Emericella nidulans, Aspergillus nidulans; identical to SEQ ID NO: 7344
  CDS (1)..(1581)

SEQ ID NO: 44620 - protein, 526 aa, Emericella nidulans, Aspergillus nidulans; identical to SEQ ID NO: 7345

SEQ ID NO: 44621 - DNA, 1847 bp, Nicotiana tabacum (common tobacco); identical to SEQ ID NO: 7346
  CDS (45)..(1571)

SEQ ID NO: 44622 - protein, 508 aa, Nicotiana tabacum (common tobacco); identical to SEQ ID NO: 7347

SEQ ID NO: 44623 - DNA, 2243 bp, Nicotiana tabacum (common tobacco); identical to SEQ ID NO: 7348
  CDS (318)..(2006)

SEQ ID NO: 44624 - protein, 562 aa, Nicotiana tabacum (common tobacco); identical to SEQ ID NO: 7349

SEQ ID NO: 44625 - DNA, 2044 bp, Xenopus sp. (clawed frog); identical to SEQ ID NO: 7350
  CDS (29)..(1612)

SEQ ID NO: 44626 - protein, 527 aa, Xenopus sp. (clawed frog); identical to SEQ ID NO: 7351

SEQ ID NO: 44627 - DNA, 2146 bp, Mus musculus (house mouse); identical to SEQ ID NO: 7352
  CDS (30)..(1625)

SEQ ID NO: 44628 - protein, 531 aa, Mus musculus (house mouse); identical to SEQ ID NO: 7353

SEQ ID NO: 44629 - DNA, 1596 bp, Homo sapiens (man); identical to SEQ ID NO: 7354
  CDS (1)..(1596)

SEQ ID NO: 44630 - protein, 531 aa, Homo sapiens (man) [sequence omitted]

SEQ ID NO: 44631 - DNA, 2113 bp, Saccharomyces cerevisiae; identical to SEQ ID NO: 7356
  CDS (437)..(1957)

SEQ ID NO: 44632 - protein, 506 aa, Saccharomyces cerevisiae; identical to SEQ ID NO: 7357

SEQ ID NO: 44633 - DNA, 1527 bp, Mycoplasma pneumoniae; identical to SEQ ID NO: 7358
  CDS (1)..(1527): transl_table=4

SEQ ID NO: 44634 - protein, 508 aa, Mycoplasma pneumoniae; identical to SEQ ID NO: 7359

SEQ ID NO: 44635 - DNA, 1452 bp, Synechocystis sp; identical to SEQ ID NO: 7360
  CDS (1)..(1452)

SEQ ID NO: 44636 - protein, 483 aa, Synechocystis sp; identical to SEQ ID NO: 7361

SEQ ID NO: 44637 - DNA, 1776 bp, Synechocystis sp; identical to SEQ ID NO: 7362
  CDS (1)..(1776)

SEQ ID NO: 44638 - protein, 591 aa, Synechocystis sp; identical to SEQ ID NO: 7363

SEQ ID NO: 44639 - DNA, 1494 bp, Arabidopsis thaliana (mouse-ear cress); identical to SEQ ID NO: 7364
  CDS (1)..(1494)

SEQ ID NO: 44640 - protein, 497 aa, Arabidopsis thaliana (mouse-ear cress); identical to SEQ ID NO: 7365

SEQ ID NO: 44641 - DNA, 2115 bp, Ricinus communis (castor bean); identical to SEQ ID NO: 7366
  CDS (118)..(1869)

SEQ ID NO: 44642 - protein, 583 aa, Ricinus communis (castor bean); identical to SEQ ID NO: 7367

SEQ ID NO: 44643 - DNA, 2022 bp, Ricinus communis (castor bean); identical to SEQ ID NO: 7368
  CDS (46)..(1527)

SEQ ID NO: 44644 - protein, 493 aa, Ricinus communis (castor bean); identical to SEQ ID NO: 7369

SEQ ID NO: 44645 - DNA, 1548 bp, Caenorhabditis elegans; identical to SEQ ID NO: 7370
  CDS (1)..(1548)

SEQ ID NO: 44646 - protein, 515 aa, Caenorhabditis elegans; identical to SEQ ID NO: 7371

SEQ ID NO: 44647 - DNA, 1437 bp, Streptomyces coelicolor; identical to SEQ ID NO: 7372
  CDS (1)..(1437)

SEQ ID NO: 44648 - protein, 478 aa, Streptomyces coelicolor; identical to SEQ ID NO: 7373

SEQ ID NO: 44649 - DNA, 1530 bp, Schizosaccharomyces pombe; identical to SEQ ID NO: 7374
  CDS (1)..(1530)

SEQ ID NO: 44650 - protein, 509 aa, Schizosaccharomyces pombe; identical to SEQ ID NO: 7375

SEQ ID NO: 44651 - DNA, 1584 bp, Arabidopsis thaliana (mouse-ear cress); identical to SEQ ID NO: 7376
  CDS (40)..(1584)

SEQ ID NO: 44652 - protein, 514 aa, Arabidopsis thaliana (mouse-ear cress); identical to SEQ ID NO: 7377

SEQ ID NO: 44653 - DNA, 1533 bp, Arabidopsis thaliana (mouse-ear cress); identical to SEQ ID NO: 7378
  CDS (1)..(1533)

SEQ ID NO: 44654 - protein, 510 aa, Arabidopsis thaliana (mouse-ear cress); identical to SEQ ID NO: 7379

SEQ ID NO: 44655 - DNA, 1479 bp, Arabidopsis thaliana (mouse-ear cress); identical to SEQ ID NO: 7380
  CDS (1)..(1479)

SEQ ID NO: 44656 - protein, 492 aa, Arabidopsis thaliana (mouse-ear cress); identical to SEQ ID NO: 7381

SEQ ID NO: 44657 - DNA, 1572 bp, synthetic construct; identical to SEQ ID NO: 7382
  CDS (1)..(1572)

SEQ ID NO: 44658 - protein, 523 aa, synthetic construct; identical to SEQ ID NO: 7383

SEQ ID NO: 44659 - DNA, 2795 bp, Corynebacterium glutamicum; identical to SEQ ID NO: 7384
  CDS (740)..(2173)

SEQ ID NO: 44660 - protein, 477 aa, Corynebacterium glutamicum; identical to SEQ ID NO: 7385

SEQ ID NO: 44661 - DNA, 2264 bp, Bacillus subtilis; identical to SEQ ID NO: 7386
  CDS (258)..(2012)

SEQ ID NO: 44662 - protein, 584 aa, Bacillus subtilis; identical to SEQ ID NO: 7387

SEQ ID NO: 44663 - DNA, 2569 bp, Zymomonas mobilis; identical to SEQ ID NO: 7388
  CDS (137)..(1564)

SEQ ID NO: 44664 - protein, 475 aa, Zymomonas mobilis; identical to SEQ ID NO: 7389

SEQ ID NO: 44665 - DNA, 1701 bp, Homo sapiens; identical to SEQ ID NO: 7390
  CDS (1)..(1701)

SEQ ID NO: 44666 - protein, 566 aa, Homo sapiens; identical to SEQ ID NO: 7391

SEQ ID NO: 44667 - DNA, 1515 bp, Debaryomyces hansenii; identical to SEQ ID NO: 7392
  CDS (1)..(1515)

SEQ ID NO: 44668 - protein, 504 aa, Debaryomyces hansenii; identical to SEQ ID NO: 7393

SEQ ID NO: 44669 - DNA, 1443 bp, Erwinia carotovora subsp; identical to SEQ ID NO: 7394
  CDS (1)..(1443)

SEQ ID NO: 44670 - protein, 480 aa, Erwinia carotovora subsp; identical to SEQ ID NO: 7395

SEQ ID NO: 44671 - DNA, 1179 bp, Mycoplasma arthritidis; identical to SEQ ID NO: 7396
  CDS (1)..(1179): transl-table=4

SEQ ID NO: 44672 - protein, 392 aa, Mycoplasma arthritidis; identical to SEQ ID NO: 7397

SEQ ID NO: 44673 - DNA, 1437 bp, Mesoplasma florum L1; identical to SEQ ID NO: 7398
  CDS (1)..(1437): transl_table=4

SEQ ID NO: 44674 - protein, 478 aa, Mesoplasma florum L1; identical to SEQ ID NO: 7399

SEQ ID NO: 44675 - DNA, 1506 bp, Candida glabrata; identical to SEQ ID NO: 7400
  CDS (1)..(1506)

SEQ ID NO: 44676 - protein, 501 aa, Candida glabrata; identical to SEQ ID NO: 7401

SEQ ID NO: 44677 - DNA, 1527 bp, Candida glabrata; identical to SEQ ID NO: 7402
  CDS (1)..(1527)

SEQ ID NO: 44678 - protein, 508 aa, Candida glabrata; identical to SEQ ID NO: 7403

SEQ ID NO: 44679 - DNA, 1071 bp, Bacillus thuringiensis serovar konkukian str; identical to SEQ ID NO: 7404
  CDS (1)..(1071)

SEQ ID NO: 44680 - protein, 356 aa, Bacillus thuringiensis serovar konkukian str; identical to SEQ ID NO: 7405

SEQ ID NO: 44681 - DNA, 1960 bp, Zea mays; identical to SEQ ID NO: 7406
  CDS (144)..(1673)

SEQ ID NO: 44682 - protein, 509 aa, Zea mays; identical to SEQ ID NO: 7407

SEQ ID NO: 44683 - DNA, 1452 bp, Mycoplasma mobile; identical to SEQ ID NO: 7408
  CDS (1)..(1452)

SEQ ID NO: 44684 - protein, 483 aa, Mycoplasma mobile; identical to SEQ ID NO: 7409

SEQ ID NO: 44685 - DNA, 1668 bp, Picrophilus torridus; identical to SEQ ID NO: 7410
  CDS (1)..(1668)

SEQ ID NO: 44686 - protein, 555 aa, Picrophilus torridus; identical to SEQ ID NO: 7411

SEQ ID NO: 44687 - DNA, 1536 bp, Plasmodium falciparum; identical to SEQ ID NO: 7412
  CDS (1)..(1536)

SEQ ID NO: 44688 - protein, 511 aa, Plasmodium falciparum; identical to SEQ ID NO: 7413

SEQ ID NO: 44689 - DNA, 1458 bp, Photobacterium profundum; identical to SEQ ID NO: 7414
  CDS (1)..(1458)

SEQ ID NO: 44690 - protein, 485 aa, Photobacterium profundum; identical to SEQ ID NO: 7415

SEQ ID NO: 44691 - DNA, 1413 bp, Photobacterium profundum; identical to SEQ ID NO: 7416
  CDS (1)..(1413)

SEQ ID NO: 44692 - protein, 470 aa, Photobacterium profundum; identical to SEQ ID NO: 7417

SEQ ID NO: 44693 - DNA, 1344 bp, Methanococcus maripaludis; identical to SEQ ID NO: 7418
  CDS (1)..(1344)

SEQ ID NO: 44694 - protein, 447 aa, Methanococcus maripaludis; identical to SEQ ID NO: 7419

SEQ ID NO: 44695 - DNA, 1797 bp, Parachlamydia sp; identical to SEQ ID NO: 7420
  CDS (1)..(1797)

SEQ ID NO: 44696 - protein, 598 aa, Parachlamydia sp; identical to SEQ ID NO: 7421

SEQ ID NO: 44697 - DNA, 1488 bp, Bdellovibrio bacteriovorus; identical to SEQ ID NO: 7422
  CDS (1)..(1488)

SEQ ID NO: 44698 - protein, 495 aa, Bdellovibrio bacteriovorus; identical to SEQ ID NO: 7423

SEQ ID NO: 44699 - DNA, 1437 bp, Mycoplasma mycoides; identical to SEQ ID NO: 7424
  CDS (1)..(1437): transl_table=4

SEQ ID NO: 44700 - protein, 478 aa, Mycoplasma mycoides; identical to SEQ ID NO: 7425

SEQ ID NO: 44701 - DNA, 1434 bp, Rhodopseudomonas palustris; identical to SEQ ID NO: 7426
  CDS (1)..(1434)

SEQ ID NO: 44702 - protein, 477 aa, Rhodopseudomonas palustris; identical to SEQ ID NO: 7427

SEQ ID NO: 44703 - DNA, 1422 bp, Corynebacterium diphtheriae; identical to SEQ ID NO: 7428
  CDS (1)..(1422)

SEQ ID NO: 44704 - protein, 473 aa, Corynebacterium diphtheriae; identical to SEQ ID NO: 7429

SEQ ID NO: 44705 - DNA, 3179 bp, Lactobacillus casei; identical to SEQ ID NO: 7430
  CDS (1307)..(3070)

SEQ ID NO: 44706 - protein, 587 aa, Lactobacillus casei; identical to SEQ ID NO: 7431

SEQ ID NO: 44707 - DNA, 1341 bp, Onion yellows phytoplasma; identical to SEQ ID NO: 7432
  CDS (1)..(1341)

SEQ ID NO: 44708 - protein, 446 aa, Onion yellows phytoplasma; identical to SEQ ID NO: 7433

SEQ ID NO: 44709 - DNA, 2023 bp, Oryza sativa; identical to SEQ ID NO: 7434
  CDS (324)..(1688)

SEQ ID NO: 44710 - protein, 454 aa, Oryza sativa; identical to SEQ ID NO: 7435

SEQ ID NO: 44711 - DNA, 1410 bp, Desulfovibrio vulgaris; identical to SEQ ID NO: 7436
  CDS (1)..(1410)

SEQ ID NO: 44712 - protein, 469 aa, Desulfovibrio vulgaris; identical to SEQ ID NO: 7437

SEQ ID NO: 44713 - DNA, 1425 bp, Thermus thermophilus; identical to SEQ ID NO: 7438
  CDS (1)..(1425)

SEQ ID NO: 44714 - protein, 474 aa, Thermus thermophilus; identical to SEQ ID NO: 7439

SEQ ID NO: 44715 - DNA, 1317 bp, Leptospira interrogans; identical to SEQ ID NO: 7440
  CDS (1)..(1317)

SEQ ID NO: 44716 - protein, 438 aa, Leptospira interrogans; identical to SEQ ID NO: 7441

SEQ ID NO: 44717 - DNA, 1758 bp, Bacillus cereus; identical to SEQ ID NO: 7442
  CDS (1)..(1758)

SEQ ID NO: 44718 - protein, 585 aa, Bacillus cereus; identical to SEQ ID NO: 7443

SEQ ID NO: 44719 - DNA, 1059 bp, Bacillus cereus; identical to SEQ ID NO: 7444
  CDS (1)..(1059): Xaa of translated CDS can stand for any naturally occuring amino acid which can be translated from respective CDS-codon

SEQ ID NO: 44720 - protein, 352 aa, Bacillus cereus; identical to SEQ ID NO: 7445
  misc_feature (224)..(224): Xaa can be any naturally occuring amino acid

SEQ ID NO: 44721 - DNA, 1416 bp, Treponema denticola; identical to SEQ ID NO: 7446
  CDS (1)..(1416)

SEQ ID NO: 44722 - protein, 471 aa, Treponema denticola; identical to SEQ ID NO: 7447

SEQ ID NO: 44723 - DNA, 1419 bp, Mycobacterium paratuberculosis; identical to SEQ ID NO: 7448
  CDS (1)..(1419)

SEQ ID NO: 44724 - protein, 472 aa, Mycobacterium paratuberculosis; identical to SEQ ID NO: 7449

SEQ ID NO: 44725 - DNA, 1443 bp, Geobacter sulfurreducens; identical to SEQ ID NO: 7450
  CDS (1)..(1443)

SEQ ID NO: 44726 - protein, 480 aa, Geobacter sulfurreducens; identical to SEQ ID NO: 7451

SEQ ID NO: 44727 - DNA, 1770 bp, Lactobacillus johnsonii; identical to SEQ ID NO: 7452
  CDS (1)..(1770)

SEQ ID NO: 44728 - protein, 589 aa, Lactobacillus johnsonii; identical to SEQ ID NO: 7453

SEQ ID NO: 44729 - DNA, 1506 bp, Ashbya gossypii; identical to SEQ ID NO: 7454
  CDS (1)..(1506)

SEQ ID NO: 44730 - protein, 501 aa, Ashbya gossypii; identical to SEQ ID NO: 7455

SEQ ID NO: 44731 - DNA, 1461 bp, Leptospira interrogans; identical to SEQ ID NO: 7456
  CDS (1)..(1461)

SEQ ID NO: 44732 - protein, 486 aa, Leptospira interrogans; identical to SEQ ID NO: 7457

SEQ ID NO: 44733 - DNA, 1519 bp, Bombyx mori; identical to SEQ ID NO: 7458
  CDS (130)..(1341)

SEQ ID NO: 44734 - protein, 403 aa, Bombyx mori; identical to SEQ ID NO: 7459

SEQ ID NO: 44735 - DNA, 1437 bp, Pyrococcus kodakaraensis; identical to SEQ ID NO: 7460
  CDS (1)..(1437)

SEQ ID NO: 44736 - protein, 478 aa, Pyrococcus kodakaraensis; identical to SEQ ID NO: 7461

SEQ ID NO: 44737 - DNA, 1503 bp, Streptococcus pyogenes; identical to SEQ ID NO: 7462
  CDS (1)..(1503)

SEQ ID NO: 44738 - protein, 500 aa, Streptococcus pyogenes; identical to SEQ ID NO: 7463

SEQ ID NO: 44739 - DNA, 1476 bp, Vibrio vulnificus; identical to SEQ ID NO: 7464
  CDS (1)..(1476)

SEQ ID NO: 44740 - protein, 491 aa, Vibrio vulnificus; identical to SEQ ID NO: 7465

SEQ ID NO: 44741 - DNA, 1449 bp, Vibrio vulnificus; identical to SEQ ID NO: 7466
  CDS (1)..(1449)

SEQ ID NO: 44742 - protein, 482 aa, Vibrio vulnificus; identical to SEQ ID NO: 7467

SEQ ID NO: 44743 - DNA, 1410 bp, Photorhabdus luminescens; identical to SEQ ID NO: 7468
  CDS (1)..(1410)

SEQ ID NO: 44744 - protein, 469 aa, Photorhabdus luminescens; identical to SEQ ID NO: 7469

SEQ ID NO: 44745 - DNA, 1443 bp, Photorhabdus luminescens; identical to SEQ ID NO: 7470
  CDS (1)..(1443)

SEQ ID NO: 44746 - protein, 480 aa, Photorhabdus luminescens; identical to SEQ ID NO: 7471

SEQ ID NO: 44747 - DNA, 1527 bp, Mycoplasma gallisepticum; identical to SEQ ID NO: 7472
  CDS (1)..(1527)

SEQ ID NO: 44748 - protein, 508 aa, Mycoplasma gallisepticum; identical to SEQ ID NO: 7473

SEQ ID NO: 44749 - DNA, 1818 bp, Gloeobacter violaceus; identical to SEQ ID NO: 7474
  CDS (1)..(1818)

SEQ ID NO: 44750 - protein, 605 aa, Gloeobacter violaceus; identical to SEQ ID NO: 7475

SEQ ID NO: 44751 - DNA, 1422 bp, Gloeobacter violaceus; identical to SEQ ID NO: 7476
  CDS (1)..(1422)

SEQ ID NO: 44752 - protein, 473 aa, Gloeobacter violaceus; identical to SEQ ID NO: 7477

SEQ ID NO: 44753 - DNA, 1407 bp, Chromobacterium violaceum; identical to SEQ ID NO: 7478
  CDS (1)..(1407)

SEQ ID NO: 44754 - protein, 468 aa, Chromobacterium violaceum; identical to SEQ ID NO: 7479

SEQ ID NO: 44755 - DNA, 1662 bp, Giardia lamblia ATCC 50803; identical to SEQ ID NO: 7480
  CDS (1)..(1662)

SEQ ID NO: 44756 - protein, 553 aa, Giardia lamblia ATCC 50803; identical to SEQ ID NO: 7481

SEQ ID NO: 44757 - DNA, 1536 bp, Plasmodium yoelii yoelii; identical to SEQ ID NO: 7482
  CDS (1)..(1536)

SEQ ID NO: 44758 - protein, 511 aa, Plasmodium yoelii yoelii; identical to SEQ ID NO: 7483

SEQ ID NO: 44759 - DNA, 1584 bp, Neurospora crassa; identical to SEQ ID NO: 7484
  CDS (1)..(1584)

SEQ ID NO: 44760 - protein, 527 aa, Neurospora crassa; identical to SEQ ID NO: 7485

SEQ ID NO: 44761 - DNA, 1455 bp, Synechococcus sp; identical to SEQ ID NO: 7486
  CDS (1)..(1455)

SEQ ID NO: 44762 - protein, 484 aa, Synechococcus sp; identical to SEQ ID NO: 7487

SEQ ID NO: 44763 - DNA, 1431 bp, Rhodopirellula baltica; identical to SEQ ID NO: 7488
  CDS (1)..(1431)

SEQ ID NO: 44764 - protein, 476 aa, Rhodopirellula baltica; identical to SEQ ID NO: 7489

SEQ ID NO: 44765 - DNA, 1791 bp, Prochlorococcus marinus subsp; identical to SEQ ID NO: 7490
  CDS (1)..(1791)

SEQ ID NO: 44766 - protein, 596 aa, Prochlorococcus marinus subsp; identical to SEQ ID NO: 7491

SEQ ID NO: 44767 - DNA, 1818 bp, Prochlorococcus marinus; identical to SEQ ID NO: 7492
  CDS (1)..(1818)

SEQ ID NO: 44768 - protein, 605 aa, Prochlorococcus marinus; identical to SEQ ID NO: 7493

SEQ ID NO: 44769 - DNA, 1785 bp, Prochlorococcus marinus; identical to SEQ ID NO: 7494
  CDS (1)..(1785)

SEQ ID NO: 44770 - protein, 594 aa, Prochlorococcus marinus; identical to SEQ ID NO: 7495

SEQ ID NO: 44771 - DNA, 1440 bp, Haemophilus ducreyi; identical to SEQ ID NO: 7496
  CDS (1)..(1440)

SEQ ID NO: 44772 - protein, 479 aa, Haemophilus ducreyi; identical to SEQ ID NO: 7497

SEQ ID NO: 44773 - DNA, 1467 bp, Candidatus Blochmannia floridanus; identical to SEQ ID NO: 7498
  CDS (1)..(1467)

SEQ ID NO: 44774 - protein, 488 aa, Candidatus Blochmannia floridanus; identical to SEQ ID NO: 7499

SEQ ID NO: 44775 - DNA, 1443 bp, Bordetella parapertussis; identical to SEQ ID NO: 7500
  CDS (1)..(1443)

SEQ ID NO: 44776 - protein, 480 aa, Bordetella parapertussis; identical to SEQ ID NO: 7501

SEQ ID NO: 44777 - DNA, 2002 bp, Oryza sativa; identical to SEQ ID NO: 7502
  CDS (113)..(1648)

SEQ ID NO: 44778 - protein, 511 aa, Oryza sativa; identical to SEQ ID NO: 7503

SEQ ID NO: 44779 - DNA, 1071 bp, Bacillus cereus; identical to SEQ ID NO: 7504
  CDS (1)..(1071)

SEQ ID NO: 44780 - protein, 356 aa, Bacillus cereus; identical to SEQ ID NO: 7505

SEQ ID NO: 44781 - DNA, 1059 bp, Bacillus anthracis; identical to SEQ ID NO: 7506
  CDS (1)..(1059)

SEQ ID NO: 44782 - protein, 352 aa, Bacillus anthracis; identical to SEQ ID NO: 7507

SEQ ID NO: 44783 - DNA, 1446 bp, Chlamydophila caviae; identical to SEQ ID NO: 7508
  CDS (1)..(1446)

SEQ ID NO: 44784 - protein, 481 aa, Chlamydophila caviae; identical to SEQ ID NO: 7509

SEQ ID NO: 44785 - DNA, 1437 bp, Streptomyces avermitilis; identical to SEQ ID NO: 7510
  CDS (1)..(1437)

SEQ ID NO: 44786 - protein, 478 aa, Streptomyces avermitilis; identical to SEQ ID NO: 7511

SEQ ID NO: 44787 - DNA, 1431 bp, Streptomyces avermitilis; identical to SEQ ID NO: 7512
  CDS (1)..(1431)

SEQ ID NO: 44788 - protein, 476 aa, Streptomyces avermitilis; identical to SEQ ID NO: 7513

SEQ ID NO: 44789 - DNA, 1491 bp, Nitrosomonas europaea; identical to SEQ ID NO: 7514
  CDS (1)..(1491)

SEQ ID NO: 44790 - protein, 496 aa, Nitrosomonas europaea; identical to SEQ ID NO: 7515

SEQ ID NO: 44791 - DNA, 1758 bp, Enterococcus faecalis; identical to SEQ ID NO: 7516
  CDS (1)..(1758)

SEQ ID NO: 44792 - protein, 585 aa, Enterococcus faecalis; identical to SEQ ID NO: 7517

SEQ ID NO: 44793 - DNA, 1434 bp, Coxiella burnetii; identical to SEQ ID NO: 7518
  CDS (1)..(1434)

SEQ ID NO: 44794 - protein, 477 aa, Coxiella burnetii; identical to SEQ ID NO: 7519

SEQ ID NO: 44795 - DNA, 1422 bp, Tropheryma whipplei; identical to SEQ ID NO: 7520
  CDS (1)..(1422)

SEQ ID NO: 44796 - protein, 473 aa, Tropheryma whipplei; identical to SEQ ID NO: 7521

SEQ ID NO: 44797 - DNA, 1416 bp, Tropheryma whipplei; identical to SEQ ID NO: 7522
  CDS (1)..(1416)

SEQ ID NO: 44798 - protein, 471 aa, Tropheryma whipplei; identical to SEQ ID NO: 7523

SEQ ID NO: 44799 - DNA, 1584 bp, Shigella flexneri; identical to SEQ ID NO: 7524
  CDS (1)..(1584)

SEQ ID NO: 44800 - protein, 527 aa, Shigella flexneri; identical to SEQ ID NO: 7525

SEQ ID NO: 44801 - DNA, 1425 bp, Microbispora rosea subsp; identical to SEQ ID NO: 7526
  CDS (1)..(1425)

SEQ ID NO: 44802 - protein, 474 aa, Microbispora rosea subsp; identical to SEQ ID NO: 7527

SEQ ID NO: 44803 - DNA, 1806 bp, Oryza sativa; identical to SEQ ID NO: 7528
  CDS (75)..(1721)

SEQ ID NO: 44804 - protein, 548 aa, Oryza sativa; identical to SEQ ID NO: 7529

SEQ ID NO: 44805 - DNA, 1506 bp, Kluyveromyces lactis; identical to SEQ ID NO: 7530
  CDS (1)..(1506)

SEQ ID NO: 44806 - protein, 501 aa, Kluyveromyces lactis; identical to SEQ ID NO: 7531

SEQ ID NO: 44807 - DNA, 1506 bp, Saccharomyces kluyveri; identical to SEQ ID NO: 7532
  CDS (1)..(1506)

SEQ ID NO: 44808 - protein, 501 aa, Saccharomyces kluyveri; identical to SEQ ID NO: 7533

SEQ ID NO: 44809 - DNA, 1506 bp, Saccharomyces castellii; identical to SEQ ID NO: 7534
  CDS (1)..(1506)

SEQ ID NO: 44810 - protein, 501 aa, Saccharomyces castellii; identical to SEQ ID NO: 7535

SEQ ID NO: 44811 - DNA, 1521 bp, Saccharomyces bayanus; identical to SEQ ID NO: 7536
  CDS (1)..(1521)

SEQ ID NO: 44812 - protein, 506 aa, Saccharomyces bayanus; identical to SEQ ID NO: 7537

SEQ ID NO: 44813 - DNA, 1467 bp, Xylella fastidiosa; identical to SEQ ID NO: 7538
  CDS (1)..(1467)

SEQ ID NO: 44814 - protein, 488 aa, Xylella fastidiosa; identical to SEQ ID NO: 7539

SEQ ID NO: 44815 - DNA, 1479 bp, Vibrio parahaemolyticus; identical to SEQ ID NO: 7540
  CDS (1)..(1479)

SEQ ID NO: 44816 - protein, 492 aa, Vibrio parahaemolyticus; identical to SEQ ID NO: 7541

SEQ ID NO: 44817 - DNA, 1443 bp, Vibrio parahaemolyticus; identical to SEQ ID NO: 7542
  CDS (1)..(1443)

SEQ ID NO: 44818 - protein, 480 aa, Vibrio parahaemolyticus; identical to SEQ ID NO: 7543

SEQ ID NO: 44819 - DNA, 1413 bp, Vibrio parahaemolyticus; identical to SEQ ID NO: 7544
  CDS (1)..(1413)

SEQ ID NO: 44820 - protein, 470 aa, Vibrio parahaemolyticus; identical to SEQ ID NO: 7545

SEQ ID NO: 44821 - DNA, 1452 bp, Pseudomonas syringae; identical to SEQ ID NO: 7546
  CDS (1)..(1452)

SEQ ID NO: 44822 - protein, 483 aa, Pseudomonas syringae; identical to SEQ ID NO: 7547

SEQ ID NO: 44823 - DNA, 1416 bp, Pseudomonas putida; identical to SEQ ID NO: 7548
  CDS (1)..(1416)

SEQ ID NO: 44824 - protein, 471 aa, Pseudomonas putida; identical to SEQ ID NO: 7549

SEQ ID NO: 44825 - DNA, 1455 bp, Pseudomonas putida; identical to SEQ ID NO: 7550
  CDS (1)..(1455)

SEQ ID NO: 44826 - protein, 484 aa, Pseudomonas putida; identical to SEQ ID NO: 7551

SEQ ID NO: 44827 - DNA, 1761 bp, Lactobacillus plantarum; identical to SEQ ID NO: 7552
  CDS (1)..(1761)

SEQ ID NO: 44828 - protein, 586 aa, Lactobacillus plantarum; identical to SEQ ID NO: 7553

SEQ ID NO: 44829 - DNA, 1755 bp, Clostridium tetani; identical to SEQ ID NO: 7554
  CDS (1)..(1755)

SEQ ID NO: 44830 - protein, 584 aa, Clostridium tetani; identical to SEQ ID NO: 7555

SEQ ID NO: 44831 - DNA, 1437 bp, Bradyrhizobium japonicum; identical to SEQ ID NO: 7556
  CDS (1)..(1437)

SEQ ID NO: 44832 - protein, 478 aa, Bradyrhizobium japonicum; identical to SEQ ID NO: 7557

SEQ ID NO: 44833 - DNA, 1458 bp, Bacteroides thetaiotaomicron; identical to SEQ ID NO: 7558
  CDS (1)..(1458)

SEQ ID NO: 44834 - protein, 485 aa, Bacteroides thetaiotaomicron; identical to SEQ ID NO: 7559

SEQ ID NO: 44835 - DNA, 2797 bp, Staphylococcus epidermidis; identical to SEQ ID NO: 7560
  CDS (854)..(2611)

SEQ ID NO: 44836 - protein, 585 aa, Staphylococcus epidermidis; identical to SEQ ID NO: 7561

SEQ ID NO: 44837 - DNA, 1440 bp, Wigglesworthia glossinidia brevipalpis; identical to SEQ ID NO: 7562
  CDS (1)..(1440)

SEQ ID NO: 44838 - protein, 479 aa, Wigglesworthia glossinidia brevipalpis; identical to SEQ ID NO: 7563

SEQ ID NO: 44839 - DNA, 1413 bp, Vibrio vulnificus; identical to SEQ ID NO: 7564
  CDS (1)..(1413)

SEQ ID NO: 44840 - protein, 470 aa, Vibrio vulnificus; identical to SEQ ID NO: 7565

SEQ ID NO: 44841 - DNA, 1785 bp, Synechococcus elongatus; identical to SEQ ID NO: 7566
  CDS (1)..(1785)

SEQ ID NO: 44842 - protein, 594 aa, Synechococcus elongatus; identical to SEQ ID NO: 7567

SEQ ID NO: 44843 - DNA, 1503 bp, Streptococcus mutans; identical to SEQ ID NO: 7568
  CDS (1)..(1503)

SEQ ID NO: 44844 - protein, 500 aa, Streptococcus mutans; identical to SEQ ID NO: 7569

SEQ ID NO: 44845 - DNA, 1503 bp, Streptococcus agalactiae; identical to SEQ ID NO: 7570
  CDS (1)..(1503)

SEQ ID NO: 44846 - protein, 500 aa, Streptococcus agalactiae; identical to SEQ ID NO: 7571

SEQ ID NO: 44847 - DNA, 1440 bp, Shewanella oneidensis; identical to SEQ ID NO: 7572
  CDS (1)..(1440)

SEQ ID NO: 44848 - protein, 479 aa, Shewanella oneidensis; identical to SEQ ID NO: 7573

SEQ ID NO: 44849 - DNA, 1761 bp, Oceanobacillus iheyensis; identical to SEQ ID NO: 7574
  CDS (1)..(1761)

SEQ ID NO: 44850 - protein, 586 aa, Oceanobacillus iheyensis; identical to SEQ ID NO: 7575

SEQ ID NO: 44851 - DNA, 1497 bp, Mycoplasma penetrans; identical to SEQ ID NO: 7576
  CDS (1)..(1497): transl_table=4

SEQ ID NO: 44852 - protein, 498 aa, Mycoplasma penetrans; identical to SEQ ID NO: 7577

SEQ ID NO: 44853 - DNA, 1584 bp, Escherichia coli O6; identical to SEQ ID NO: 7578
  CDS (1)..(1584)

SEQ ID NO: 44854 - protein, 527 aa, Escherichia coli O6; identical to SEQ ID NO: 7579

SEQ ID NO: 44855 - DNA, 1437 bp, Brucella suis; identical to SEQ ID NO: 7580
  CDS (1)..(1437)

SEQ ID NO: 44856 - protein, 478 aa, Brucella suis; identical to SEQ ID NO: 7581

SEQ ID NO: 44857 - DNA, 1530 bp, Bifidobacterium longum; identical to SEQ ID NO: 7582
  CDS (1)..(1530)

SEQ ID NO: 44858 - protein, 509 aa, Bifidobacterium longum; identical to SEQ ID NO: 7583

SEQ ID NO: 44859 - DNA, 1890 bp, Lactobacillus delbrueckii; identical to SEQ ID NO: 7584
  CDS (1)..(1770)

SEQ ID NO: 44860 - protein, 589 aa, Lactobacillus delbrueckii; identical to SEQ ID NO: 7585

SEQ ID NO: 44861 - DNA, 2043 bp, Stigmatella aurantiaca; identical to SEQ ID NO: 7586
  CDS (463)..(1896)

SEQ ID NO: 44862 - protein, 477 aa, Stigmatella aurantiaca; identical to SEQ ID NO: 7587

SEQ ID NO: 44863 - DNA, 1584 bp, Arabidopsis thaliana; identical to SEQ ID NO: 7588
  CDS (1)..(1584)

SEQ ID NO: 44864 - protein, 527 aa, Arabidopsis thaliana; identical to SEQ ID NO: 7589

SEQ ID NO: 44865 - DNA, 1437 bp, Bartonella henselae; identical to SEQ ID NO: 7590
  CDS (1)..(1437)

SEQ ID NO: 44866 - protein, 478 aa, Bartonella henselae; identical to SEQ ID NO: 7591

SEQ ID NO: 44867 - DNA, 1533 bp, Glycine max; identical to SEQ ID NO: 7592
  CDS (1)..(1533)

SEQ ID NO: 44868 - protein, 510 aa, Glycine max; identical to SEQ ID NO: 7593

SEQ ID NO: 44869 - DNA, 1536 bp, Glycine max; identical to SEQ ID NO: 7594
  CDS (1)..(1536)

SEQ ID NO: 44870 - protein, 511 aa, Glycine max; identical to SEQ ID NO: 7595

SEQ ID NO: 44871 - DNA, 1527 bp, Xanthomonas campestris; identical to SEQ ID NO: 7596
  CDS (1)..(1527)

SEQ ID NO: 44872 - protein, 508 aa, Xanthomonas campestris; identical to SEQ ID NO: 7597

SEQ ID NO: 44873 - DNA, 1506 bp, Xanthomonas axonopodis; identical to SEQ ID NO: 7598
  CDS (1)..(1506)

SEQ ID NO: 44874 - protein, 501 aa, Xanthomonas axonopodis; identical to SEQ ID NO: 7599

SEQ ID NO: 44875 - DNA, 1434 bp, Methanosarcina mazei; identical to SEQ ID NO: 7600
  CDS (1)..(1434)

SEQ ID NO: 44876 - protein, 477 aa, Methanosarcina mazei; identical to SEQ ID NO: 7601

SEQ ID NO: 44877 - DNA, 1752 bp, Thermoanaerobacter tengcongensis; identical to SEQ ID NO: 7602
  CDS (1)..(1752)

SEQ ID NO: 44878 - protein, 583 aa, Thermoanaerobacter tengcongensis; identical to SEQ ID NO: 7603

SEQ ID NO: 44879 - DNA, 1428 bp, Fusobacterium nucleatum; identical to SEQ ID NO: 7604
  CDS (1)..(1428)

SEQ ID NO: 44880 - protein, 475 aa, Fusobacterium nucleatum; identical to SEQ ID NO: 7605

SEQ ID NO: 44881 - DNA, 1713 bp, Oryza sativa; identical to SEQ ID NO: 7606
  CDS (1)..(1713)

SEQ ID NO: 44882 - protein, 570 aa, Oryza sativa; identical to SEQ ID NO: 7607

SEQ ID NO: 44883 - DNA, 1872 bp, Oryza sativa; identical to SEQ ID NO: 7608
  CDS (1)..(1872)

SEQ ID NO: 44884 - protein, 623 aa, Oryza sativa; identical to SEQ ID NO: 7609

SEQ ID NO: 44885 - DNA, 1560 bp, Encephalitozoon cuniculi; identical to SEQ ID NO: 7610
  CDS (1)..(1560)

SEQ ID NO: 44886 - protein, 519 aa, Encephalitozoon cuniculi; identical to SEQ ID NO: 7611

SEQ ID NO: 44887 - DNA, 1470 bp, Methanosarcina acetivorans; identical to SEQ ID NO: 7612
  CDS (1)..(1470)

SEQ ID NO: 44888 - protein, 489 aa, Methanosarcina acetivorans; identical to SEQ ID NO: 7613

SEQ ID NO: 44889 - DNA, 1434 bp, Pyrococcus furiosus; identical to SEQ ID NO: 7614
  CDS (1)..(1434)

SEQ ID NO: 44890 - protein, 477 aa, Pyrococcus furiosus; identical to SEQ ID NO: 7615

SEQ ID NO: 44891 - DNA, 1404 bp, Clostridium perfringens; identical to SEQ ID NO: 7616
  CDS (1)..(1404)

SEQ ID NO: 44892 - protein, 467 aa, Clostridium perfringens; identical to SEQ ID NO: 7617

SEQ ID NO: 44893 - DNA, 1419 bp, Ralstonia solanacearum; identical to SEQ ID NO: 7618
  CDS (1)..(1419)

SEQ ID NO: 44894 - protein, 472 aa, Ralstonia solanacearum; identical to SEQ ID NO: 7619

SEQ ID NO: 44895 - DNA, 1440 bp, Ralstonia solanacearum; identical to SEQ ID NO: 7620
  CDS (1)..(1440)

SEQ ID NO: 44896 - protein, 479 aa, Ralstonia solanacearum; identical to SEQ ID NO: 7621

SEQ ID NO: 44897 - DNA, 1443 bp, Salmonella typhimurium; identical to SEQ ID NO: 7622
  CDS (1)..(1443)

SEQ ID NO: 44898 - protein, 480 aa, Salmonella typhimurium; identical to SEQ ID NO: 7623

SEQ ID NO: 44899 - DNA, 1386 bp, Pyrobaculum aerophilum; identical to SEQ ID NO: 7624
  CDS (1)..(1386)

SEQ ID NO: 44900 - protein, 461 aa, Pyrobaculum aerophilum; identical to SEQ ID NO: 7625

SEQ ID NO: 44901 - DNA, 1440 bp, Rhizobium meliloti; identical to SEQ ID NO: 7626
  CDS (1)..(1440)

SEQ ID NO: 44902 - protein, 479 aa, Rhizobium meliloti; identical to SEQ ID NO: 7627

SEQ ID NO: 44903 - DNA, 1745 bp, Mastigamoeba balamuthi; identical to SEQ ID NO: 7628
  CDS (36)..(1541)

SEQ ID NO: 44904 - protein, 501 aa, Mastigamoeba balamuthi; identical to SEQ ID NO: 7629

SEQ ID NO: 44905 - DNA, 2207 bp, Toxoplasma gondii; identical to SEQ ID NO: 7630
  CDS (225)..(1820)

SEQ ID NO: 44906 - protein, 531 aa, Toxoplasma gondii; identical to SEQ ID NO: 7631

SEQ ID NO: 44907 - DNA, 1317 bp, Sulfolobus tokodaii; identical to SEQ ID NO: 7632
  CDS (1)..(1317)

SEQ ID NO: 44908 - protein, 438 aa, Sulfolobus tokodaii; identical to SEQ ID NO: 7633

SEQ ID NO: 44909 - DNA, 1626 bp, Thermoplasma volcanium; identical to SEQ ID NO: 7634
  CDS (1)..(1626)

SEQ ID NO: 44910 - protein, 541 aa, Thermoplasma volcanium; identical to SEQ ID NO: 7635

SEQ ID NO: 44911 - DNA, 1437 bp, Rhizobium loti; identical to SEQ ID NO: 7636
  CDS (1)..(1437)

SEQ ID NO: 44912 - protein, 478 aa, Rhizobium loti; identical to SEQ ID NO: 7637

SEQ ID NO: 44913 - DNA, 1440 bp, Pasteurella multocida; identical to SEQ ID NO: 7638
  CDS (1)..(1440)

SEQ ID NO: 44914 - protein, 479 aa, Pasteurella multocida; identical to SEQ ID NO: 7639

SEQ ID NO: 44915 - DNA, 1880 bp, Arabidopsis thaliana; identical to SEQ ID NO: 7640
  CDS (126)..(1658)

SEQ ID NO: 44916 - protein, 510 aa, Arabidopsis thaliana; identical to SEQ ID NO: 7641

SEQ ID NO: 44917 - DNA, 1517 bp, Arabidopsis thaliana; identical to SEQ ID NO: 7642
  CDS (1)..(1497)

SEQ ID NO: 44918 - protein, 498 aa, Arabidopsis thaliana; identical to SEQ ID NO: 7643

SEQ ID NO: 44919 - DNA, 1564 bp, Arabidopsis thaliana; identical to SEQ ID NO: 7644
  CDS (1)..(1533)

SEQ ID NO: 44920 - protein, 510 aa, Arabidopsis thaliana; identical to SEQ ID NO: 7645

SEQ ID NO: 44921 - DNA, 1581 bp, Aspergillus oryzae; identical to SEQ ID NO: 7646
  CDS (1)..(1581)

SEQ ID NO: 44922 - protein, 526 aa, Aspergillus oryzae; identical to SEQ ID NO: 7647

SEQ ID NO: 44923 - DNA, 1431 bp, Streptomyces coelicolor; identical to SEQ ID NO: 7648
  CDS (1)..(1431)

SEQ ID NO: 44924 - protein, 476 aa, Streptomyces coelicolor; identical to SEQ ID NO: 7649

SEQ ID NO: 44925 - DNA, 1503 bp, Streptococcus thermophilus; identical to SEQ ID NO: 7650
  CDS (1)..(1503)

SEQ ID NO: 44926 - protein, 500 aa, Streptococcus thermophilus; identical to SEQ ID NO: 7651

SEQ ID NO: 44927 - DNA, 2150 bp, Pseudomonas hydrogenothermophila; identical to SEQ ID NO: 7652
  CDS (16)..(1437)

SEQ ID NO: 44928 - protein, 473 aa, Pseudomonas hydrogenothermophila; identical to SEQ ID NO: 7653

SEQ ID NO: 44929 - DNA, 1413 bp, Selenomonas ruminantium; identical to SEQ ID NO: 7654
  CDS (1)..(1413)

SEQ ID NO: 44930 - protein, 470 aa, Selenomonas ruminantium; identical to SEQ ID NO: 7655

SEQ ID NO: 44931 - DNA, 1822 bp, Arabidopsis thaliana; identical to SEQ ID NO: 7656
  CDS (1)..(1791)

SEQ ID NO: 44932 - protein, 596 aa, Arabidopsis thaliana; identical to SEQ ID NO: 7657

SEQ ID NO: 44933 - DNA, 1494 bp, Arabidopsis thaliana; identical to SEQ ID NO: 7658
  CDS (1)..(1494)

SEQ ID NO: 44934 - protein, 497 aa, Arabidopsis thaliana; identical to SEQ ID NO: 7659

SEQ ID NO: 44935 - DNA, 1920 bp, Lilium longiflorum; identical to SEQ ID NO: 7660
  CDS (145)..(1677)

SEQ ID NO: 44936 - protein, 510 aa, Lilium longiflorum; identical to SEQ ID NO: 7661

SEQ ID NO: 44937 - DNA, 1413 bp, Vibrio marinus; identical to SEQ ID NO: 7662
  CDS (1)..(1413)

SEQ ID NO: 44938 - protein, 470 aa, Vibrio marinus; identical to SEQ ID NO: 7663

SEQ ID NO: 44939 - DNA, 1979 bp, Oryza sativa; identical to SEQ ID NO: 7664
  CDS (224)..(1747)

SEQ ID NO: 44940 - protein, 507 aa, Oryza sativa; identical to SEQ ID NO: 7665

SEQ ID NO: 44941 - DNA, 1533 bp, Arabidopsis thaliana; identical to SEQ ID NO: 7666
  CDS (1)..(1533)

SEQ ID NO: 44942 - protein, 510 aa, Arabidopsis thaliana; identical to SEQ ID NO: 7667

SEQ ID NO: 44943 - DNA, 2235 bp, Drosophila melanogaster; identical to SEQ ID NO: 7668
  CDS (1)..(2235)

SEQ ID NO: 44944 - protein, 744 aa, Drosophila melanogaster; identical to SEQ ID NO: 7669

SEQ ID NO: 44945 - DNA, 3033 bp, Drosophila melanogaster; identical to SEQ ID NO: 7670
  CDS (1)..(3033)

SEQ ID NO: 44946 - protein, 1010 aa, Drosophila melanogaster; identical to SEQ ID NO: 7671

SEQ ID NO: 44947 - DNA, 1814 bp, Drosophila melanogaster; identical to SEQ ID NO: 7672
  CDS (83)..(1747)

SEQ ID NO: 44948 - protein, 554 aa, Drosophila melanogaster; identical to SEQ ID NO: 7673

SEQ ID NO: 44949 - DNA, 1425 bp, Agrobacterium vitis; identical to SEQ ID NO: 7674
  CDS (1)..(1425)

SEQ ID NO: 44950 - protein, 474 aa, Agrobacterium vitis; identical to SEQ ID NO: 7675

SEQ ID NO: 44951 - DNA, 1449 bp, Agrobacterium vitis; identical to SEQ ID NO: 7676
  CDS (1)..(1449)

SEQ ID NO: 44952 - protein, 482 aa, Agrobacterium vitis; identical to SEQ ID NO: 7677

SEQ ID NO: 44953 - DNA, 2234 bp, Nicotiana tabacum; identical to SEQ ID NO: 7678
  CDS (59)..(1840)

SEQ ID NO: 44954 - protein, 593 aa, Nicotiana tabacum; identical to SEQ ID NO: 7679

SEQ ID NO: 44955 - DNA, 1599 bp, Agaricus bisporus; identical to SEQ ID NO: 7680
  CDS (1)..(1599)

SEQ ID NO: 44956 - protein, 532 aa, Agaricus bisporus; identical to SEQ ID NO: 7681

SEQ ID NO: 44957 - DNA, 1446 bp, Buchnera aphidicola; identical to SEQ ID NO: 7682
  CDS (1)..(1446)

SEQ ID NO: 44958 - protein, 481 aa, Buchnera aphidicola; identical to SEQ ID NO: 7683

SEQ ID NO: 44959 - DNA, 1440 bp, Buchnera aphidicola; identical to SEQ ID NO: 7684
  CDS (1)..(1440)

SEQ ID NO: 44960 - protein, 479 aa, Buchnera aphidicola; identical to SEQ ID NO: 7685

SEQ ID NO: 44961 - DNA, 2354 bp, Gallus gallus; identical to SEQ ID NO: 7686
  CDS (81)..(1673)

SEQ ID NO: 44962 - protein, 530 aa, Gallus gallus; identical to SEQ ID NO: 7687

SEQ ID NO: 44963 - DNA, 1425 bp, Clostridium perfringens; identical to SEQ ID NO: 7688
  CDS (1)..(1425)

SEQ ID NO: 44964 - protein, 474 aa, Clostridium perfringens; identical to SEQ ID NO: 7689

SEQ ID NO: 44965 - DNA, 1425 bp, Corynebacterium efficiens; identical to SEQ ID NO: 7690
  CDS (1)..(1425)

SEQ ID NO: 44966 - protein, 474 aa, Corynebacterium efficiens; identical to SEQ ID NO: 7691

SEQ ID NO: 44967 - DNA, 2084 bp, Drosophila melanogaster; identical to SEQ ID NO: 7692
  CDS (229)..(1830)

SEQ ID NO: 44968 - protein, 533 aa, Drosophila melanogaster; identical to SEQ ID NO: 7693

SEQ ID NO: 44969 - DNA, 1901 bp, Eimeria tenella; identical to SEQ ID NO: 7694
  CDS (57)..(1652)

SEQ ID NO: 44970 - protein, 531 aa, Eimeria tenella; identical to SEQ ID NO: 7695

SEQ ID NO: 44971 - DNA, 3479 bp, Lactobacillus delbrueckii; identical to SEQ ID NO: 7696
  CDS (1277)..(3046)

SEQ ID NO: 44972 - protein, 589 aa, Lactobacillus delbrueckii; identical to SEQ ID NO: 7697

SEQ ID NO: 44973 - DNA, 1941 bp, Leishmania mexicana; identical to SEQ ID NO: 7698
  CDS (112)..(1611)

SEQ ID NO: 44974 - protein, 499 aa, Leishmania mexicana; identical to SEQ ID NO: 7699

SEQ ID NO: 44975 - DNA, 1452 bp, Methylobacterium extorquens; identical to SEQ ID NO: 7700
  CDS (1)..(1452)

SEQ ID NO: 44976 - protein, 483 aa, Methylobacterium extorquens; identical to SEQ ID NO: 7701

SEQ ID NO: 44977 - DNA, 1439 bp, Mycobacterium intracellulare; identical to SEQ ID NO: 7702
  CDS (1)..(1419)

SEQ ID NO: 44978 - protein, 472 aa, Mycobacterium intracellulare; identical to SEQ ID NO: 7703

SEQ ID NO: 44979 - DNA, 1635 bp, Thermoplasma acidophilum; identical to SEQ ID NO: 7704
  CDS (1)..(1635)

SEQ ID NO: 44980 - protein, 544 aa, Thermoplasma acidophilum; identical to SEQ ID NO: 7705

SEQ ID NO: 44981 - DNA, 1497 bp, Trypanoplasma borreli; identical to SEQ ID NO: 7706
  CDS (1)..(1497)

SEQ ID NO: 44982 - protein, 498 aa, Trypanoplasma borreli; identical to SEQ ID NO: 7707

SEQ ID NO: 44983 - DNA, 1629 bp, Yarrowia lipolytica; identical to SEQ ID NO: 7708
  CDS (1)..(1629)

SEQ ID NO: 44984 - protein, 542 aa, Yarrowia lipolytica; identical to SEQ ID NO: 7709

SEQ ID NO: 44985 - DNA, 1596 bp, Oryctolagus cuniculus; identical to SEQ ID NO: 7710
  CDS (1)..(1596)

SEQ ID NO: 44986 - protein, 531 aa, Oryctolagus cuniculus; identical to SEQ ID NO: 7711

SEQ ID NO: 44987 - DNA, 1799 bp, Xenopus laevis; identical to SEQ ID NO: 7712
  CDS (11)..(1606)

SEQ ID NO: 44988 - protein, 531 aa, Xenopus laevis; identical to SEQ ID NO: 7713

SEQ ID NO: 44989 - DNA, 2404 bp, Brachydanio rerio; identical to SEQ ID NO: 7714
  CDS (37)..(1635)

SEQ ID NO: 44990 - protein, 532 aa, Brachydanio rerio; identical to SEQ ID NO: 7715

SEQ ID NO: 44991 - DNA, 26 bp, Artificial sequence
  Primer sequence
atgtctagattagaaagattgacctc

SEQ ID NO: 44992 - DNA, 25 bp, Artificial sequence
  Primer sequence
ttaaacggtagagacttgcaaagtg

SEQ ID NO: 44993 - protein, 346 aa, Artificial sequence; identical to SEQ ID NO: 9106
  Consensus
  Variant (2)..(6): Xaa in position 2 to 6 is any amino acid
  Variant (8)..(8): Xaa in position 8 is any amino acid
  Variant (14)..(17): Xaa in position 14 to 17 is any amino acid
  Variant (19)..(46): Xaa in position 19 to 46 is any amino acid
  Variant (48)..(49): Xaa in position 48 to 49 is any amino acid
  Variant (52)..(52): Xaa in position 52 is any amino acid
  Variant (55)..(72): Xaa in position 55 to 72 is any amino acid
  Variant (74)..(110): Xaa in position 74 to 110 is any amino acid
  Variant (112)..(117): Xaa in position 112 to 117 is any amino acid
  Variant (120)..(124): Xaa in position 120 to 124 is any amino acid
  Variant (126)..(149): Xaa in position 126 to 149 is any amino acid
  Variant (151)..(155): Xaa in position 151 to 155 is any amino acid
  Variant (157)..(158): Xaa in position 157 to 158 is any amino acid
  Variant (160)..(172): Xaa in position 160 to 172 is any amino acid
  Variant (175)..(176): Xaa in position 175 to 176 is any amino acid
  Variant (178)..(188): Xaa in position 178 to 188 is any amino acid
  Variant (190)..(193): Xaa in position 190 to 193 is any amino acid
  Variant (196)..(200): Xaa in position 196 to 200 is any amino acid
  Variant (202)..(226): Xaa in position 202 to 226 is any amino acid
  Variant (228)..(228): Xaa in position 228 is any amino acid
  Variant (230)..(242): Xaa in position 230 to 242 is any amino acid
  Variant (244)..(247): Xaa in position 244 to 247 is any amino acid
  Variant (249)..(250): Xaa in position 249 to 250 is any amino acid
  Variant (259)..(259): Xaa in position 259 is any amino acid
  Variant (261)..(269): Xaa in position 261 to 269 is any amino acid
  Variant (272)..(273): Xaa in position 272 to 273 is any amino acid
  Variant (275)..(283): Xaa in position 275 to 283 is any amino acid
  Variant (286)..(286): Xaa in position 286 is any amino acid
  Variant (292)..(292): Xaa in position 292 is any amino acid
  Variant (295)..(297): Xaa in position 295 to 297 is any amino acid
  Variant (299)..(299): Xaa in position 299 is any amino acid
  Variant (305)..(306): Xaa in position 305 to 306 is any amino acid
  Variant (309)..(309): Xaa in position 309 is any amino acid
  Variant (312)..(313): Xaa in position 312 to 313 is any amino acid
  Variant (316)..(316): Xaa in position 316 is any amino acid
  Variant (318)..(319): Xaa in position 318 to 319 is any amino acid
  Variant (323)..(323): Xaa in position 323 is any amino acid
  Variant (325)..(325): Xaa in position 325 is any amino acid
  Variant (327)..(327): Xaa in position 327 is any amino acid
  Variant (329)..(330): Xaa in position 329 to 330 is any amino acid
  Variant (332)..(334): Xaa in position 332 to 334 is any amino acid
  Variant (336)..(337): Xaa in position 336 to 337 is any amino acid
  Variant (339)..(345): Xaa in position 339 to 345 is any amino acid

SEQ ID NO: 44994 - protein, 48 aa, Artificial sequence; identical to SEQ ID NO: 9104
  Consensus
  Variant (2)..(2): Xaa in position 2 is Ile, Val or Leu
  Variant (4)..(6): Xaa in position 4 to 6 is any amino acid
  Variant (7)..(7): Xaa in position 7 is Gly, Ala, Ser, Thr or Val
  Variant (8)..(8): Xaa in position 8 is Val, Ile, Leu or Met
  Variant (9)..(10): Xaa in position 9 to 10 is any amino acid
  Variant (11)..(13): Xaa in position 11 to 13 is any or no amino acid
  Variant (14)..(14): Xaa in position 14 is Phe, Ile, Leu or Met
  Variant (15)..(16): Xaa in position 15 to 16 is any amino acid
  Variant (17)..(17): Xaa in position 17 is Ile, Val or Leu
  Variant (18)..(18): Xaa in position 18 is Leu, Ile, Val, Ala or Cys
  Variant (19)..(20): Xaa in position 19 to 20 is any amino acid
  Variant (21)..(21): Xaa in position 21 is Ser, Ala, Thr, Phe or Cys
  Variant (22)..(22): Xaa in position 22 is Asp or Gln
  Variant (23)..(23): Xaa in position 23 is any amino acid
  Variant (24)..(24): Xaa in position 24 is Ile, Val, Leu, Phe or Ala
  Variant (25)..(25): Xaa in position 25 is Met or Ile
  Variant (26)..(26): Xaa in position 26 is Val, Ile or Leu
  Variant (27)..(27): Xaa in position 27 is Ala or Ser
  Variant (31)..(31): Xaa in position 31 is Leu or Met
  Variant (32)..(32): Xaa in position 32 is Gly or Ala
  Variant (33)..(33): Xaa in position 33 is Val, Ile, Met, Ala or Leu
  Variant (34)..(34): Xaa in position 34 is Glu or Gln
  Variant (35)..(35): Xaa in position 35 is Ile, Leu, Val, Met, Cys or Tyr
  Variant (36)..(39): Xaa in position 36 to 39 is any amino acid
  Variant (40)..(40): Xaa in position 40 is Val, Leu, Ile or Met
  Variant (41)..(43): Xaa in position 41 to 43 is any amino acid
  Variant (44)..(44): Xaa in position 44 is Gln or Glu
  Variant (45)..(45): Xaa in position 45 is Lys, Arg, Glu or Gln
  Variant (46)..(46): Xaa in position 46 is any amino acid
  Variant (47)..(47): Xaa in position 47 is Ile, Leu, Met or Ala
  Variant (48)..(48): Xaa in position 48 is Ile, Val, Thr, Leu or Ala

SEQ ID NO: 44995 - protein, 63 aa, Artificial sequence; identical to SEQ ID NO: 9105
  Consensus
  Variant (1)..(1): Xaa in position 1 is Val, Ile, Ala, Cys, Ser or Thr
  Variant (2)..(2): Xaa in position 2 is Ile, Val or Ala
  Variant (3)..(3): Xaa in position 3 is any or no amino acid
  Variant (5)..(5): Xaa in position 5 is Thr or Ser
  Variant (6)..(6): Xaa in position 6 is Gln, Asn, His or Glu
  Variant (7)..(7): Xaa in position 7 is Met, Leu, Val or Ile
  Variant (8)..(8): Xaa in position 8 is Leu, Met or Val
  Variant (9)..(9): Xaa in position 9 is any amino acid
  Variant (10)..(10): Xaa in position 10 is Ser or Thr
  Variant (11)..(11): Xaa in position 11 is Met or Leu
  Variant (12)..(16): Xaa in position 12 to 16 is any amino acid
  Variant (17)..(17): Xaa in position 17 is Pro or Ala
  Variant (20)..(20): Xaa in position 20 is Ala or Ser
  Variant (22)..(22): Xaa in position 22 is Val, Ala, Ile, Thr or Gly
  Variant (23)..(23): Xaa in position 23 is any amino acid
  Variant (25)..(25): Xaa in position 25 is Val or Ile
  Variant (26)..(26): Xaa in position 26 is Ala, Gly, Phe, Ser, Tyr or Thr
  Variant (27)..(27): Xaa in position 27 is any amino acid
  Variant (28)..(28): Xaa in position 28 is Ala or Ser
  Variant (29)..(29): Xaa in position 29 is Val, Ile or Thr
  Variant (30)..(32): Xaa in position 30 to 32 is any amino acid
  Variant (33)..(33): Xaa in position 33 is Thr, Ala, Ser or Val
  Variant (34)..(34): Xaa in position 34 is Asp, Ser or Asn
  Variant (35)..(35): Xaa in position 35 is Ala, Cys, Ser or Gly
  Variant (36)..(36): Xaa in position 36 is Val, Ile, Thr or Leu
  Variant (37)..(37): Xaa in position 37 is Met or Leu
  Variant (39)..(39): Xaa in position 39 is Ser or Thr
  Variant (40)..(40): Xaa in position 40 is Gly, Ala, Asn or Glu
  Variant (42)..(42): Xaa in position 42 is Thr or Ser
  Variant (43)..(43): Xaa in position 43 is Ala, Ser or Thr
  Variant (44)..(44): Xaa in position 44 is any amino acid
  Variant (46)..(46): Xaa in position 46 is any amino acid
  Variant (47)..(47): Xaa in position 47 is Tyr, Phe, His, Asp or Trp
  Variant (49)..(50): Xaa in position 49 to 50 is any amino acid
  Variant (51)..(51): Xaa in position 51 is Ala, Thr, Ser, Val or Cys
  Variant (52)..(52): Xaa in position 52 is Val, Ile, Leu or Ala
  Variant (53)..(54): Xaa in position 53 to 54 is any amino acid
  Variant (55)..(55): Xaa in position 55 is Met, Leu or Gln
  Variant (56)..(57): Xaa in position 56 to 57 is any amino acid
  Variant (58)..(58): Xaa in position 58 is Ile, Val, Thr or Ala
  Variant (59)..(61): Xaa in position 59 to 61 is any amino acid
  Variant (62)..(62): Xaa in position 62 is Ala, Thr, Val, Ile or Ser
  Variant (63)..(63): Xaa in position 63 is Glu, Asp or Gln

SEQ ID NO: 44996 - DNA, 1032 bp, Saccharomyces cerevisiae
  CDS (1)..(1032)
atggtcaaagtcgcaattcttggcgcttctggtggcgtgggacaaccgctatcattactgctaaaattaagcccttacgtttccgagctggcgttgtacgatatccgagctgcggaaggcattggtaaggatttatctcacatcaacaccaactcaagttgtgtcggttatgataaggatagtattgagaacaccttgtcaaatgctcaggtggtgctaataccggctggtgttcccagaaagcccggtttaactagagatgatttgttcaagatgaacgccggtattgtcaaaagcctggtaaccgctgttggaaagttcgcaccaaatgcgaggattttagtcatttcaaaccctgtaaacagtttggtccctattgctgtggaaactttgaagaaaatgggtaagttcaaacctggaaacgttatgggtgtgacgaaccttgacctggtacgtgcagaaacctttttggtagattatttgatgctaaaaaaccccaaaattggacaagaacaagacaaaactacaatgcacagaaaggtcactgttattgggggtcattcaggggaaaccattatcccaataatcaccgacaaatcgctggtatttcaacttgataagcagtacgagcacttcattcatagggtccagttcggaggtgatgaaattgtcaaagctaaacagggcgccggttccgccacgttgtccatggcgttcgcgggggccaagtttgctgaagaagttttgaggagcttccataatgagaaaccagaaacggagtcactttccgcattcgtttatttaccaggcttaaaaaacggtaagaaagcgcagcaattagttggcgacaactctattgagtatttttccttgccaattgttttgagaaatggtagcgtagtatccatcgataccagtgttctggaaaaactgtctccgagagaggaacaactcgttaatactgcggtcaaagagctacgcaagaatattgaaaaaggcaagagtttcatcctagactcttccaagctatga

SEQ ID NO: 44997 - protein, 343 aa, Saccharomyces cerevisiae
MVKVAILGASGGVGQPLSLLLKLSPYVSELALYDIRAAEGIGKDLSHINTNSSCVGYDKDSIENTLSNAQVVLIPAGVPRKPGLTRDDLFKMNAGIVKSLVTAVGKFAPNARILVISNPVNSLVPIAVETLKKMGKFKPGNVMGVTNLDLVRAETFLVDYLMLKNPKIGQEQDKTTMHRKVTVIGGHSGETIIPIITDKSLVFQLDKQYEHFIHRVQFGGDEIVKAKQGAGSATLSMAFAGAKFAEEVLRSFHNEKPETESLSAFVYLPGLKNGKKAQQLVGDNSIEYFSLPIVLRNGSVVSIDTSVLEKLSPREEQLVNTAVKELRKNIEKGKSFILDSSKL

SEQ ID NO: 44998 - DNA, 960 bp, Francisella tularensis subsp. tularensis
  CDS (1)..(960)
atggctagaaaaaaaataacacttgttggtgctggtaatattggtggtacactagctcacttagcacttataaaacaattaggtgatgtagtcctttttgatatagctcagggcatgcctaatggcaaagcacttgatttactacaaacttgccctatcgagggagttgattttaaagtcaggggtacaaatgattacaaagatttagaaaattctgatgttgttattgtaactgctggtgttccgagaaagcctggcatgtctcgtgatgacctacttggtattaatatcaaagtaatgcaaacagtcggagaaggtatcaaacataactgtcctaatgctttcgtaatatgtatcacaaatccactagatattatggtaaatatgttacaaaaattctcaggcgtaccagataacaaaatcgttggtatggctggtgttttagattctgctagatttagaacatttttagcagatgaactaaatgtatcagtacaacaagtacaagcatatgtaatgggcggtcatggcgatactatggtccctctaactaaaatgtcaaatgttgcaggtgtgtcgttagagcagctagttaaagaaggtaaacttaaacaagagcgtttagatgctatagtatcgagaactagaagtggtggtggcgaaattgttgctttacttaaaacaggttcagcatattatgcaccagctgctgcaggtattcaaatggctgaaagcttcttaaaagataaaaagatgattttaccttgtgctgcaaaagtaaaagctggtatgtatggccttgatgaagatctatttgttggtgtaccaactgagatttctgcaaatggtgtcagacctattgaagtagagatttctgataaagaaagagaacaattacaagtatctataaacgctataaaagatcttaataaagcagctgctgaaattttagcaaaataa

SEQ ID NO: 44999 - protein, 319 aa, Francisella tularensis subsp. tularensis
MARKKITLVGAGNIGGTLAHLALIKQLGDVVLFDIAQGMPNGKALDLLQTCPIEGVDFKVRGTNDYKDLENSDVVIVTAGVPRKPGMSRDDLLGINIKVMQTVGEGIKHNCPNAFVICITNPLDIMVNMLQKFSGVPDNKIVGMAGVLDSARFRTFLADELNVSVQQVQAYVMGGHGDTMVPLTKMSNVAGVSLEQLVKEGKLKQERLDAIVSRTRSGGGEIVALLKTGSAYYAPAAAGIQMAESFLKDKKMILPCAAKVKAGMYGLDEDLFVGVPTEISANGVRPIEVEISDKEREQLQVSINAIKDLNKAAAEILAK

SEQ ID NO: 45000 - DNA, 1017 bp, Homo sapiens
  CDS (1)..(1017)
atgctctccgccctcgcccggcctgccagcgctgctctccgccgcagcttcagcacctcggcccagaacaatgctaaagtagctgtgctaggggcctctggaggcatcgggcagccactttcacttctcctgaagaacagccccttggtgagccgcctgaccctctatgatatcgcgcacacacccggagtggccgcagatctgagccacatcgagaccaaagccgctgtgaaaggctacctcggacctgaacagctgcctgactgcctgaaaggttgtgatgtggtagttattccggctggagtccccagaaagccaggcatgacccgggacgacctgttcaacaccaatgccacgattgtggccaccctgaccgctgcctgtgcccagcactgcccggaagccatgatctgcgtcattgccaatccggttaattccaccatccccatcacagcagaagttttcaagaagcatggagtgtacaaccccaacaaaatcttcggcgtgacgaccctggacatcgtcagagccaacacctttgttgcagagctgaagggtttggatccagctcgagtcaacgtccctgtcattggtggccatgctgggaagaccatcatccccctgatctctcagtgcacccccaaggtggactttccccaggaccagctgacagcactcactgggcggatccaggaggccggcacggaggtggtcaaggctaaagccggagcaggctctgccaccctctccatggcgtatgccggcgcccgctttgtcttctcccttgtggatgcaatgaatggaaaggaaggtgttgtggaatgttccttcgttaagtcacaggaaacggaatgtacctacttctccacaccgctgctgcttgggaaaaagggcatcgagaagaacctgggcatcggcaaagtctcctcttttgaggagaagatgatctcggatgccatccccgagctgaaggcctccatcaagaagggggaagatttcgtgaagaccctgaagtga

SEQ ID NO: 45001 - protein, 338 aa, Homo sapiens
MLSALARPASAALRRSFSTSAQNNAKVAVLGASGGIGQPLSLLLKNSPLVSRLTLYDIAHTPGVAADLSHIETKAAVKGYLGPEQLPDCLKGCDVVVIPAGVPRKPGMTRDDLFNTNATIVATLTAACAQHCPEAMICVIANPVNSTIPITAEVFKKHGVYNPNKIFGVTTLDIVRANTFVAELKGLDPARVNVPVIGGHAGKTIIPLISQCTPKVDFPQDQLTALTGRIQEAGTEVVKAKAGAGSATLSMAYAGARFVFSLVDAMNGKEGVVECSFVKSQETECTYFSTPLLLGKKGIEKNLGIGKVSSFEEKMISDAIPELKASIKKGEDFVKTLK

SEQ ID NO: 45002 - DNA, 1017 bp, Mus musculus
  CDS (1)..(1017)
atgctgtccgctctcgcccgtcctgccggcgccgctctccgccgcagcttcagcacttcggcccagaacaatgctaaagtggctgtcctgggagcttctgggggcattgggcaacccctttcactcctgctgaagaacagccccctagtgagccgcctgaccctctacgatatcgctcacacacctggtgtggcagcagatctgagtcacattgagaccagagcaaatgtgaaaggctaccttggaccggagcagttgccagattgcctcaaaggttgtgatgtggtggtcatcccagccggagtgcccaggaaaccaggaatgacacgggatgacctgttcaacaccaacgctaccattgtggccaccctgacggctgcctgtgcccagcactgtcctgaagccatggtttgcatcattgccaacccagtgaactccaccatccccatcacagcagaagttttcaagaagcacggtgtgtacaaccctaacaagatcttcggtgtgacaacccttgacatcgtcagagcgaacacgtttgtggcagagctaaagggtttggatccagctcgagtcaacgtgcctgtcattggcggccacgccgggaagacgatcatccccctgatctctcagtgtaccccgaaggttgactttccccaagaccagctggccacactcaccgggaggatccaggaggctggcacagaagtcgtgaaggccaaggctggagcaggttctgccactctgtccatggcttatgctggagcccgctttgtcttctccctcgtggacgccatgaacgggaaggaaggagtcgttgagtgttcttttgttcagtccaaagagacggaatgcacttacttctctacgcccttgctcttggggaaaaagggcctggagaagaacctgggcattggcaagatcactccttttgaggaaaaaatgattgccgaggctatccctgagctgaaagcctccatcaagaaaggcgaggactttgtcaagaacatgaagtga

SEQ ID NO: 45003 - protein, 338 aa, Mus musculus
MLSALARPAGAALRRSFSTSAQNNAKVAVLGASGGIGQPLSLLLKNSPLVSRLTLYDIAHTPGVAADLSHIETRANVKGYLGPEQLPDCLKGCDVVVIPAGVPRKPGMTRDDLFNTNATIVATLTAACAQHCPEAMVCIIANPVNSTIPITAEVFKKHGVYNPNKIFGVTTLDIVRANTFVAELKGLDPARVNVPVIGGHAGKTIIPLISQCTPKVDFPQDQLATLTGRIQEAGTEVVKAKAGAGSATLSMAYAGARFVFSLVDAMNGKEGVVECSFVQSKETECTYFSTPLLLGKKGLEKNLGIGKITPFEEKMIAEAIPELKASIKKGEDFVKNMK

SEQ ID NO: 45004 - DNA, 1026 bp, Arabidopsis thaliana
  CDS (1)..(1026)
atgttccgatcaatgattgttcgatctgcttccccagtgaagcagggtcttctccgcagaggattcgcctctgaatctgttcccgatcgcaaagtcgtcatcctcggtgccgccggtgggatcggccagccactttctcttctcatgaagcttaaccctctcgtctcttctctctccctctatgatatcgccaacactcccggcgttgctgctgacgtcggtcacatcaacacccgatctcaggtttctgggtacatgggtgatgatgatttggggaaagctctagaaggcgctgacctcgtcattattccagctggtgtcccaaggaagcctggcatgacccgtgatgatcttttcaacatcaatgctggcattgtcaagaacctcagcatcgccatcgccaagtattgcccacaagcacttgtcaacatgatcagcaaccctgtgaactccactgttccaattgcagctgagatttttaagaaggctggtacctatgatgagaagaaattattcggtgtcaccactcttgatgttgtcagggctaggactttctatgctggaaaatcggatgtcaatgttgcagaggttaatgttccagttgttggtggtcatgctggcatcacgattcttcctctcttttctcaggctagccctcaagccaacttgtcggatgatttaatcagggccctcacaaagcgtacccaggacggagggacagaagtcgtggaggcaaaagctggaaagggttcagctacattgtcaatggcctatgcgggagcactctttgctgatgcatgcttaaagggactcaacggtgttccaaatgtggtggaatgctcattcgtccaatctaccatcaccgagcttcctttcttcgcctcaaaggtaagactgggaaagaacggagtggaggaagtgctagatctagggccactctcagactttgaaaaggaaggcttagaagccctcaaggcagaactcaaatcctctatcgagaagggcatcaaatttgccaaccaatga

SEQ ID NO: 45005 - protein, 341 aa, Arabidopsis thaliana
MFRSMIVRSASPVKQGLLRRGFASESVPDRKVVILGAAGGIGQPLSLLMKLNPLVSSLSLYDIANTPGVAADVGHINTRSQVSGYMGDDDLGKALEGADLVIIPAGVPRKPGMTRDDLFNINAGIVKNLSIAIAKYCPQALVNMISNPVNSTVPIAAEIFKKAGTYDEKKLFGVTTLDVVRARTFYAGKSDVNVAEVNVPVVGGHAGITILPLFSQASPQANLSDDLIRALTKRTQDGGTEVVEAKAGKGSATLSMAYAGALFADACLKGLNGVPNVVECSFVQSTITELPFFASKVRLGKNGVEEVLDLGPLSDFEKEGLEALKAELKSSIEKGIKFANQ

SEQ ID NO: 45006 - DNA, 1212 bp, Arabidopsis thaliana
  CDS (1)..(1212)
atggcaacagcaacatcagcttctctgttttcaactgtttcttcatcttactccaaagctagctccataccacattcaagactccaatctgtgaaattcaactcagtccctagcttcaccggtctcaaatcaacctctctcatctccggatctgattcctcttccttagccaagactctacgcggttccgtaacgaaagcacaaacatctgacaagaagccttacggattcaaaatcaacgcttcatacaaagtagctgttcttggtgctgctggtggtataggtcagcctttatcacttctcatcaagatgtctccgttagtctctacgcttcatctttacgatatcgccaatgttaaaggagttgctgctgatctaagtcattgtaacactccttctcaagttcgtgatttcactggtccttctgagttagctgattgtttgaaagatgttaacgttgttgtcatccctgctggtgtgccgaggaaacccggtatgactcgtgacgatcttttcaacatcaatgccaatattgtcaagactcttgttgaagctgttgctgagaattgccctaatgctttcattcatattattagtaacccggttaactctacggtacctattgctgctgaagtgttgaagaagaaaggtgtttatgatcctaagaagctgtttggtgtcactactttggatgttgtgagggctaacacttttgtttctcagaagaagaatcttaagcttattgatgttgatgttccggttattggtggacatgctggaatcaccattttgcctctcctctcgaagacaaaaccgtctgttaactttactgatgaagagatccaagagctcactgttaggattcagaacgctggtactgaggttgttgatgctaaggcaggtgcaggttcagctactttgtcaatggcttatgctgctgctagatttgtagagtcatctcttcgtgctcttgatggagacggagatgtctacgagtgctcgtttgtggagtcgactctgactgatcttcctttctttgcatcacgggttaagatagggaagaacggtcttgaagctgtgattgagtcagaccttcagggattgactgagtatgagcagaaagcactagaagctcttaaggtagaattgaaagctagcattgacaagggtgtcgcatttgcaaacaaaccagctgctgcagcagctaactag

SEQ ID NO: 45007 - protein, 403 aa, Arabidopsis thaliana
MATATSASLFSTVSSSYSKASSIPHSRLQSVKFNSVPSFTGLKSTSLISGSDSSSLAKTLRGSVTKAQTSDKKPYGFKINASYKVAVLGAAGGIGQPLSLLIKMSPLVSTLHLYDIANVKGVAADLSHCNTPSQVRDFTGPSELADCLKDVNVVVIPAGVPRKPGMTRDDLFNINANIVKTLVEAVAENCPNAFIHIISNPVNSTVPIAAEVLKKKGVYDPKKLFGVTTLDVVRANTFVSQKKNLKLIDVDVPVIGGHAGITILPLLSKTKPSVNFTDEEIQELTVRIQNAGTEVVDAKAGAGSATLSMAYAAARFVESSLRALDGDGDVYECSFVESTLTDLPFFASRVKIGKNGLEAVIESDLQGLTEYEQKALEALKVELKASIDKGVAFANKPAAAAAN

SEQ ID NO: 45008 - DNA, 1059 bp, Agrobacterium tumefaciens str. C58
  CDS (1)..(1059): transl_table=11
ttgccaattttggccaatggggctaatcgaagtgcgacaatttggctgccggtttggcgcggtaaaattgaattgaagctcaagaggaagcattcgatggctcgcaaaaaaattgcacttattggttctggcatgatcggcggcacgctggcgcatctcgccagcctgaaggaactgggcgatatcgtcctcttcgacatcgccgacggcatcccgcagggcaagggtctggatattgcccagtccggcccggttgaaggcttcaatgcaaagctctccggcgcttccgattacgccgccatcgaaggcgcagacgtctgcatcgtcaccgcaggtgtcgcccgcaagcccggcatgagccgcgatgatcttcttggcatcaacctcaaggtcatggaacaggtcggcgccggcatcaagaaatatgctccgaacgctttcgtgatctgcatcaccaacccgctcgacgccatggtctgggcgctgcagaagttctccggcctgccgaagaacaaggtcgtcggcatggctggcgttctcgacagcgcacgcttccgcctgttccttgccgaagaattcaacgtttcggtccaggacgtcaccgccttcgttctcggcggtcatggcgacaccatggtgccgctcgcccgttattccaccgttggcggcgttccgcttaccgatctcgtcaagatgggctggttgaccgccgaacgtcttgagcagatcatccagcgcacccgtgacggcggcgcggaaatcgtcggcctcttgaagaccggctcggcctattacgcgccggccgcttcggctatcgaaatggccgaatcctacctcaaggacaagaagcgcgttctgcccgctgctgcccacctttcgggccagtatggcgtagacgacatgtatgtcggcgtgcccaccatcatcggtgccggcggtatcgagcgcgtcatcgagatcgaactgaacaaggaagaagaagccgccttccagaaatccgtcggcgctgtcgctggtctttgcgaagcctgcatcaacatcgctccgtcgctgaagtaa

SEQ ID NO: 45009 - protein, 352 aa, Agrobacterium tumefaciens str. C58
MPILANGANRSATIWLPVWRGKIELKLKRKHSMARKKIALIGSGMIGGTLAHLASLKELGDIVLFDIADGIPQGKGLDIAQSGPVEGFNAKLSGASDYAAIEGADVCIVTAGVARKPGMSRDDLLGINLKVMEQVGAGIKKYAPNAFVICITNPLDAMVWALQKFSGLPKNKVVGMAGVLDSARFRLFLAEEFNVSVQDVTAFVLGGHGDTMVPLARYSTVGGVPLTDLVKMGWLTAERLEQIIQRTRDGGAEIVGLLKTGSAYYAPAASAIEMAESYLKDKKRVLPAAAHLSGQYGVDDMYVGVPTIIGAGGIERVIEIELNKEEEAAFQKSVGAVAGLCEACINIAPSLK

SEQ ID NO: 45010 - DNA, 939 bp, Bacillus subtilis subsp. subtilis str. 168
  CDS (1)..(939): transl_table=11
atgggaaatactcgtaaaaaagtttctgttatcggagcaggttttaccggagctacaactgcatttttaatcgctcaaaaagagctggcagacgttgttcttgttgacattccgcaattggagaacccgacaaagggaaaagcgcttgatatgcttgaagcaagcccggttcaaggctttgacgcaaaaattacgggaacatccaattacgaggatacagccggctctgacattgttgtcattacagccggtatcgcaagaaaacctggtatgagcagagatgatctggtctctacaaacgaaaagattatgagaagcgttacgcaggaaatcgtgaaatattctcctgactctattattgtggtgctgacaaatcctgttgatgcaatgacatacgcggtgtacaaagaatcaggcttccctaaagagcgtgtaatcggccagtcaggtgtgcttgatacggcaagattcagaacatttgtggcagaggaattaaacctgtcagtgaaagatgtgactggtttcgtactcggcggacacggtgacgatatggttccgcttgtgcgttattcttatgctggcggtatcccgcttgaaactcttattccgaaagaacggattgacgcaattgtggagcgcactagaaaaggcggaggcgaaatcgtgaatcttcttggaaacggaagcgcgtattatgcgcctgcggcttctctgacagaaatggtcgaagcgatcttgaaagatcagcgccgcgtccttcctacaattgcttatcttgaaggggaatacggctatgaaggcatctaccttggtgttcctacaattgtaggcggcaacggtcttgagcaaatcattgaacttgaactgacagactatgaaagagcgcagctgaataaatcagttgaatctgtcaaaaatgtcatgaaagtattatcctaa

SEQ ID NO: 45011 - protein, 312 aa, Bacillus subtilis subsp. subtilis str. 168
MGNTRKKVSVIGAGFTGATTAFLIAQKELADVVLVDIPQLENPTKGKALDMLEASPVQGFDAKITGTSNYEDTAGSDIVVITAGIARKPGMSRDDLVSTNEKIMRSVTQEIVKYSPDSIIVVLTNPVDAMTYAVYKESGFPKERVIGQSGVLDTARFRTFVAEELNLSVKDVTGFVLGGHGDDMVPLVRYSYAGGIPLETLIPKERIDAIVERTRKGGGEIVNLLGNGSAYYAPAASLTEMVEAILKDQRRVLPTIAYLEGEYGYEGIYLGVPTIVGGNGLEQIIELELTDYERAQLNKSVESVKNVMKVLS

SEQ ID NO: 45012 - DNA, 981 bp, Brucella melitensis 16M
  CDS (1)..(981): transl_table=11
ttgaggaaagaaacaatcatggcacgcaacaagattgccctcatcggctccggcatgatcggcggtacgctcgctcacctggccggtctgaaggaactcggtgacgtcgtccttttcgacattgcggaaggcaccccgcagggcaaggggctggatatcgccgaatcttctccggtcgatggtttcgatgcgaagttcactggcgcgaacgattacgccgccattgaaggcgcagacgtcgtcatcgtcaccgcaggggtgccgcgcaagccgggcatgagccgcgacgatctcctgggcatcaacctgaaggtgatggaacaggtgggcgcgggcatcaagaaatatgcgccggaagctttcgtcatctgcatcaccaacccgctcgacgccatggtctgggcgctgcagaagttctccggccttccggcccacaaggttgtcggcatggctggcgttctcgacagcgcccgcttccgttatttcctctcggaagaattcaacgtttcggtcgaggacgtcacggcattcgtgctgggtggccacggcgattcgatggttccgctggcgcgctactcgaccgttgccggcattccgctgtctgatctcgtcaagatgggctggaccagccaggacaagctcgacaagatcatccagcgcacccgtgacggcggcgcggaaatcgtgggccttctcaagaccggctcggctttctacgctccggcggcatcggccatccagatggctgaatcctacctcaaggacaagaagcgcgtcctgccggtcgcagcccagctttcgggccagtatggcgtgaaggacatgtatgtgggcgttccgaccgtgatcggcgccaatggcgtggagcgcatcatcgagatcgatctcgacaaggacgagaaggcgcagttcgacaagtcggtggcctccgtcgccggtctgtgcgaagcctgcatcggtattgctccgtcgctgaaataa

SEQ ID NO: 45013 - protein, 326 aa, Brucella melitensis 16M
MRKETIMARNKIALIGSGMIGGTLAHLAGLKELGDVVLFDIAEGTPQGKGLDIAESSPVDGFDAKFTGANDYAAIEGADVVIVTAGVPRKPGMSRDDLLGINLKVMEQVGAGIKKYAPEAFVICITNPLDAMVWALQKFSGLPAHKVVGMAGVLDSARFRYFLSEEFNVSVEDVTAFVLGGHGDSMVPLARYSTVAGIPLSDLVKMGWTSQDKLDKIIQRTRDGGAEIVGLLKTGSAFYAPAASAIQMAESYLKDKKRVLPVAAQLSGQYGVKDMYVGVPTVIGANGVERIIEIDLDKDEKAQFDKSVASVAGLCEACIGIAPSLK

SEQ ID NO: 45014 - DNA, 1026 bp, Schizosaccharomyces pombe
  CDS (1)..(1026)
atgtttgccaaagtagctttcaaaaactttactccccttaagagtatcgctccccgttctttttctacgacctccagtcgcgcattcaaagtagccgttttgggtgctggaggaggtattggccagcctttgtcaatgcttttaaaactgaacgataaggttagtgaattggccttgttcgatattaggggagctcctggcgttgctgccgatattggacatatcaataccacttccaatgttgttggctatgctcctgatgacaagggacttgaaaaagccttgaacggtgctgatgtggtcattattcctgctggtgttccccgtaagcccggaatgactcgtgatgatctctttgctactaacgcatcgattgtgcgggaccttgcttttgcagcaggtgaaacttgtcccgaagccaaatatctcgttgtcactaaccccgtaaactctactgtgcccatctttaaaaaggctttagaacgtgttggcgttcatcaacccaaacatttgtttggtgtcaccacacttgactctgttcgtgccagccgtttcacctctcaagtcactaatggcaaggcagaacttcttcatattcctgttgttggcggtcattccggtgcgaccatcgtacctttgttgtcccaaggcggtgttgaattgactggtgaaaagcgtgacgcacttattcaccgtatccaatttggtggtgatgaggttgtaaaggcgaaggctggtgctggaagtgcgaccttgtctatggcctatgccggtgctcgtatggcctcctccgtactccgtgctttggctggtgagtctggcgttgaggaatgcacctttgtggagtcccctctgtacaaggatcaaggaattgatttctttgcctctcgtgtaactttgggtaaggatggggttgacaccattcaccctgttggtaaaatcaatgattatgaggagagccttcttaaggtagctttgggtgagctgaaaaagagcattacgaagggtgagcaatttgtagcataa

SEQ ID NO: 45015 - protein, 341 aa, Schizosaccharomyces pombe
MFAKVAFKNFTPLKSIAPRSFSTTSSRAFKVAVLGAGGGIGQPLSMLLKLNDKVSELALFDIRGAPGVAADIGHINTTSNVVGYAPDDKGLEKALNGADVVIIPAGVPRKPGMTRDDLFATNASIVRDLAFAAGETCPEAKYLVVTNPVNSTVPIFKKALERVGVHQPKHLFGVTTLDSVRASRFTSQVTNGKAELLHIPVVGGHSGATIVPLLSQGGVELTGEKRDALIHRIQFGGDEVVKAKAGAGSATLSMAYAGARMASSVLRALAGESGVEECTFVESPLYKDQGIDFFASRVTLGKDGVDTIHPVGKINDYEESLLKVALGELKKSITKGEQFVA

SEQ ID NO: 45016 - DNA, 1050 bp, Drosophila melanogaster
  CDS (1)..(1050)
atgttgttactgacaagtcttaaaagcctggcaaaaccagctacatggggagttgtggtccgcactttaaaggtcgccgttgtcggtgccggaggaggaattggacaaccgctatcgcttctgctccgtcgctgtcctggaatcgatgagctggctctacatgatctcagcgaaatgaagggaattgctacggatctatcccatataagccaaacgggaaaggtgataggttttaccggtgaaaaggaactggagtcggcggtgagtggagctgatgtggtggttgtggcggcagggatgccacgtctgccaggaatgcaaagggatcacctgatggccgccaatggaaatgttgcagtgaaagttgccactgccattagcaatgcctctccacgagctcatcttgcctttattaccaatccggtcaatatgattgtgcccgccgcagctgaggttcttatggcccatggaacttttgattctcgtcggctcttcggtattacgactttggatgtggtgcgatcgaaaaagttcattggtgattctatgaacatatcaccggatgacgtaaacattccagttattggtggccatgcggggattacaattctaccgctcatttcgcagtgtcagccgatatatagatgtgatctccaggagatccagaatctaactcatcgcattcaggaggcgggcacagaggtggtgaatgccaaagctggaaaaggatctgccaccctatcgatggcttatgctggcgcaactttcgtgaactccctgctgcgtggaattgctggacaggatggtctaatcgagtgcgcttttgtcgcctccaaactaaccgacgccccattctttgctagtccattggaattgggaaaggatggtatcaagcgctatataccacttccccagatgagtgactacgaaaaggaggctttggaaaagctactacctattctacgacagaatgctgatgagggtgtcaattttgcaaaaatgattttgagtggacaatcacattctcccattccagcggccttgccgtaa

SEQ ID NO: 45017 - protein, 349 aa, Drosophila melanogaster
MLLLTSLKSLAKPATWGVVVRTLKVAVVGAGGGIGQPLSLLLRRCPGIDELALHDLSEMKGIATDLSHISQTGKVIGFTGEKELESAVSGADVVVVAAGMPRLPGMQRDHLMAANGNVAVKVATAISNASPRAHLAFITNPVNMIVPAAAEVLMAHGTFDSRRLFGITTLDVVRSKKFIGDSMNISPDDVNIPVIGGHAGITILPLISQCQPIYRCDLQEIQNLTHRIQEAGTEVVNAKAGKGSATLSMAYAGATFVNSLLRGIAGQDGLIECAFVASKLTDAPFFASPLELGKDGIKRYIPLPQMSDYEKEALEKLLPILRQNADEGVNFAKMILSGQSHSPIPAALP

SEQ ID NO: 45018 - DNA, 1044 bp, Drosophila melanogaster
  CDS (1)..(1044)
atgtttttggcctctagattgttaagccatgttggcaacttgcctcccaaggtccagcagcttggatatatcaaccgaggtctcaaggtcgccgttgtgggatcggtgggtggaatcggtcagccgctgtcccttcttctcaagcataatccgcaaatctcgaccctgtctctgtacgacattaagaatacaaccggtgtaggagtagacttatctcatatcaacacccgtgcttcagtgtgcccattcgagggtaagaatggtttaaaaaaagctatggataaggctgatatagtggtgataccggcgggtttgccacgtaagcccggaatgaagcgcgaagatttggtggacgtgaatgccagcgttgcctgcgaagtggcttttgcggctagcgaagtttgtcccggtgccatgcttgccttcatcacgaaccccatcaacgtgatagtacccatcgtggccacgatccttaaagcaaagggtacatacgatccgaatcgactatttggtgtcaccactctggatgtggtacgagcccagacctttgtagcggacattctcaacgttgatccccagaaagtgaatatacccgtaatcggtggccatacaggtcggaccatcctgcccatactgtcgcagtgtgatcccccctttaagggtaccgataaggagcgcgaagcgttgatccaacgcatccaaaatgcgggcacagaagtggttaatgccaaggatggcctgggctcggccaccctatcgatggcctttgcagccactcagtttgtaagctcgttgataaagggtatcaagggttcaaaggacgagtgcattgtggaatgtgcctatgtggagtctgatgtcacggaggcccagttcttcgccaccccactgatactgggaccccagggtgtcaaggaaaacacaggattgcccgatttggacgatgaggaaaggaaggctctaaatggtatgctacccattttgaaggagagtatcgcaaagggcatcaaattgggcgagggtatgatatgcagttgtgcataa

SEQ ID NO: 45019 - protein, 347 aa, Drosophila melanogaster
MFLASRLLSHVGNLPPKVQQLGYINRGLKVAVVGSVGGIGQPLSLLLKHNPQISTLSLYDIKNTTGVGVDLSHINTRASVCPFEGKNGLKKAMDKADIVVIPAGLPRKPGMKREDLVDVNASVACEVAFAASEVCPGAMLAFITNPINVIVPIVATILKAKGTYDPNRLFGVTTLDVVRAQTFVADILNVDPQKVNIPVIGGHTGRTILPILSQCDPPFKGTDKEREALIQRIQNAGTEVVNAKDGLGSATLSMAFAATQFVSSLIKGIKGSKDECIVECAYVESDVTEAQFFATPLILGPQGVKENTGLPDLDDEERKALNGMLPILKESIAKGIKLGEGMICSCA

SEQ ID NO: 45020 - DNA, 1011 bp, Drosophila melanogaster
  CDS (1)..(1011)
atgctgaagcaagtgacgaagcaattggccctgcagggagtgcgcaccttctcggttggccagcagaacaactacaaggtgaccgtttgcggtgccgctggaggaatcggccagccgctgtcgctgctcctcaagcagaatcccctggtcaccgacttggcgctctacgatatcgttcatacgcccggtgtggccgccgatctgtcgcatatcgacaccaagagcaagaccgccggattcatcggagccgaccagctgggtgactccctgaagggatccgatgtggtggtcattcccgctggtgtgccccgcaagccgggcatgacccgcgatgatctgttcaacgtgaacgccggcatcatcaaggacatctccaactccattgccaagaactgccccaaggccctggtggccatcatcaccaacccggtgaacacctgcgtgcccatcgctgccgagatcctcaagaaggctggtgtttacgatcccaagcgtctgttcggagtctccaccttggatgtggtgcgtgcccgtgccttcatcggccatgcccttggtgtggatccccagaccgtgcagatccccgtgatcggcggccactccggcgtgaccatcctgcctgtgctctcccagagccagcccctgttcaagggcaaccaggacaccatcgagaagcttaccgtgcgcatccaggaggccggtactgaggtcgttaaggccaaggccggagccggttccgccactctgtcgatggcctacgctggtgcccgtttcgccggctccctgctgaagggactgaacggcgagaagaacgttatcgagtgctcctacgtgcagtccaccgtcacggaggctaccttcttctccacacccctggtgctgggcaagaacggcgtccaggagaacctcggcctgcccaagctcaacgactacgagaagaagctgctggaggccgccattcccgagctgaagaagaacatccagaagggcattgactttgccaacgcctaa

SEQ ID NO: 45021 - protein, 336 aa, Drosophila melanogaster
MLKQVTKQLALQGVRTFSVGQQNNYKVTVCGAAGGIGQPLSLLLKQNPLVTDLALYDIVHTPGVAADLSHIDTKSKTAGFIGADQLGDSLKGSDVVVIPAGVPRKPGMTRDDLFNVNAGIIKDISNSIAKNCPKALVAIITNPVNTCVPIAAEILKKAGVYDPKRLFGVSTLDVVRARAFIGHALGVDPQTVQIPVIGGHSGVTILPVLSQSQPLFKGNQDTIEKLTVRIQEAGTEVVKAKAGAGSATLSMAYAGARFAGSLLKGLNGEKNVIECSYVQSTVTEATFFSTPLVLGKNGVQENLGLPKLNDYEKKLLEAAIPELKKNIQKGIDFANA

SEQ ID NO: 45022 - DNA, 1215 bp, Oryza sativa (japonica cultivar-group)
  CDS (1)..(1215)
atggaactgttcctgcagttaggcatggcatcaactgttgccatcaatttgattggtgctcaggctggcattatctcaaagttaaggaattgcgacatcacaagctacagtggcttaaaggcaagatcatctattagttttgagtcaaggtcatcattcctgggtcagaatgcatctcttcgatcatctatctctccaaggattgtaccaaaggcaaactctggatctcacatttctcctgaggcatcttacaaagtggcagttctcggtgctgctggtggcattggtcaaccgttgggcttgttaattaagatgtctcctctggtctctgcactacatctgtatgatattgcaaatgtcaaaggagttgctgctgatctgagccactgcaacacaccttctcaggttctggactttactgggccctcggaattagccaactgcttgaaaggtgtggatgttgttgtcatccctgctggagtcccaaggaagccaggaatgactcgtgatgatctttttaacatcaatgcgagcattgtcaagacacttgttgaggctgttgcagacaattgtccagaagcctttatccatatcattagcaacccagtaaactcaacagtgcccattgctgctgaggttctgaaacagaagggtgtctataaccccaagaagcttttcggagttaccaccctagatgttgtcagagctaacacatttatagctcagaagaagaacctgaagctcattgatgttgatgtcccagttgttggtggtcatgctgggattactatcctaccattgctgtcaaaaaccagaccatctgtcaccttcacaaatgaggaaactgaagagctgacaaggaggatacagaatgctgggacagaggtggtggaggcgaaagctggtgctggatctgctaccctgtcgatggcctatgcagctgccagatttgttgagtcatccctccgtgcattggctggtgatccagatgtttacgagtgcacatttgttcaatctgaattaactgagctgctgttctttgcatctagggttaagcttggtaagaatggtgttgagtccatcatttcttccgaccttgagggagtgactgaatatgaggccaaggcccttgagtcattgaagcctgagttgaaggccagcattgagaagggcatcgagttcgtccacaaacagcaggctgccgctacttcttga

SEQ ID NO: 45023 - protein, 404 aa, Oryza sativa (japonica cultivar-group)
MELFLQLGMASTVAINLIGAQAGIISKLRNCDITSYSGLKARSSISFESRSSFLGQNASLRSSISPRIVPKANSGSHISPEASYKVAVLGAAGGIGQPLGLLIKMSPLVSALHLYDIANVKGVAADLSHCNTPSQVLDFTGPSELANCLKGVDVVVIPAGVPRKPGMTRDDLFNINASIVKTLVEAVADNCPEAFIHIISNPVNSTVPIAAEVLKQKGVYNPKKLFGVTTLDVVRANTFIAQKKNLKLIDVDVPVVGGHAGITILPLLSKTRPSVTFTNEETEELTRRIQNAGTEVVEAKAGAGSATLSMAYAAARFVESSLRALAGDPDVYECTFVQSELTELLFFASRVKLGKNGVESIISSDLEGVTEYEAKALESLKPELKASIEKGIEFVHKQQAAATS

SEQ ID NO: 45024 - DNA, 1023 bp, Oryza sativa (japonica cultivar-group)
  CDS (1)..(1023)
atgaggccgtcgctgatgagatccgcctcgcaggtcctccgccgccgccgcggctactcctccgcctccggccagccggagcggaaggtcgccatcctcggcgcggccggcggcatcgggcagccgctctccctcctcatgaagctgaacccgctcgtctcctccctctccctctacgatatcgccggcacccccggcgtcgccgccgacgtctcccacatcaacgccccggcccaggtgaaggggttcatgggggatgaccagctcggggaggcgttggaggggtcggacatcgtgatcatcccggccggcgtgccgaggaagcccggcatgaccagggacgacctcttcaacatcaacgccggcatcgttaagaacctctgcaccgccattgccaagtactgcccgaatgctcttgtcaacatgatcagcaacccagtgaattcaacggtcccaattgctgccgaggttttcaagaaggctgggacttacgatgagaagaagttgtttggtgtgactactcttgatgttgttcgtgctaagactttctatgctggaaaggccaatgtaccagttactgatgtgaatgtcccagttgttggtggtcatgcgggtatcaccatcctgccactgttctcacaggcaactcctgcaactaatgcgttgtctgatgaagacatcaaggctcttaccaagagaacacaggatggtgggactgaagttgttgaagcaaaggctggaaagggctctgcaaccttgtccatggcgtatgctggtgctgttttcgcaaatgcttgcttaaagggtctgaatggagtgccggacgttgttgaatgctcttttgtgcaatcaactgtaacagagctgccattctttgcctccaaggtgaagcttgggaagaatggagttgaggaagttcttgggttgggccagctgtcagactttgagaaggaaggactggagaatcttaagggcgagctcaaggcttcaattgagaagggtatcaaatttgcaaatgcgtag

SEQ ID NO: 45025 - protein, 340 aa, Oryza sativa (japonica cultivar-group)
MRPSLMRSASQVLRRRRGYSSASGQPERKVAILGAAGGIGQPLSLLMKLNPLVSSLSLYDIAGTPGVAADVSHINAPAQVKGFMGDDQLGEALEGSDIVIIPAGVPRKPGMTRDDLFNINAGIVKNLCTAIAKYCPNALVNMISNPVNSTVPIAAEVFKKAGTYDEKKLFGVTTLDVVRAKTFYAGKANVPVTDVNVPVVGGHAGITILPLFSQATPATNALSDEDIKALTKRTQDGGTEVVEAKAGKGSATLSMAYAGAVFANACLKGLNGVPDVVECSFVQSTVTELPFFASKVKLGKNGVEEVLGLGQLSDFEKEGLENLKGELKASIEKGIKFANA

SEQ ID NO: 45026 - DNA, 1215 bp, Oryza sativa (japonica cultivar-group)
  CDS (1)..(1215)
atggcatcagcagcaatgtctactctgaacctgagttcatctcctctgaccaagcagcagctccgatttggagccagcacactcagtgcagaacacgtcagtggcttcagctctgcaaggccagctccatcgttgtgctgctccagctctcactggcgagcggtcaagctgagaccgagacggcggccatggcggcgcgccgggaaccgggtcgtcgcgcaggccggcggctacaaggtcgccatcctcggcgccgccggtgggatcgggcagccgctctcgctcctcgtcaagatgtcgccgctcgtctcggcgctgcacctgtacgacattgcgaacgtcgatggtgtcaccgccgatcttggacactgcaacacgccggcgaaggtcgccgggttcaccggaaaggaggagctcgccggttgtcttgccggcgtggacgtcgtcgtcatccccgccggcgtgccgaggaagccagggatgacgcgggatgacctgttcggcatcaacgccggcatcgtgagggagctcgtcgaggccgtggcggaccacgcgccggcggcgctggtgcacgtcatctccaacccggtgaactccaccgtgccgatcgccgccgaggtgctgaagcggaagggcgtgtacgacccgcggaagctgttcggcgtcacgacgctggacgtcgtgcgcgccaacacgttcgtcgcggagatgaagggcctcccgctcgccgacgtcgacgtcccggtggtcggcggccacgcggcggccaccatcctcccgctgctgtccaaggcgaggcccaagacggcgttcaccgatgaggaggtggaggcgctgacgaggcggatccagaacgccgggaccgaggtggtggaggccaaggcgaaggccggcggcgggtccgcgacgctgtcgatggcgtacgcggcggcgaggttcctggaggcgtcgctgcgcgggctcgacggcgacgccgacgtgtacgagtgctcgtacgtgcagtgccaggcggtgccggagctgccgttcttcgcgtgccgggtgaagctgggcagggacggcgtcgaggaggtggcggcggcgggggcggagctccgggggctcacggagttcgaggcgcgcgcgctggaggcgctcaagccgcagctcaagaagagcatcgacaagggcgtcgcctacgcgcagcagcagccagcgacggtggcgatgggttga

SEQ ID NO: 45027 - protein, 404 aa, Oryza sativa (japonica cultivar-group)
MASAAMSTLNLSSSPLTKQQLRFGASTLSAEHVSGFSSARPAPSLCCSSSHWRAVKLRPRRRPWRRAGNRVVAQAGGYKVAILGAAGGIGQPLSLLVKMSPLVSALHLYDIANVDGVTADLGHCNTPAKVAGFTGKEELAGCLAGVDVVVIPAGVPRKPGMTRDDLFGINAGIVRELVEAVADHAPAALVHVISNPVNSTVPIAAEVLKRKGVYDPRKLFGVTTLDVVRANTFVAEMKGLPLADVDVPVVGGHAAATILPLLSKARPKTAFTDEEVEALTRRIQNAGTEVVEAKAKAGGGSATLSMAYAAARFLEASLRGLDGDADVYECSYVQCQAVPELPFFACRVKLGRDGVEEVAAAGAELRGLTEFEARALEALKPQLKKSIDKGVAYAQQQPATVAMG

SEQ ID NO: 45028 - DNA, 1065 bp, Oryza sativa (japonica cultivar-group)
  CDS (1)..(1065)
atgcagcccgactccgcctcccaccgcatcgcccgcgtcgccgcccacctcagcccgtcgccgcgcccccagatggaggagggggtgaggccggcgccatgcagggccaagggcggcgcgccggggttcaaggtggccgtgctgggcgcggcgggagggatcgggcagccgctgtcgctgctcatgaagttgaacccgctcgtctctgtgctccacctctatgatgtcgtcaacacgcccggtgtcaccgccgatgtcagccacatggacaccaccgccgtggtccgtggtttccttgggcccaaccagcttgaggcagcacttacaggaatggatcttgtcattatccctgctggtctcccaaggaaaccaggaatgacaagggatgatttgttcaacaaaaacgctgggattgttcgctcactttgtgaaggcgttgccaagtgctgtccaaatgcaattgtgaacttgatcagcaacccagtgaactcaaccgtccccattgcagcagaggttttcaagaaagctggaacttatgatcccaaacgtctccttggagttacaacactggatgtagcaagggcaaacacctttgtggctgaagtacttggaattgacccaaaagatgtcaatgttccagttgttggtgggcatgctggagtgactatattacccctcctctcccaggtccaccccccatgctcatttaccccagatgaaatcagctatttgactaaacgcatacagaatggtggcacagaagttgttgaggcaaaggcaggagcaggctctgcaactttgtcaatggcttttgctgcagcaaaatttggtgatgcatgcttgcgagcaatgcgtggtgatgctggcgttgtggaatgttcatatgttgcatctgcggtgaccgagttgccgttctttgcaacaaaagtgaggttaggtcgtgctggagccgaagaggttctccctctggggccgttgaatgattttgagagagctggcttggagatggcaaagaaagagctgatggagagcattcagaagggcatcgatttcatgaacaagtga

SEQ ID NO: 45029 - protein, 354 aa, Oryza sativa (japonica cultivar-group)
MQPDSASHRIARVAAHLSPSPRPQMEEGVRPAPCRAKGGAPGFKVAVLGAAGGIGQPLSLLMKLNPLVSVLHLYDVVNTPGVTADVSHMDTTAVVRGFLGPNQLEAALTGMDLVIIPAGLPRKPGMTRDDLFNKNAGIVRSLCEGVAKCCPNAIVNLISNPVNSTVPIAAEVFKKAGTYDPKRLLGVTTLDVARANTFVAEVLGIDPKDVNVPVVGGHAGVTILPLLSQVHPPCSFTPDEISYLTKRIQNGGTEVVEAKAGAGSATLSMAFAAAKFGDACLRAMRGDAGVVECSYVASAVTELPFFATKVRLGRAGAEEVLPLGPLNDFERAGLEMAKKELMESIQKGIDFMNK

SEQ ID NO: 45030 - DNA, 1146 bp, Eremothecium gossypii
  CDS (1)..(1146)
atgcaagcaagcacttactacgtgatctcaaacatgccacacactacagccgactcttccactcagcgcgtgcgcgtcgcagtcctaggcgcagccggcggaattggacagccactgtccctgctactaaaaacccagcttgcccaggtgctcggcgacgcaaatgcgtccctggagctggctctctacgatgttgcagcagacgcgctggccggcgtggcggcagacctgtcgcacgtcaacacaccggttgaggtgtcgcaccacgtgcccagtagccgggaggacgaggaggcgttgcgcgaggcgctgacgggtgcgagtgtggttgtgattccagcgggtgtcccgcggaagccgggcatgacgcgcgacgacctgatcaacatcaacgccgggatcatcaagacgctggcgaagggcattgcaggcgcgtgcgacctcgagaaggtgttcgtgctggtgatctcgaaccccgtcaactcgctggtgcctgtgatggtgcgccagctgatccgccatgcggaagccaagcaggccccccacgccggcgtggagcgccgcgtgttcggggtgacacagctggatatggtgcgtgcgtctgcattcgtgcgctcgctcggcgagcttggcaacgaggtgccttccgtgccggtgattggcgggcactccggcgagacgatcctgccgctgttcgggcctgtgcaacagcgcctgcagttttcgctggagcagcgcaagaagctcacgcaccgcgtgcagtacggcggcgacgagatcgtggctgcgaagaagggggctgggtctgcaacgctttccatggcctacgcggcctacgtggtcgcggagcgctttaccaacctcgtgctgggcaacgtttcggagatccaggagaccctctacgtttcgctgtacgaccgcgagaacaagcccattgcggaaggcgctgcggagcttttgtccaatattggggagaccccgtactttgcggtccccgtaaaaatctccgctgacgcaggcgttgtgcgcgttgagcacgaggtctggcagcaattagacgactacgacagggagcacctgcttccagcgtgtctggagggcttgcgcaagaacatcgagaccggggagaccttgggcagcaattag

SEQ ID NO: 45031 - protein, 381 aa, Eremothecium gossypii
MQASTYYVISNMPHTTADSSTQRVRVAVLGAAGGIGQPLSLLLKTQLAQVLGDANASLELALYDVAADALAGVAADLSHVNTPVEVSHHVPSSREDEEALREALTGASVVVIPAGVPRKPGMTRDDLININAGIIKTLAKGIAGACDLEKVFVLVISNPVNSLVPVMVRQLIRHAEAKQAPHAGVERRVFGVTQLDMVRASAFVRSLGELGNEVPSVPVIGGHSGETILPLFGPVQQRLQFSLEQRKKLTHRVQYGGDEIVAAKKGAGSATLSMAYAAYVVAERFTNLVLGNVSEIQETLYVSLYDRENKPIAEGAAELLSNIGETPYFAVPVKISADAGVVRVEHEVWQQLDDYDREHLLPACLEGLRKNIETGETLGSN

SEQ ID NO: 45032 - DNA, 999 bp, Eremothecium gossypii
  CDS (1)..(999)
atgttttgccgggtagctagacgtggattcagggcagatggcgtgcgcgcataccgggtgtccgtgctgggagccaacggcggtatcggacagcctttgtcacttctgttgaagctcaacaagcgggttaccgacctgcgcctgtatgatctcaagggtgccaagggtgtagcagcagacctgtcccacatccctacgaactcgcaggtaagcgggtacactgcggagaaccccgaggcgctgcgcgaggcgcttacgggtgcggacgtagtagtggttccagccggcgtgccccgcaagccgggcatgacgcgggacgacctgttcgccattaacgcgggcgtcgtgcagcagcttgctggggcgattgggcagcatgcgccgggcgcagcagtgcttgtaatctctaacccggtcaactcgacggtgcctatcatggccgcggagctgcgcaagctgggggtgtacgacccacgtaaactgttcggcgtgaccaccctggacagcatccgggcgtcgcgcttcatctctgaggtgcaggggacggaccccacgcgggagcgcgtgcccgtgatcggcggccactccgggatcacaatcatcccggtgttgtcgcagacgcagcacacgggcatcgacaaggccacccgcgacgcgttgattcaccggatccagtttggcggcgacgaggtcgtgaaggccaagaacggcgcgggctctgccacgctatcgatggcgcgcgcaggagcgaagttcgcggacgccgtgttggccggtctggcgggcgagcagggcgtggtggaaccggccttcgtcgactcgcctctctacaagagcgagggcattgagttcttcgcctctgccgtcacgctcggcccacgcggtgtcgaggaggtccaccctgtcggcaccctgtcagccgaggaggaggagatgctagctaagtgcaaggagactttgaagcagaacatcgagaagggtatcaacttcgccaagtaa

SEQ ID NO: 45033 - protein, 332 aa, Eremothecium gossypii
MFCRVARRGFRADGVRAYRVSVLGANGGIGQPLSLLLKLNKRVTDLRLYDLKGAKGVAADLSHIPTNSQVSGYTAENPEALREALTGADVVVVPAGVPRKPGMTRDDLFAINAGVVQQLAGAIGQHAPGAAVLVISNPVNSTVPIMAAELRKLGVYDPRKLFGVTTLDSIRASRFISEVQGTDPTRERVPVIGGHSGITIIPVLSQTQHTGIDKATRDALIHRIQFGGDEVVKAKNGAGSATLSMARAGAKFADAVLAGLAGEQGVVEPAFVDSPLYKSEGIEFFASAVTLGPRGVEEVHPVGTLSAEEEEMLAKCKETLKQNIEKGINFAK

SEQ ID NO: 45034 - DNA, 1458 bp, Eremothecium gossypii
  CDS (1)..(1458)
atggctcgcgtaaccgtccttggcgccgccggtggcatcggccagccgctctctctgctactcaagacctgcagcctcgtttccgagctgaacctctacgacttgcgcaacgcccccggcgtcgcagccgacgtctcgcacgtcaacaccgactgccgcgttgccggcttcgagggccccgccgagctgggccgcgcgctgcgcggcgcggacctcgtcgtcatcccggccggcgtcccgcgcaagcccggcatgactcgcgacgacctcttcggcatcaacgccggcatcgtccagagcctggtgaccgccgtcgcgaagcactgtcccgccgcccgcctgctcatcatctccaaccccgtcaacagcaccgtgcccatcgctgtcgagaccctcaagcgcctcggcaagcttaacgccgcgcgcgtcttcggcgtcaccaccctagacctcgtgcgcgcccagagcttcctcgccgacgcgctgggtcgcgacgcccaccgcgtcgccgacctcgcgtcccacgtgaccgtcgtcggaggccacgccggccgcaccatcgtcccgctgctggccgacgctcagctgcgcgagctacagcgccgcggcctctacgactcctacgtccaccgcgtgcagttcggcggcgatgaggtcgtcaaggccaaggccggcgccggctccgccaccctctccatggccctggcaggcttccacttcgccgagctgctgctgcgctcgctggctggtgaggccgtcgcccccgagcctgccttcgtctacctgccgggcctcccaggcggtgccgacctcgcccgcgcgctagccgccacggaacccgtagactactttgcggcccccgtgcgcctggccgccggcgacgccgccgtcgtcgacactgcctttgtggccgacctggctcccgagcagcgcgctctggtcgacgccgcgcttcccgagcttgccgcgagtatccgcaagggcgtcgactttgtgcacgccccaaggcccgcctttagtcgccgtctttacatagccccggtaagctcggctccgccgtcacatataagagtcgtcctaaccgccttcttcgcgggtcgtaccacccgtgcgcggccccgttcaccgctcttccggcctccttttgcccgcccaaacggcaccgcgtgggcgcgcgggctgcaggcggacacccaggggatgcgtctcgccccccaagctgttataatagtaaaccaatcagctccacgttatcgctacagcctaactatcaagagagtggtcgtccacacacacaccacaggcagacttctgcttttcactttcgcctactacacgcccaagcgtgcacttcctgcgcaggacggaccaagacaagcgcgcatcacgagctcgcgacgaccaaccactgccagactacgcttgctgggtgggcacagggtatatacggctttataa

SEQ ID NO: 45035 - protein, 485 aa, Eremothecium gossypii
MARVTVLGAAGGIGQPLSLLLKTCSLVSELNLYDLRNAPGVAADVSHVNTDCRVAGFEGPAELGRALRGADLVVIPAGVPRKPGMTRDDLFGINAGIVQSLVTAVAKHCPAARLLIISNPVNSTVPIAVETLKRLGKLNAARVFGVTTLDLVRAQSFLADALGRDAHRVADLASHVTVVGGHAGRTIVPLLADAQLRELQRRGLYDSYVHRVQFGGDEVVKAKAGAGSATLSMALAGFHFAELLLRSLAGEAVAPEPAFVYLPGLPGGADLARALAATEPVDYFAAPVRLAAGDAAVVDTAFVADLAPEQRALVDAALPELAASIRKGVDFVHAPRPAFSRRLYIAPVSSAPPSHIRVVLTAFFAGRTTRARPRSPLFRPPFARPNGTAWARGLQADTQGMRLAPQAVIIVNQSAPRYRYSLTIKRVVVHTHTTGRLLLFTFAYYTPKRALPAQDGPRQARITSSRRPTTARLRLLGGHRVYTAL

SEQ ID NO: 45036 - DNA, 1014 bp, Danio rerio
  CDS (1)..(1014)
atgttctcccgcgtcgcaagaccaacagcctccctcgtccgaagcttgtccacctcatcccagaacaatgcaaaagtagctgttctgggtgcctcaggtggcatcgggcagccactgtccctcctgctgaagaacagccctttagtaagcgagctgtccctctttgatatcgcccacactcctggagtggctgctgacctcagtcacatcgagaccagagcccatgtcaaagggtacattggagcagatcagctaggtgatgcactgaaaggctgtgaggttgtcgtcatccctgctggcgtcccaaggaaacctggtatgacccgtgatgatctgtttaacaccaatgcaaccattgtggccacactcgttgatggctgtgcccgtcactgccctcaagccatgatctgcatcatttcaaacccagtgaactccactatcccaatcacatcagaggtgatgaagaaacatggcgtctacaaccccaacaaaatctttggcgtcacaacgttggacattgtcagggcaaacacttttgttgctgagctcaaaggccttgatcccgccagagtcaatgtacccgttgttggaggtcatgctggaataaccatcattcctctcatttcacagtgcactcctaaggttgagttccctgcagatcagctctctgctttgacaggcaggatccaggaagcaggaactgaggttgtgaaggctaaagctggtgcaggctctgccactctgtccatggcctatgctggagccaggttcacattctccctcctcgatgccatgaatggaaaagagggtgttgttgaatgctcatttgtgagatctgaggaaaccgaatgcaaatatttctctacacctcttctgctcgggaaaaatggcattgaaaagaaccttggccttgggaagctctctgcatttgaggagaagcttgtggctgatgccatgactgagctgaagggctccatcaagaaaggagaagactttgtagcaaacatgaagtga

SEQ ID NO: 45037 - protein, 337 aa, Danio rerio
MFSRVARPTASLVRSLSTSSQNNAKVAVLGASGGIGQPLSLLLKNSPLVSELSLFDIAHTPGVAADLSHIETRAHVKGYIGADQLGDALKGCEVVVIPAGVPRKPGMTRDDLFNTNATIVATLVDGCARHCPQAMICIISNPVNSTIPITSEVMKKHGVYNPNKIFGVTTLDIVRANTFVAELKGLDPARVNVPVVGGHAGITIIPLISQCTPKVEFPADQLSALTGRIQEAGTEVVKAKAGAGSATLSMAYAGARFTFSLLDAMNGKEGVVECSFVRSEETECKYFSTPLLLGKNGIEKNLGLGKLSAFEEKLVADAMTELKGSIKKGEDFVANMK

SEQ ID NO: 45038 - DNA, 1011 bp, Neurospora crassa
  CDS (1)..(1011)
atgttcgccgcttccagaatccagacccgtgccttctcggcctctgcccgccagcttaccaaggtctccgtcctcggtgccgccggtggcattggccagcccctctccctcctcctcaagctcaaccccagagtctccgagctcgccctctacgatatccgtggcgcccccggtgtcggtgctgatctgtcccacatcaacaccaagagcaccgtcaagggctacgagcccaccgcctccggtctcgccgatgccctcaagggctccgaaatcgtcctcatccccgccggtgtcccccgcaagcccggcatgacccgtgacgacctcttcaacaccaacgcctccatcgtccgcgacctcgccaaggcctgcgccgagtcgtgccccgaggccaacatcctcgtcatctccaaccccgtcaactccaccgtccccatcgtctccgagatcttcaagaaggccggtgtctacaaccccaagcgcctcttcggtgtcaccaccctcgacgtcgtccgcgcctcccgcttcgtttccgagatcaagggcaccgaccccaaggacgagaacatcaccgtcgttggcggccactccggcgtcaccatcgtccccctcttctcccagagcaagcaccccgaactctccaagaacgagcagctcatccaccgcgtccagttcggtggtgacgaggtcgtcaaggccaaggacggtgccggttccgccaccctctccatggccatggccggtgcccgcatggccgagtccctcctccgcgccgcccagggcgagaagggcgtcatcgagcccacctttgtcgactcccctctctacaaggaccagggcatcgacttcttcgcctccaaggtcgagctcggccccaacggtgttgagaagatctaccccgtcggccccgtcgatgaggttgagcagaagctccttgatgcctgccttgttgacctcaagaagaacatccagaagggcaaggactttgtcgccgccaaccccggcaaataa

SEQ ID NO: 45039 - protein, 336 aa, Neurospora crassa
MFAASRIQTRAFSASARQLTKVSVLGAAGGIGQPLSLLLKLNPRVSELALYDIRGAPGVGADLSHINTKSTVKGYEPTASGLADALKGSEIVLIPAGVPRKPGMTRDDLFNTNASIVRDLAKACAESCPEANILVISNPVNSTVPIVSEIFKKAGVYNPKRLFGVTTLDVVRASRFVSEIKGTDPKDENITVVGGHSGVTIVPLFSQSKHPELSKNEQLIHRVQFGGDEVVKAKDGAGSATLSMAMAGARMAESLLRAAQGEKGVIEPTFVDSPLYKDQGIDFFASKVELGPNGVEKIYPVGPVDEVEQKLLDACLVDLKKNIQKGKDFVAANPGK

SEQ ID NO: 45040 - DNA, 993 bp, Neurospora crassa
  CDS (1)..(993)
atggtcaaggccgttgttgctggcgccgctggcggtatcggacagcccctgtccctcctcctcaagctgtctcctctcgttgacgagctcgccctctacgatgtcgtcaacacccccggtgttgctgccgatctctctcacatctcctcccccgccaaaaccaccggctaccttccccccaacgacggcgccaaggccgccttcaaggatgccgacatcattgtcatccccgccggtattcctcgcaagcctggcatgacccgtgatgatctcttcaacatcaacgccggtatcgtcaagggcttgattgaggttgctgctgatgtggcccccaacgcattcatcctcgtcatctccaaccctgtcaactcgactgtccccatttccgccgaggtcctcaaggccaagggtgtcttcaacgcccagcgcctcttcggtgtcaccaccctcgatattgtccgtgccgagaccttcgttgctgagattgctggcaatagcaacccccaggagctcgttgtccccgtcatcggtgggcactccggcgagaccatcgttcctctcttcagcaaggtgtccccctcggtcaccatccctgacgacaagtacgatgctcttgtcaaccgcgtccagttcggtggtgatgaggtcgtcaaggccaaggagggtctcggctctgccaccctctccatggcttatgccggttatcgcttcgctgagaagctcctcaaggccgccaagggcgccaagggccttgtcgagcccacctacgtctatctccccggtattcccggtggtaaggagatcgcggagaagactggtgttgacttcttctccgtccccgtcgagctcggccccaatggtgctgagaaggctattgacatcctcggcgacatcaccgagaaggagaagactctcctcgaggctgccatcaagggcctcaagggcaacatccagaagggcgttgactttgcccacaacccccctcagaagtag

SEQ ID NO: 45041 - protein, 330 aa, Neurospora crassa
MVKAVVAGAAGGIGQPLSLLLKLSPLVDELALYDVVNTPGVAADLSHISSPAKTTGYLPPNDGAKAAFKDADIIVIPAGIPRKPGMTRDDLFNINAGIVKGLIEVAADVAPNAFILVISNPVNSTVPISAEVLKAKGVFNAQRLFGVTTLDIVRAETFVAEIAGNSNPQELVVPVIGGHSGETIVPLFSKVSPSVTIPDDKYDALVNRVQFGGDEVVKAKEGLGSATLSMAYAGYRFAEKLLKAAKGAKGLVEPTYVYLPGIPGGKEIAEKTGVDFFSVPVELGPNGAEKAIDILGDITEKEKTLLEAAIKGLKGNIQKGVDFAHNPPQK

SEQ ID NO: 45042 - DNA, 993 bp, Magnaporthe grisea 70-15
  CDS (1)..(993)
atggtcaaggccgttgttgctggtgccgccggtggcattggacagcccctttcgctgctcctgaagctctgccctttggtcgatgagcttgccctttacgatgtcgtcaatacccccggtgttgccgctgatctctctcacatctcctctaacgcgaaaatcgccggttaccttcccaaggacgatggtggcaagaaggccctcaaggatgccgacctgattgtcattcctgctggcgttccccgcaagcctggaatgacccgtgatgatctcttcaacatcaacgccggcatcgtgaagggacttatcgagatcgctgccgaggtcgcccccaaggccttcatcctggttatttctaaccccgtcaactcaacggttcccatctcggccgaggttctcaaggccaagggtgtcttcaacccgcagcgcctctttggtgtcaccaccctggacattgtccgcgccgagaccttcgtcgctgagatcgccggcaagtccaacccccaggagttgaccgtccccgtcattggcggtcactcgggcgagaccatcgtgccccttttcagccaagtcaagcctgccgtcaccatccctgacgacaagtacgacgctctcgtcaaccgtgttcagtttggcggtgacgaggtcgtcaaggccaaggatggcgctggctcggcaaccctcagcatggcatatgctggctaccgatttgccgagaagctgctcaaggccatcaagggtgccaagggtctcgttgagcccagctatgtctatctccccggtgtccccggtggcgaggcaattgccaagaagaccggttgcgactttttctcggttcccatcgagctcggtcccaacggagctgagaaggcacatgacgtgctcggcgagctgaccagcaaggagcagacgcttctggaggcagccgtcaacggactcaagggcaacatccagaagggtgttcagttcgtcaacagccctcctcaaaagtaa

SEQ ID NO: 45043 - protein, 330 aa, Magnaporthe grisea 70-15
MVKAVVAGAAGGIGQPLSLLLKLCPLVDELALYDVVNTPGVAADLSHISSNAKIAGYLPKDDGGKKALKDADLIVIPAGVPRKPGMTRDDLFNINAGIVKGLIEIAAEVAPKAFILVISNPVNSTVPISAEVLKAKGVFNPQRLFGVTTLDIVRAETFVAEIAGKSNPQELTVPVIGGHSGETIVPLFSQVKPAVTIPDDKYDALVNRVQFGGDEVVKAKDGAGSATLSMAYAGYRFAEKLLKAIKGAKGLVEPSYVYLPGVPGGEAIAKKTGCDFFSVPIELGPNGAEKAHDVLGELTSKEQTLLEAAVNGLKGNIQKGVQFVNSPPQK

SEQ ID NO: 45044 - DNA, 1011 bp, Magnaporthe grisea 70-15
  CDS (1)..(1011)
atgtttgctgcatcaaggatccagacccgtgccttttcggctgcggcgcgcaacctctccaaggttaccgttctcggcgccgccggtggcatcggtcagcctctctccctcctcctcaagctcaaccccagggttactgagcttgcgctgtacgacattcgtggaggccccggtgtcgctgccgacatctcgcacatcaacaccaagtcaaacgtcaagggctacgaccccacgccctccggccttgctgccgccctcaagggctccgaggttgtcctcatccccgccggtgtcccccgcaagcccggcatgacccgtgacgacctcttcaacaccaacgcctccatcgtccgcgacctggccaaggcctgcgccgagtcttgccccgaggccaacatcctggtcatcagcaaccccgtcaactcgaccgtccctatctgcgccgaggtcttcaaggcccgtggtgtctacaaccccaagcgcctctttggtgtcaccaccctcgacgtcgtccgtgcctcgcgcttcgtctccgagatcaagggctccgaccccaaggacgagaacatcaccgtcgtgggcggccactctggtgtgaccatcgttcccctcttcagccagagcaaccaccccgacctgtctgccaacgaccagctcgtcaaccgcgtccagttcggtggtgacgaggtcgtcaaggccaaggacggtgccggttccgccaccctctccatggccatggccggtgcccgcatggccgagtcggtcctgcgcgccgctcagggcgagaagggcgtcatcgagcccacctttgtcgactcgcccctctacaaggaccagggcatcgagttcttcagctcaaaggtcgagctcggccccaacggtgtcgagaagatcctgcccattggcgagattgacgccaacgagcagaagctgctcgacgcctgcgtgggcgacctgaagaagaacattgagaagggtgttgcctttgttgcctccaaccccggcaaataa

SEQ ID NO: 45045 - protein, 336 aa, Magnaporthe grisea 70-15
MFAASRIQTRAFSAAARNLSKVTVLGAAGGIGQPLSLLLKLNPRVTELALYDIRGGPGVAADISHINTKSNVKGYDPTPSGLAAALKGSEVVLIPAGVPRKPGMTRDDLFNTNASIVRDLAKACAESCPEANILVISNPVNSTVPICAEVFKARGVYNPKRLFGVTTLDVVRASRFVSEIKGSDPKDENITVVGGHSGVTIVPLFSQSNHPDLSANDQLVNRVQFGGDEVVKAKDGAGSATLSMAMAGARMAESVLRAAQGEKGVIEPTFVDSPLYKDQGIEFFSSKVELGPNGVEKILPIGEIDANEQKLLDACVGDLKKNIEKGVAFVASNPGK

SEQ ID NO: 45046 - DNA, 1011 bp, Gibberella zeae PH-1
  CDS (1)..(1011)
atgttcgccgcttctcgcatccagcgccgtgctttctccgccaccgcccgggacctttccaaggtcaccgttctcggtgctgctggtggtatcggccagcctctctctctcctcctcaagatgaacccccgcgtcactgacctcgccctctacgatatccgtggcggacccggtgttgctgctgacatctcccacgtcaacaccaagtccagcgtcaagggatacgagcccaacgcggctggtctcaaggaggctctctccggcgctgaggtcgtcctcatccccgctggtgtcccccgcaagcccggtatgacccgtgacgatcttttcaacaccaacgcctctatcgtccgcgacctcgccaaggccgccgctgaggctgcccccaaggccaagctcctgatcatctccaaccccgtcaactccaccgtccccatcgtcaaggaggtttacaaggctgccggtgtctacaaccccaagaccctcttcggtgtcaccaccctcgacgttgtccgtgcctcccgattcgtttccgagatcaagggcaccgaccccaaggacgagaacatcaccgtcgttggtggccactccggtgtcaccatcgtccctctcttctctcagtccaaccaccccgacctctcctccaacgctgagctcgtcaagcgtgtccagttcggtggtgacgaggttgtcaaggccaaggacggtgctggctctgccactctctccatggccatggctggtgcccgcatggctgactccgtcctccgcgccgtccagggcgagaagggtgtcaaggagcccgctttcgtcgagtctcctctctacaaggaccagggtattgagttcttcagctctcaggtcgagctcggccccgagggtgttgagaagatccaccctctcggcaagctcgacgccaacgaggagaagctcgttgacgccgctctcgtcgacctcaagaagaacattgagaagggtgttgccttcgttgcctccaaccctcccaaataa

SEQ ID NO: 45047 - protein, 336 aa, Gibberella zeae PH-1
MFAASRIQRRAFSATARDLSKVTVLGAAGGIGQPLSLLLKMNPRVTDLALYDIRGGPGVAADISHVNTKSSVKGYEPNAAGLKEALSGAEVVLIPAGVPRKPGMTRDDLFNTNASIVRDLAKAAAEAAPKAKLLIISNPVNSTVPIVKEVYKAAGVYNPKTLFGVTTLDVVRASRFVSEIKGTDPKDENITVVGGHSGVTIVPLFSQSNHPDLSSNAELVKRVQFGGDEVVKAKDGAGSATLSMAMAGARMADSVLRAVQGEKGVKEPAFVESPLYKDQGIEFFSSQVELGPEGVEKIHPLGKLDANEEKLVDAALVDLKKNIEKGVAFVASNPPK

SEQ ID NO: 45048 - DNA, 993 bp, Gibberella zeae PH-1
  CDS (1)..(993)
atggtcaaggctgttgttgctggcgcctctggtggcattggccagcccctctctctcctcctcaagacctctcctcacattgacgagctcgccctgtacgatgtcgtcaacacccccggtgtcgctaccgatctctctcacatctcctcccgtgccaagaccactggctaccttcccgccaacgatggcgctaaggctgccttcaaggacgctgacattattgtcatccccgctggcattcctcgcaagcctggaatgacccgtgatgatctcttcaatatcaatgctggcattgtcaagggtctcatcgaggtcgctgctgaggtcgcccccaaggctttcatcctcgtcatctccaacccagtcaactcgactgtccccatctctgccgaggtcctcaaggccaagggggttttcaaccctcagcgtctctttggtgtcaccaccctcgacatcgtccgtgccgagaccttcgttgctgagatcactggcaaggccaacccccaggagctgaccatccccgtcattggtggtcactctggcgagactattgttcccctcttcagcaaggcctctccttcagttcagatccccgacgacaagtacgatgctctcgtaaaccgcattcagttcggcggtgacgaagttgtcaaggccaaggacggtgctggttccgccaccctgtccatggcctatgccggtttccgattcgccgagaaggttctccgtgccgtcaagggcgagaagggccttgttgagcccagctacgtctaccttcccggtgttcccggaggcgaggccattgctaaggaaactggctgcgacttcttctctgtccccatcgagcttggccccaacggtgctgagaaggccaccaaccccttcgagggcattaccgagaaggagaaggctctgctagccaaggccaccgagggcctcaagggcaacatcaccaagggtgtcagctttgtccacaaccctccccaaaagtga

SEQ ID NO: 45049 - protein, 330 aa, Gibberella zeae PH-1
MVKAVVAGASGGIGQPLSLLLKTSPHIDELALYDVVNTPGVATDLSHISSRAKTTGYLPANDGAKAAFKDADIIVIPAGIPRKPGMTRDDLFNINAGIVKGLIEVAAEVAPKAFILVISNPVNSTVPISAEVLKAKGVFNPQRLFGVTTLDIVRAETFVAEITGKANPQELTIPVIGGHSGETIVPLFSKASPSVQIPDDKYDALVNRIQFGGDEVVKAKDGAGSATLSMAYAGFRFAEKVLRAVKGEKGLVEPSYVYLPGVPGGEAIAKETGCDFFSVPIELGPNGAEKATNPFEGITEKEKALLAKATEGLKGNITKGVSFVHNPPQK

SEQ ID NO: 45050 - DNA, 1683 bp, Apis mellifera
  CDS (1)..(1683)
atgtcaactgtaagtcaaatttcggctaaaaaatatatttttgaaagtaataaaaatattcctgtcaagtattttctaccgacagaagttgcagtacataatacagagattgattgttggatctcatatcatggtgaagtatatgatctaagtgatctttgtaaaatttgggctaacaaaagagagattaaaccaatactggcttatgctggtaaggatataagtcattggtttgatcacgaaaagaatgatattaaacattatgtgcatcctattactggagtattggtaccatattgtcctcatggtccgattccggatgtaatatcttctgtggtacctgctaatgactggcgagcattagacaaatgtccttggtggttagacgaaaaatataaaataggaaaattaactaaaaaagcacgtccatgtaggattttaaatgttttaatcggcatacaagttgttataatggtctgtgaagaagattctattagacgtatccaagaacgtgctcttatttataattcaaattgcatgttttatacgtggaaattcgaaggaaaggatttaaatctcgatttaactttgacagaaaatggtattccagacgaacaagatcgttttgccgcttgcggtcttcccgatgattactatgtcccgtgtcttatatctcgtttttttttaacaaacaaaaatattttaccaattaataacacgcaaattaacgatttctcatcaaaatctatgaaagtagctattttgggtgctcgtagcaagacaggaaattgcctttcattatttttaaaacaatcacctttgatcgatgaattggcaatttttgataacaactcgtctacttacggtcttgcgttggatttaaattatatcgacacgaaatgtaaggttagcacgtgtaatcatcctgaaaaatgtctcgaggagacgcttcaaggagcgaagatagtgatgatcgtgaccgatagaacatccaacgaatcgaacgaagttttaaaatctaatgcaattatattatcagatctgttaccgaatattattaaattttcacctcagaaagctggaatttacgagtacaatcgcatctttggcgtaatgaatttcgagtgtcttaaagcgaacagcttcaccgcggatttgattaatatcgagccggaatgcacaatgatacccgtgattggcgggggctgttccgaaacgtgcattccacttttttcacaagcgaaaccttccaacaaaatatctcaggtggaagcaagaagattgacatacgcgataaggatgtccaataataatacgttgaatccaagcgaaaataaagaaacgaattctttcgctttgtcttacgctgccgctagattttgcatgtccctttgcaaagctttgcggcatcaaggaaacgtggtggaatgcgcttacgttagatcctgcgcgataccggaattgacgtatttcgctgcccccttggaattaggcccgaacggaattcagaagcatttggatatcccaccattgaacgattacgagtgtgagcttctcaaagcagctgtaccccgtataaaaaaggctattaaattaggagagactctcgcactcggagacgacaattcctcttccgaattgtgcttgaataatttaatgtcaaatcctaaatgtttctcgtaa

SEQ ID NO: 45051 - protein, 560 aa, Apis mellifera
MSTVSQISAKKYIFESNKNIPVKYFLPTEVAVHNTEIDCWISYHGEVYDLSDLCKIWANKREIKPILAYAGKDISHWFDHEKNDIKHYVHPITGVLVPYCPHGPIPDVISSVVPANDWRALDKCPWWLDEKYKIGKLTKKARPCRILNVLIGIQVVIMVCEEDSIRRIQERALIYNSNCMFYTWKFEGKDLNLDLTLTENGIPDEQDRFAACGLPDDYYVPCLISRFFLTNKNILPINNTQINDFSSKSMKVAILGARSKTGNCLSLFLKQSPLIDELAIFDNNSSTYGLALDLNYIDTKCKVSTCNHPEKCLEETLQGAKIVMIVTDRTSNESNEVLKSNAIILSDLLPNIIKFSPQKAGIYEYNRIFGVMNFECLKANSFTADLINIEPECTMIPVIGGGCSETCIPLFSQAKPSNKISQVEARRLTYAIRMSNNNTLNPSENKETNSFALSYAAARFCMSLCKALRHQGNVVECAYVRSCAIPELTYFAAPLELGPNGIQKHLDIPPLNDYECELLKAAVPRIKKAIKLGETLALGDDNSSSELCLNNLMSNPKCFS

SEQ ID NO: 45052 - DNA, 1035 bp, Ustilago maydis 521
  CDS (1)..(1035)
atgttcgctcgtcaggctcttcgcttggctgtgcccaaggccgccgcgcctcgtttcttctcgtcatcgaccgccaacaaccgcgccgtcgccgttctcggtgcttctggcggtatcggacagccgctttctcttctgctcaagcagaaccctttggtctcggacctgcgcctgtacgatgttcgtctcgctcccggtgtcgccgccgacatttcgcacgtcaacaccccctccaccaccaccggttaccaggctgaccagctcggtgaggcgctcaaggatgtcgaggtcatcgtcatccctgctggtgtcccccgtaagcccggaatgactcgtgacgaccttttcaacaccaacgcctcgatcgtccgtgatctcgccaagaaggccgccgaagtcgcccccaaggctcacctcctgatcatctcgaaccctgttaactcgactgtccccatcgtcgccgaggtgttcaagaaggccggtgtctacgaccccaagaagctgtacggtgtcaccaccctcgatgtcactcgtgcttccaccttcctttcgggcatctcgggcaagaagccctcggagaccattgtgcctgtcgtcggtggtcactcgggtgtcacgattgtacccttgctctcgcaggccaacggcggtgacgccgttgccaagggcgagcagtacgagaagctcgtccaccgcatccagttcggtggtgacgaggtcgtcaaggccaaggacggtgccggttcggctaccctctcgatggcttatgctgccgccgtattctccgactcgctcctcaaggctctcaacggtgagaagggcatcaaggagtgcgcctacgtcgagtcgcccctgtacaaggaccagggcgccaccttcttcgccagccccgtcacgctcggcaaggatggtgttgaggagatccactcggtcggcaaggtctcggctgaggaggagaagctcctcgaggctgctatccccgagcttgccaagaacatcaagaagggtgtcgactggtacgccgcctcgccctaa

SEQ ID NO: 45053 - protein, 344 aa, Ustilago maydis 521
MFARQALRLAVPKAAAPRFFSSSTANNRAVAVLGASGGIGQPLSLLLKQNPLVSDLRLYDVRLAPGVAADISHVNTPSTTTGYQADQLGEALKDVEVIVIPAGVPRKPGMTRDDLFNTNASIVRDLAKKAAEVAPKAHLLIISNPVNSTVPIVAEVFKKAGVYDPKKLYGVTTLDVTRASTFLSGISGKKPSETIVPVVGGHSGVTIVPLLSQANGGDAVAKGEQYEKLVHRIQFGGDEVVKAKDGAGSATLSMAYAAAVFSDSLLKALNGEKGIKECAYVESPLYKDQGATFFASPVTLGKDGVEEIHSVGKVSAEEEKLLEAAIPELAKNIKKGVDWYAASP

SEQ ID NO: 45054 - DNA, 1374 bp, Ustilago maydis 521
  CDS (1)..(1374)
atggtcaaggctacggttatcggcgccgctggtggtatcggccagcctctctcgcttctgctcaagcagtcttcgctggtcaccgacctggcgctctacgatgtcgtcaacgcgcctggcgtcgctgccgatctttcgcacatcaacaccccctcgatcgtcactggctacctccccgccgatggcggtctgggcaaggcgctcaagggtgccgacattgtcgtcatccctgccggtgttccccgcaagcctggtatgacgcgtgatgaccttttcaacctgatttccaagattgagcacgcgtatcgagagagtcgagagagtcgagagatgttgcgtgtttccaagctcgatttttgggaagcaaattatcttgttggtccaagcgcagagtcacgaatcgtcgcgctctcgaaaaagccggcagttggtcagaggacgcagctcgcaaacctcgagcaagctgccactcggcagagaaagcagctactgacaacatggcttgccatttttatccctccttctcactcggcgacgttggtgcgcactcgaatgttgcacgatcgacacggtgccattttcgattcgacggatgctgcacccccaacatttcttgacactcttgcatccacctgcatccgccaaacaaccacgacgatcaacgctggtatcgttcgcgacattgccgtcggcatcgctgagcattcgcccaaggcctttgtgctcgtcatctcgaaccctgtcaattcgacggtgcccatcgttgccgaggtgctcaagaagaagggcgtttacgatgccaagcgtctctttggtgtgaccacgctcgacgtggtgcgtgcgtcgacgttcatctcggaggcggctggcaagcccaccgaatcgctcaactaccgcatccccgtggtaggcggacactctggtgtcacgattgtccccttgatcagccagtcgcagccaccgatctcggtggaccaggccaagatcgagcagctcaccaaccgcatccagttcggcggtgacgaggtggtcaaggccaaggacggtgccggatcggctacgctgtccatggcctacgctggtgcgcgctttgccatcgccgtcctcgaggcggcttctggcaagtcgctcgctcaccccgagatgggctacgtcgacctcacctcggacgccgctggcgccaagcagatcaccgccgtcatcggcaacgacactcccttcttctccgtgccgcttcagctcggtcccagcggtgttgagaagatccttcccctcggtaagctcaacgactacgagtctgagcttatcaagaaggccgtcgtcgacctcaacggcaacatcagcaagggtgttcagttcactgctaacctttga

SEQ ID NO: 45055 - protein, 457 aa, Ustilago maydis 521
MVKATVIGAAGGIGQPLSLLLKQSSLVTDLALYDVVNAPGVAADLSHINTPSIVTGYLPADGGLGKALKGADIVVIPAGVPRKPGMTRDDLFNLISKIEHAYRESRESREMLRVSKLDFWEANYLVGPSAESRIVALSKKPAVGQRTQLANLEQAATRQRKQLLTTWLAIFIPPSHSATLVRTRMLHDRHGAIFDSTDAAPPTFLDTLASTCIRQTTTTINAGIVRDIAVGIAEHSPKAFVLVISNPVNSTVPIVAEVLKKKGVYDAKRLFGVTTLDVVRASTFISEAAGKPTESLNYRIPVVGGHSGVTIVPLISQSQPPISVDQAKIEQLTNRIQFGGDEVVKAKDGAGSATLSMAYAGARFAIAVLEAASGKSLAHPEMGYVDLTSDAAGAKQITAVIGNDTPFFSVPLQLGPSGVEKILPLGKLNDYESELIKKAVVDLNGNISKGVQFTANL

SEQ ID NO: 45056 - DNA, 972 bp, Aspergillus nidulans FGSC A4
  CDS (1)..(972)
atggtcaaaattgcactcctcggtgctgccggccagatcggcacaccactgagccttctctgcaaggcaagtgacctctttgctgagattagcctgtacgatattgtgcatgtgccaggtattgccacggacctgatgcacattgacactagggcaagggtgacgggtcatctgccggacgactctggtctcaagaaggccctcactggcgccgatattgtcgtggtaactgccggtattgcgaggaagcctggaatgaccagagatgcgcagacaaacgcgagtatcatccgggacatctttgccgaaattgcagcgacatgcccgaacgcagtaagctgtgtagtcactaacccggtcaactccacactccccgttgcagcggaaacgctcaagaaggcaggtgtcttcgagccaactcgtctgttcggtataacgacgcttgacgtcgtgcgcgcctcaacctttgccgcacacgccttggacagcaacagcgacccaaaagccttcaaggtacctgtcatcggtggccatagcggcgcaacaatcctgccactctacagtcaagcggagcctccggtgaacctggataaggagaccctggctgcagtcatccaccgtgtgcaattcggcggtgacgagattgtcaagtccaaacagggcgcgggtagcgcaacaacatgcatggcgtacgccggcttccggttcgtcaaagccattgtcgctgccatgaacggtgaatccgtaacagaggaggcctacgtctacctccccggtattgcagggggccaggaaattgcacaggagctgggcgttgattacttcgccctcaaggtcaccttgggccgcacaggcgctaaccaggtcttgcccattggggagatatctgagaacgagagtacactgctgaaggttgctatcaatgatttgaaggccaacatcgtcactggggtgtcattcatggcggcttga

SEQ ID NO: 45057 - protein, 323 aa, Aspergillus nidulans FGSC A4
MVKIALLGAAGQIGTPLSLLCKASDLFAEISLYDIVHVPGIATDLMHIDTRARVTGHLPDDSGLKKALTGADIVVVTAGIARKPGMTRDAQTNASIIRDIFAEIAATCPNAVSCVVTNPVNSTLPVAAETLKKAGVFEPTRLFGITTLDVVRASTFAAHALDSNSDPKAFKVPVIGGHSGATILPLYSQAEPPVNLDKETLAAVIHRVQFGGDEIVKSKQGAGSATTCMAYAGFRFVKAIVAAMNGESVTEEAYVYLPGIAGGQEIAQELGVDYFALKVTLGRTGANQVLPIGEISENESTLLKVAINDLKANIVTGVSFMAA

SEQ ID NO: 45058 - DNA, 963 bp, Aspergillus nidulans FGSC A4
  CDS (1)..(963)
atgcctctatcccttttgctcaaggcatccccctttattgacgagctcgccctttacgatgttgtcaacacccccggtgttgccgctgacctctcccacatttcttctgttgctaaaatctcaggttacctgcccaaggaagatggcctgaaaaacgccttgactggcactgacattgtcgttatcccagctggaattcctcgtaagcctggtatgactcgtgatgaccttttcaagatcaacgctggcattgtccgtgaccttgtcaagggcattgccgaatacagccccaaggctttcatcttgatcatttcaaaccccgtcaactccaccgtacccattgctgccgaaatcctcaaagccgctggcgtctttgacccggcgcgtctctttggcgttacaactttagatgttgtccgcgcagaaaccttcacccaggagttctccggccagaaggacccatccgcagtgactgtccctgttgttggtggtcactccggcgaaactattgtccccctcttcagcaaggtttctcctgccttccagattccggcagacaaatacgatgcgcttgtcaaccgcgtccagttcggtggcgacgaggtcgtcaaagccaaggacggcgccggctctgccaccctttccatggctttcgctggcttcaggtctggcatcctgtttgcagagagcgtgatcaaagcctccaagggccagtctggcattgtcgagccaagctacgtctacctaccaggtgtgcctggtggcgcggatattgccaaggctaccggcgttaactttttctcgactcctgtcgaacttggaccgaatggtgttcaaaaggccataaacattctcgacggtattacagatgctgagaaaaagctccttgatacggctatcaagggtctcaagggcaacattgacaagggcgtcgaattcgctcagagtcccccaccaaagtaa

SEQ ID NO: 45059 - protein, 320 aa, Aspergillus nidulans FGSC A4
MPLSLLLKASPFIDELALYDVVNTPGVAADLSHISSVAKISGYLPKEDGLKNALTGTDIVVIPAGIPRKPGMTRDDLFKINAGIVRDLVKGIAEYSPKAFILIISNPVNSTVPIAAEILKAAGVFDPARLFGVTTLDVVRAETFTQEFSGQKDPSAVTVPVVGGHSGETIVPLFSKVSPAFQIPADKYDALVNRVQFGGDEVVKAKDGAGSATLSMAFAGFRSGILFAESVIKASKGQSGIVEPSYVYLPGVPGGADIAKATGVNFFSTPVELGPNGVQKAINILDGITDAEKKLLDTAIKGLKGNIDKGVEFAQSPPPK

SEQ ID NO: 45060 - DNA, 1077 bp, Aspergillus nidulans FGSC A4
  CDS (1)..(1077)
atgttcgctgctcgccaatctttcggtttccttcagaagcgggccttctcggcctctgctagccaggcctccaaggttgctgtcctcggtgccagtggcggcattggccagcctctgtccctgctcctcaagcttaacccccgtgtttccgagcttgctctctacgatatccgcggtggacctggtgtcgctgctgatatcagccacatcaacactaacagcaccgttaagggctacgagcctactgagagcggcctcgccgatgccctcaagggctccgagatcgtcctcattcctgccggtgttccccgtaagcccggcatgacccgtgacggtaaggaggatgactgtgaaaatctacgaataggcactgatcttttgatgacagacctcttcaacaccaacgcttccatcgttcgcgaccttgctaaggccgctgccaaggcttcccccgaggctaacatcctcgtcatttctaaccctgtcaactccaccgtccccatcgtctctgaggtcttcaaggccgctggcgtctacaaccccaagcgcctctttggtgtcaccacccttgatgtcgtccgtgcttcccgcttcatctctcaggtccagggtaccgacccctctaaggaggccgttcccgttgtcggtggacactctggcgtgaccatcgttcccctgctttcccagtccaaccaccccaacattgatggcaagacccgcgatgagcttgtccaccgcatccagtttggtggtgacgaggttgtcaaggctaaggacggtgctggctccgccactctctccatggccatggccggtgctcgcttcgccgagtctctcctccgcgctgcccagggcgagaagggtgtcgttgagcccactttcgtcgagagccctctctacaaggaccagggcgtcaacttcttcgcttccaaggttgagcttggccccaacggtgctgagaagatcaaccccgttggcgaggttaacgaattcgagcagaagctccttgaggcctgcctcgttgacctgaagaagaacatccagaagggtattgacttcgtcaaggccaacccttaa

SEQ ID NO: 45061 - protein, 358 aa, Aspergillus nidulans FGSC A4
MFAARQSFGFLQKRAFSASASQASKVAVLGASGGIGQPLSLLLKLNPRVSELALYDIRGGPGVAADISHINTNSTVKGYEPTESGLADALKGSEIVLIPAGVPRKPGMTRDGKEDDCENLRIGTDLLMTDLFNTNASIVRDLAKAAAKASPEANILVISNPVNSTVPIVSEVFKAAGVYNPKRLFGVTTLDVVRASRFISQVQGTDPSKEAVPVVGGHSGVTIVPLLSQSNHPNIDGKTRDELVHRIQFGGDEVVKAKDGAGSATLSMAMAGARFAESLLRAAQGEKGVVEPTFVESPLYKDQGVNFFASKVELGPNGAEKINPVGEVNEFEQKLLEACLVDLKKNIQKGIDFVKANP

SEQ ID NO: 45062 - DNA, 1056 bp, Gallus gallus
  CDS (1)..(1056)
atgcgcggcgcagtggaggtcgttggagtcacagccgccgccatgctgtcccgcctcgcccgtcccgccgctgtcctgtgccgcggcctggccaccagcgcccagaacaatgccaaggtggcagtgctgggagcatcaggagggattgggcagcctctctcccttctcctgaagaacagcccgctggtgagcaggctcaccctttacgatattgcgcacactcctggtgttgcagctgacctcagtcacatcgagacaagagcgaatgttaaaggtttcctgggacctgagcagctgccagaatgtttgaagggctgtgatgttgtagtgattcctgcaggagtccctaggaaaccaggtatgacccgtgatgacctgttcaacaccaatgctagcattgttgctactttaacaactgcctgtgcaaagcactgcccagaagccatgatctgtattatttccaacccggtaaattcaaccatacccataacttcagaagttttcaagaagcatggtgtgtataatcccaatagaatctttggtgtaacaacactggacatcgtcagagcgaatacttttgtggctgagctaaagggtttagatccagctcgagtaagtgttccagttattggtggccatgcagggaaaaccatcatccctctgatctcccagtgcacaccgaaagtggacttccctcaggatcaactggaaaagcttacagggagaattcaagaagctggcactgaagttgtcaaagccaaagcaggagcaggatctgccaccttgtctatggcctatgctggcgctcggtttgtgttctctctggtggatgccatgaatggaaaggaaggagttattgaatgttcctttgttcgctcggaagagacggagagcccatacttctctacacctctgctactgggaaaaaatggaattgagaagaacctaggcattggcaagatcaccccctttgaagagaagatggttgctgaggccatggctgagctgaaggcttctattaagaaaggagaggattttgcgaagaacttcaagtaa

SEQ ID NO: 45063 - protein, 351 aa, Gallus gallus
MRGAVEVVGVTAAAMLSRLARPAAVLCRGLATSAQNNAKVAVLGASGGIGQPLSLLLKNSPLVSRLTLYDIAHTPGVAADLSHIETRANVKGFLGPEQLPECLKGCDVVVIPAGVPRKPGMTRDDLFNTNASIVATLTTACAKHCPEAMICIISNPVNSTIPITSEVFKKHGVYNPNRIFGVTTLDIVRANTFVAELKGLDPARVSVPVIGGHAGKTIIPLISQCTPKVDFPQDQLEKLTGRIQEAGTEVVKAKAGAGSATLSMAYAGARFVFSLVDAMNGKEGVIECSFVRSEETESPYFSTPLLLGKNGIEKNLGIGKITPFEEKMVAEAMAELKASIKKGEDFAKNFK

SEQ ID NO: 45064 - DNA, 1089 bp, Candida glabrata CBS138
  CDS (1)..(1089)
atgcctcatattactggaaacaacgaagctgatctgaaagtgtctattctaggtgccgcaggcggtatcgggcagtcgctgtcgctgctggtgaagacgcaattgcaagtgctcgctggctctgcagacaagaacctgaagctagcacttttcgatgtcaacaaggacgctgtcaacggtgttggcacagacttgtcgcacattgacacgcaggtcgaggtgtccatgcacaacccacaggaaggtgacggtatcaactcgtgtctgaaaggcgctgacatcgtggtgatccctgccggtgtgccaagaaagccaggtatgacccgtgacgacctgttcaacatcaacgccaagatcatcacacagctgaccgactccatcctcgagaactgtgacttgaccagggtggtcgtgctgctgatctccaacccagttaactccttggtcccagttatggtcaacagaatgagccagaaggtgaaccacaagaacacaggcatcgagaagagagtcttcggtgtcacgaacctggacctggtcagagcctccactttcctaagagaagtctccgaggacaagatcgaaaagatgccttacgtgccagtcatcggtggccactcgggcgaaacaatcatcccactgttctcccagaaccctcactccaaggccgtgccatctgagaaactcggcccactggtacacagagtccaatacggtggtgacgaggtcgtcaaggccaagaacggcgcgggttccgctactttgtccatggcccacgccggcttccagtgcgtggtcaagttcgctaagctgttcctaggtggcgaaaaggagttcaaaggcacttactacatctccttgaaagacttcaacaaccaacccatcgctaagaacgccgacgctttgctcccactggtcaacaacgtcccattcttcgctctgccaatgacattgaccctggacggtgtccagtctgtcgacagcgacatcatcgaaaacatgaacatccacgaacgcaaggaactactgccaatctgtctagaccaactagaaaagaacatcgctaagggcctagacttctctgcataa

SEQ ID NO: 45065 - protein, 362 aa, Candida glabrata CBS138
MPHITGNNEADLKVSILGAAGGIGQSLSLLVKTQLQVLAGSADKNLKLALFDVNKDAVNGVGTDLSHIDTQVEVSMHNPQEGDGINSCLKGADIVVIPAGVPRKPGMTRDDLFNINAKIITQLTDSILENCDLTRVVVLLISNPVNSLVPVMVNRMSQKVNHKNTGIEKRVFGVTNLDLVRASTFLREVSEDKIEKMPYVPVIGGHSGETIIPLFSQNPHSKAVPSEKLGPLVHRVQYGGDEVVKAKNGAGSATLSMAHAGFQCVVKFAKLFLGGEKEFKGTYYISLKDFNNQPIAKNADALLPLVNNVPFFALPMTLTLDGVQSVDSDIIENMNIHERKELLPICLDQLEKNIAKGLDFSA

SEQ ID NO: 45066 - DNA, 1011 bp, Candida glabrata CBS138
  CDS (1)..(1011)
atgttgtctagaattagcagaagggcattttcctctacacgtatcaatccatacaaggttacagttctcggtgccaatggtggtattgggcagccattgtcgttgctgttgaagttgaaccagaaggttactgatctgaggttgtacgatcttagaggtgctcctggtgttgccagtgacttgtcgcacatcccaacgaactctactgtgaagggtttcactcccgaggaggccgatggtttgaagaatgctttgaaggacaccgacctggtgttgattcctgctggtgtgcctagaaagccaggtatgactcgtgatgacttgtttgccatcaatgccggtatcgtgcgtgacttggccaccgctgctgccgagtctgctccaaacgctgccatcctggtgatctctaacccagttaactctaccgtgccaattgtcgccgaggtcttgcaaaagaaaggtgtgtacaaccctaagaagttgttcggtgtcaccacattggactccatcagagcttccagattcatctccgaagttgtcggcactgacccaacccaggagaaagtaaacgttgttggtggtcactctggtatcacaattatcccacttctatctcagaccaagtacggtgataaattggacaaggaccaaaaggacgccttgatcaagagaatccagttcggtggtgacgaagtcgtcaaggccaagaacggtgctggttccgctactctatccatggcccaggccggtgctttgttcgccaacgctgtcctatccggtttcgccggtgaacaaaacgtcgtcgaaccatctttcgtcgactcccctctatacaagggcgaaggtatcgagttctttgcttccccagttactctaggaaaggaaggtgttgttaagatccacccaattggtaccatctccgctgaagaggaagagatgttggccacttgtaaggagaccttgaagaagaacatcgaaaagggtatcaacttcgtcaagtccagcaattaa

SEQ ID NO: 45067 - protein, 336 aa, Candida glabrata CBS138
MLSRISRRAFSSTRINPYKVTVLGANGGIGQPLSLLLKLNQKVTDLRLYDLRGAPGVASDLSHIPTNSTVKGFTPEEADGLKNALKDTDLVLIPAGVPRKPGMTRDDLFAINAGIVRDLATAAAESAPNAAILVISNPVNSTVPIVAEVLQKKGVYNPKKLFGVTTLDSIRASRFISEVVGTDPTQEKVNVVGGHSGITIIPLLSQTKYGDKLDKDQKDALIKRIQFGGDEVVKAKNGAGSATLSMAQAGALFANAVLSGFAGEQNVVEPSFVDSPLYKGEGIEFFASPVTLGKEGVVKIHPIGTISAEEEEMLATCKETLKKNIEKGINFVKSSN

SEQ ID NO: 45068 - DNA, 1122 bp, Candida glabrata CBS138
  CDS (1)..(1122)
atggtaaaagttgcagttctgggcgcatctggtggtgtcgggcagccattgtcgctgttgttgaagttgaacacaatgatatctgagctggctctctatgatatcaagctcgctgagggtgttgctactgatctttcgcatatcaacaccaatgctgattgtgttgggtacagtacggatgacataggccaggcgttgaaaggtgctgccgtggtggttatcccagccggtgttcctagacgtccagggatcactagagatgacctgttcaagttgaatgctggtattgtgaagaaccttgtctccaatgttgccaagcattgtccaaatgccaggttactgatcatctccaacccagtaaacagtctgatccctgttgccgtggagaccctgaagagatgtggggtattccaagcaggcaacgtcatgggtgtcactaccctggaccttgtacgtgcggagacgttccttgcagagtacctgaacacgcacgaggccaaggaaattggcggtattgcaggtgagaggacttatgacaagagcaagatgtacaaatatgtaggtgtcatcggtggtcattctggagagaccattgtccccttggttttcaaccacatgatgaccaggacactggaaaagaccaacaaatacgacgagttcatcaacagggtccagtacggtggtgacgaagttgtgaaggccaaggccaaagacggcagcggatccgcaacattgagcatggcccttgcgggttccaagtttgtcaatgaggtcctacagagcgtccaccgccgtgacgagcaccgcaagcgtgtgaaccgcaccagcgaccgcaagaacgtcaccatctcgtccacatacgtctatctaccgggactgtccaacggtaaggaagtacaggagaaactgaagaacttggccggcataagggacgccagcgtgcgttgtgagtactttgcactacccgtagtgctagaggacggccgtgtgacgcgcgtggacaagagcatcctagacagcatctcgccaaaggagaaagagatggtcaagatcgccatccaagagctagagaagaacgtgaacaaaggaaaggacttcgtgtccgggcaaaccaagttatga

SEQ ID NO: 45069 - protein, 373 aa, Candida glabrata CBS138
MVKVAVLGASGGVGQPLSLLLKLNTMISELALYDIKLAEGVATDLSHINTNADCVGYSTDDIGQALKGAAVVVIPAGVPRRPGITRDDLFKLNAGIVKNLVSNVAKHCPNARLLIISNPVNSLIPVAVETLKRCGVFQAGNVMGVTTLDLVRAETFLAEYLNTHEAKEIGGIAGERTYDKSKMYKYVGVIGGHSGETIVPLVFNHMMTRTLEKTNKYDEFINRVQYGGDEVVKAKAKDGSGSATLSMALAGSKFVNEVLQSVHRRDEHRKRVNRTSDRKNVTISSTYVYLPGLSNGKEVQEKLKNLAGIRDASVRCEYFALPVVLEDGRVTRVDKSILDSISPKEKEMVKIAIQELEKNVNKGKDFVSGQTKL

SEQ ID NO: 45070 - DNA, 1215 bp, Kluyveromyces lactis NRRL Y-1140
  CDS (1)..(1215)
atgtctttctcttttgattctgtgtgtaatcgacaagtgctacgactaatcctcacagcacttattattaaaactattattaatttcaacttctttcataaagaaatgcctgctgttaacgctcaagaaaaggagatcttaaagatttctgtgctaggagcagctggtggtattggacaatctttgtcgctattgttaaaatcgaacgcagggtttttgttaccacatgaaacgtcaactcatattcgtttgtcgttatacgatgtcaacaaggacgccatcgtaggtacagcagcagatttatcccacatagatactccaatcacaacaacagcacactacccggatgacagcaatggtggtattggccaatgcttgagtaatgctagtgtggttatcattccagctggtgttccaagaaaaccgggtatgtcacgtgacgatttgattggtgtcaatgcaaagatcatcaaatcgctaggtgaagatatcgccaagtactgtgacttaaacaaagttcatgttttggttatatctaatcctatcaactctttggtcccgctattgactaatactttgattagaagcgatgcaaatggcaactcaaacatcgaatcaagagtgtacggtatcacccaattggatttggtcaggtcttccacttttgtccaacaactgaacggttttaaatcaaacacatcccctgtgattccagtcatcggtggtcactctggggataccattattcctgttttctctacgttggagagggatccggaatatgctaatttgttggataatggcatgagactgaaaatggttcacagagttcagtacggtggtgatgaaatcgtcaaggctaagaacggtaatggtagcgcaacactgtctatggcatatgctggattcaaaatcgcagctaaattcattgacttattagttggtaacacagataccatcgacgacattgtcatgtacgttccactcacaaacagaaatcatcaagaaattgcacctggatccaatgaattgagatctagatacatcaacgatttactatacttttctatcccattatccattaatcgaaacggtatcaagaagattcactatgaaattttggaaaatcttgattcttacgaacgtgacactttgttgccaatttgcttgaaaacactagaggggaacatcgaaactggtctaaaattggtataa

SEQ ID NO: 45071 - protein, 404 aa, Kluyveromyces lactis NRRL Y-1140
MSFSFDSVCNRQVLRLILTALIIKTIINFNFFHKEMPAVNAQEKEILKISVLGAAGGIGQSLSLLLKSNAGFLLPHETSTHIRLSLYDVNKDAIVGTAADLSHIDTPITTTAHYPDDSNGGIGQCLSNASVVIIPAGVPRKPGMSRDDLIGVNAKIIKSLGEDIAKYCDLNKVHVLVISNPINSLVPLLTNTLIRSDANGNSNIESRVYGITQLDLVRSSTFVQQLNGFKSNTSPVIPVIGGHSGDTIIPVFSTLERDPEYANLLDNGMRLKMVHRVQYGGDEIVKAKNGNGSATLSMAYAGFKIAAKFIDLLVGNTDTIDDIVMYVPLTNRNHQEIAPGSNELRSRYINDLLYFSIPLSINRNGIKKIHYEILENLDSYERDTLLPICLKTLEGNIETGLKLV

SEQ ID NO: 45072 - DNA, 1017 bp, Kluyveromyces lactis NRRL Y-1140
  CDS (1)..(1017)
atggtaagtgttacagttcttggctcatctggtggtattggtcaaccactttcgttgttgttgaaactagaccctcatgtatcaagtttgagattgtacgatttgaagctgtcccacggtaatgctaccgatttgtctcatatcgacactaactccacgtctgaaggtttcaataccgcagagattggtcaagcgttgaaaggtgcccaattggtcataatcccggccggtattccaaggaagccaggtatgtcacgtgacgacttgttcaagatcaacgccaagatcatcaagtctctaactgtgcaaattgctgaacatgcaccagatgccagaatccttgtcatttcaaacccagtgaactcgttggttccaattgtttacgaaactttgcaaagcatgggcaagttccaagccggtaaggttatgggtatcactactttggatatcatcagatctcacactttcctagtagacatcattggccgtaaagcttactccgttgaaaaattgaaggatgcagttaccgtggttggtggtcattctggtgagaccatcattccaatctttactgaccaaaaattctacagacgtttaagagactccaacgtttacgaatcttacgtacacagggttcagtttggtggtgatgaagttgtgaaggccaaggacggtagcggtagtgctactttgtccatggcttgggccggttacacatttgctaagaaattgttgaacagtttgcatttgaacaccgctggtgaccaacatccaatcccaactttcgtttacttacctggtttgccaggtggtaaggaattacaaaagaagttaaatacttctgttgaattcttctctgctccagtgaaattagagaaaggtatcgttgtcgctgtagaacacgaatgggtcgataagttgaacgatgacgaaaagaagttgatcgccaagtgcttgccaatcttagaaaagaacatcaagaagggtctagctttctcgaagcaaaccaagttgtaa

SEQ ID NO: 45073 - protein, 338 aa, Kluyveromyces lactis NRRL Y-1140
MVSVTVLGSSGGIGQPLSLLLKLDPHVSSLRLYDLKLSHGNATDLSHIDTNSTSEGFNTAEIGQALKGAQLVIIPAGIPRKPGMSRDDLFKINAKIIKSLTVQIAEHAPDARILVISNPVNSLVPIVYETLQSMGKFQAGKVMGITTLDIIRSHTFLVDIIGRKAYSVEKLKDAVTVVGGHSGETIIPIFTDQKFYRRLRDSNVYESYVHRVQFGGDEVVKAKDGSGSATLSMAWAGYTFAKKLLNSLHLNTAGDQHPIPTFVYLPGLPGGKELQKKLNTSVEFFSAPVKLEKGIVVAVEHEWVDKLNDDEKKLIAKCLPILEKNIKKGLAFSKQTKL

SEQ ID NO: 45074 - DNA, 1017 bp, Kluyveromyces lactis NRRL Y-1140
  CDS (1)..(1017)
atgcttagaagcatcgctcgtcgtcaattttcatccaccgcattcaatccatacaaagttaccgttttaggtgctggtggtggtattggtcaacctttgtctttactattgaagttgaaccacaaggtcactgatttgagactatatgatttgaagggcgctaagggtgttgccgctgatttgtcccacattccaaccaattctaccgtgactggtttcactccagaatctaaggaatcccaagctgaactagcagctgctttgaaggataccgaagttgtcttgattccagcaggtgttccaagaaagccaggtatgacacgtgacgacttgttctctatcaatgctggtattgttcgtgatttggctggtgccattgccaagaatgctccaaacgctgccatcttggtcatctctaacccagttaactctacagttccaattgttgccgaagtgttgaaacaaaacggtgtttacaacccaaagaagttgttcggtgtcaccacattggatgtgatccgttcctccagatttatttctgagataaggaacaccgatccaaccaccgaacgtgtcaccgttgtcggtggtcactctggtattaccattctaccattgatctctcaaactaaacacaagtcgatgattcaaggtgaaactttggacaaattggtccacagaatccaattcggtggtgatgaagttgtccaagccaagaacggtgccggttctgctactctatctatggctgaagctggtgctcgtttcgccaacagcgtgttggctggtttcgaaggtgaaagagacgttgtcgaatccactttcgtggactctcctctatacaagagcgaaggtatcgaattctttgcttccccagtgactttgggtccagaaggtgttgaaaagattcacggaattggcgctttgtctgaaaaggaagaagaaatgttggccaaatgtaaggaaactttgaagaagaacattgaaaagggtcaaaaattcgtcaccggtaactaa

SEQ ID NO: 45075 - protein, 338 aa, Kluyveromyces lactis NRRL Y-1140
MLRSIARRQFSSTAFNPYKVTVLGAGGGIGQPLSLLLKLNHKVTDLRLYDLKGAKGVAADLSHIPTNSTVTGFTPESKESQAELAAALKDTEVVLIPAGVPRKPGMTRDDLFSINAGIVRDLAGAIAKNAPNAAILVISNPVNSTVPIVAEVLKQNGVYNPKKLFGVTTLDVIRSSRFISEIRNTDPTTERVTVVGGHSGITILPLISQTKHKSMIQGETLDKLVHRIQFGGDEVVQAKNGAGSATLSMAEAGARFANSVLAGFEGERDVVESTFVDSPLYKSEGIEFFASPVTLGPEGVEKIHGIGALSEKEEEMLAKCKETLKKNIEKGQKFVTGN

SEQ ID NO: 45076 - DNA, 1017 bp, Debaryomyces hansenii CBS767
  CDS (1)..(1017)
atggttaaagttacagtttgcggtgctgccggtggtattggtcaaccattatcattattattaaagttaaacccaaagatcgatgaattgtcattgttcgatgttgtcaatgttccaggtgtcggagctgatttatctcacatttgctccaattcatccacatcttctcacttaccatcttccagggaagacaaatcagcattggctgaatccttgaagggtagtgacttagttatcatcccagctggtgtcccaagaaagccaggtatgaccagagatgatttattcaacatcaatgcctctattgttagagacttggcccaaggaattgctgaaaacgcgccaaaggctttcgttttgatcatttcaaatccagtcaactccactgttccgattgttgccgaaaccttaaagaagaacggtgtttacaacccacaaagattattcggtgttactaccttggatatcgtcagagccaacactttcatctcccaaaagtacgctaaggaaaccaaggctactgacttcaacatcaacgtcattggtggtcactccggtgaaaccattgttccattgtactctatcggtaactccaaatcgtactacgacaagttatcggaagaagacaagaaggctttgattaacagagtccaattcggtggtgatgaagtcgtcaaggccaaggacggtgctggttccgccactttgtccatggcttacgccggttacaagttagccgaatccatcttgaaggcattgacctctaagggtgaagaagttgtcgaatgtaccttcttgaacttggacgactccatcaagggtgccgctgaagccaagaagttggtcaaaaacttggatttcttctccttgccagtcagattaggtgctaacggtatcgaggaagtcaagtacgacatcttaaacaacatcagtgctgatgaaaagaaattattagaagttgccatcgaacaattgtctggtaacatcgacaagggtgttgcattcatcaagaaatag

SEQ ID NO: 45077 - protein, 338 aa, Debaryomyces hansenii CBS767
MVKVTVCGAAGGIGQPLSLLLKLNPKIDELSLFDVVNVPGVGADLSHICSNSSTSSHLPSSREDKSALAESLKGSDLVIIPAGVPRKPGMTRDDLFNINASIVRDLAQGIAENAPKAFVLIISNPVNSTVPIVAETLKKNGVYNPQRLFGVTTLDIVRANTFISQKYAKETKATDFNINVIGGHSGETIVPLYSIGNSKSYYDKLSEEDKKALINRVQFGGDEVVKAKDGAGSATLSMAYAGYKLAESILKALTSKGEEVVECTFLNLDDSIKGAAEAKKLVKNLDFFSLPVRLGANGIEEVKYDILNNISADEKKLLEVAIEQLSGNIDKGVAFIKK

SEQ ID NO: 45078 - DNA, 999 bp, Debaryomyces hansenii CBS767
  CDS (1)..(999)
atgtttactaaagttgctgccagatcattctcctcttctgcctcttctgcctacaaggttgctgttttaggtgctaacggtggtattggtcaaccattatctttattattaaagttaaaccacaaagttaccgacttagctttatacgatttaaagggtgctccaggtgtcgctgctgatgtttcgcacattccaactaactccactgtcagtggatacgacccagaaggcttagaacaagctttaaccggatcagacataattgttatcccagctggtgttccaagaaagccaggtatgaccagagatgatttattcaacaccaatgcttctattgttagagacttagccaaggctgctgctgactacgctccagatgctgctgtttgtgttatttctaacccagtcaactccactgttccaattgtggccgaagttttgaagtctaagggtacctacaacccaaagaagttgttcggtgtcaccaccttagatgtcttaagagcttccagatttgtttctgaagttgctggttccaacccagttcacgaaaaggtcaccgttgttggtggtcactccggtatcaccattgttccattattgtcccaaactgaacacaaatctttggaccaagaaaccagagatgctttgatccacagaatccaattcggtggtgacgaagttgtccaagccaagaacggtgctggttccgccaccttatccatggcccaagctggtgctagattcactggtgctgtcttagacggtttagccggtgaaagagatattgttgaaccatctttcgtcgactctccattattcaagagcgaaggtgttgaattcttctcctctaaggtcaccttaggccaagatggtgtcagtactgttcacccattaggtggattatctgaccacgaagaaagcttagtcaaggaagccaaggacaccttgatcaagaacatccaaaagggtgttgacttcgttaagcaaaacccataa

SEQ ID NO: 45079 - protein, 332 aa, Debaryomyces hansenii CBS767
MFTKVAARSFSSSASSAYKVAVLGANGGIGQPLSLLLKLNHKVTDLALYDLKGAPGVAADVSHIPTNSTVSGYDPEGLEQALTGSDIIVIPAGVPRKPGMTRDDLFNTNASIVRDLAKAAADYAPDAAVCVISNPVNSTVPIVAEVLKSKGTYNPKKLFGVTTLDVLRASRFVSEVAGSNPVHEKVTVVGGHSGITIVPLLSQTEHKSLDQETRDALIHRIQFGGDEVVQAKNGAGSATLSMAQAGARFTGAVLDGLAGERDIVEPSFVDSPLFKSEGVEFFSSKVTLGQDGVSTVHPLGGLSDHEESLVKEAKDTLIKNIQKGVDFVKQNP

SEQ ID NO: 45080 - DNA, 1041 bp, Debaryomyces hansenii CBS767
  CDS (1)..(1041)
atggttaaagttacagtttgcggagcagcaggaggcattgggcaaccattgtcgttattattaaagttaaacccgcaagtgagcgaattgtcgttatttgatgtggttaatgcaaatggggttgcagcagatttgtcgcacatttgtagtccagctaaagttacaggatatcagcctagcagcaaggaagaccgtgacacaatccaaaaggcgttggtgaattcagatttggtggtgattccggcaggagttccaagaaagccgggaatgactcgtgcagacttattcaatatcaatgcgtctattatcagggatattgttggaagtatcggtaaggcgtgtcctaatgctgcgatcttgattatttcgaacccggtgaactcgaccgtgccaattgcagccgaagtgttgaagaaattgggtgtatttaacccaaaaaagcttttcggggtcacgacattggattcggtgagagcagaaactttcttgggcgaattgatcaaagaaactccgacctcgttgaagggtcagatctctgtgattgggggccattcgggtgacacaattgtgcctttggtacatgctacagcactggttgcgaagaaagtatcgggtctctccaagagtcagtacaacgaatttatccacagagtccaatttggcggtgacgaggttgttaaggccaagaacggtgcaggatctgcaaccttgtctatggcatatgctggttataggttcgccgagaaggtcattggttcgttgaacggccaatctgaaagttcctccgaaatccctgattcgtcttatatatatttagcgggtgttccaaacggaaaagaattatcacaaaagtacttgaaaaattctgaattcttctccgtgccagttatccttgaaaagggtcaaatcaaagctttcgttaacccattcgataagttgaatgtcacctcagaggaatctaaattagttgatatcgcattaggtggtttacaaaactctatcgaccagggtactacattcgtaactggttcgaaattatag

SEQ ID NO: 45081 - protein, 346 aa, Debaryomyces hansenii CBS767
MVKVTVCGAAGGIGQPLSLLLKLNPQVSELSLFDVVNANGVAADLSHICSPAKVTGYQPSSKEDRDTIQKALVNSDLVVIPAGVPRKPGMTRADLFNINASIIRDIVGSIGKACPNAAILIISNPVNSTVPIAAEVLKKLGVFNPKKLFGVTTLDSVRAETFLGELIKETPTSLKGQISVIGGHSGDTIVPLVHATALVAKKVSGLSKSQYNEFIHRVQFGGDEVVKAKNGAGSATLSMAYAGYRFAEKVIGSLNGQSESSSEIPDSSYIYLAGVPNGKELSQKYLKNSEFFSVPVILEKGQIKAFVNPFDKLNVTSEESKLVDIALGGLQNSIDQGTTFVTGSKL

SEQ ID NO: 45082 - DNA, 1023 bp, Oryza sativa (japonica cultivar-group)
  CDS (1)..(1023)
atgaggccgtcgctgctgagatacgccgcgcaggcgctccgccgccgcgactactcctccgccgccgcggccgctgagcggaaggtggccatcctcggggcggcgggcgggatcggccagccgctcgcgctcctcatgaagctcaacccgctcgtctcgtccctctccctctacgatatcgccggaacccccggcgtcgccgccgatgtctcccacatcaactcgccggcgctggtgaaaggcttcgtcggggaggagcagctcggggaggcgttggagggttcggacgtcgtaatcatcccggccggtgtgccgaggaagcccggcatgaccagggacgacctcttcaacatcaacgccggcattgttaagggcctctgcactgccatctccaagtactgccccaacgctcttgtcaatatgatcagcaaccctgtcaactcgactgtccccatcgcagcggaggtgttcaagaaggctggtacttacgatgagaagaaactgtttggtgtgaccacgcttgatgttgtgcgcgctaaaactttctatgctggaaaggctaatgtgccagttactgaagtgaatgtccctgtggttggtggccatgctggtattactatcctgccactgttctcgcaggcaacccctgcaagtaatgcattgtcgcatgaggacattaaggctctgaccaagaggacacaagatggtgggacggaagttgttgaagcaaaggctggaaagggttctgcaacattgtctatggcatatgctggtgcggtatttgcagatgcgtgcttgaaggggcttaatggagttcctgatgttgtagagtgctcttttgtgcaatcaacagtaacagagctgccattcttcgcctcaaaggtaaggcttggcaagaacggagtggaggaagtacttgggctgggccagctttccgagtttgagaaggagggtctggagaacctgaagggtgagctcaagtcttcgattgagaagggcatcaagtttgctcacgcgaactag

SEQ ID NO: 45083 - protein, 340 aa, Oryza sativa (japonica cultivar-group)
MRPSLLRYAAQALRRRDYSSAAAAAERKVAILGAAGGIGQPLALLMKLNPLVSSLSLYDIAGTPGVAADVSHINSPALVKGFVGEEQLGEALEGSDVVIIPAGVPRKPGMTRDDLFNINAGIVKGLCTAISKYCPNALVNMISNPVNSTVPIAAEVFKKAGTYDEKKLFGVTTLDVVRAKTFYAGKANVPVTEVNVPVVGGHAGITILPLFSQATPASNALSHEDIKALTKRTQDGGTEVVEAKAGKGSATLSMAYAGAVFADACLKGLNGVPDVVECSFVQSTVTELPFFASKVRLGKNGVEEVLGLGQLSEFEKEGLENLKGELKSSIEKGIKFAHAN

SEQ ID NO: 45084 - DNA, 1194 bp, Oryza sativa (japonica cultivar-group)
  CDS (1)..(1194)
atggcatcagctgttaccatcagttcggttggcgctcaggctggcatgatctcaaagccaaggaatcatggcttcacaagctacagtggcctgaaggcagcatcatccgttagctttgaatcagggtcgtcattcctgggtaggaatgcatctctccgggcatctgttgctccaaggattgtaccaaaggcgaagtctggttctcaaatttctcctgaggcttcgtacaaagtggcagtgctcggtgctgctggtggtattggccaaccattgggccttttgattaagatgtctcctctggtctcagagctgcatctgtatgatattgcaaatgttaagggagttgctgctgatctcagccactgcaacacaccttctcaagttctggacttcactgggccctcggaactagccaactgcttgaaaggtgtggacgttgttgtcatccctgctggggtcccaaggaagccaggcatgactcgcgatgacctttttaacatcaatgcgagcattgtcaagtcgcttgttgaggctgttgcagacaattgtccagaggccttcatccatattatcagcaacccagtaaactccacggtgccaattgctgccgaggttctgaaacaaaagggtgtgtacaatcccaagaagctctttggagttaccaccctagatgttgttagagctaacacatttgtagctcagaagaagaacctcaagctcatcgatgttgatgttccagttgtcggtggtcatgctgggatcacaattctaccactgctgtcaaagaccatgccatctgtcaccttcacagatgaagaaactgaacagctgacaaagaggatacagaatgctggaacagaggtggtggaggcgaaagctggtgctggctccgctaccctctccatggcctacgctgctgccagattcgtcgagtcatctctgcgtgcacttgctggcgaccctgatgtttatgagtgcacattcgttcagtctgagttaaccgagctgccgttctttgcatccagagttaagcttggaaagaacggtgtcgagtccatcatttctgctgaccttgagggagtgaccgagtacgaggccaaggcacttgaggcattgaagtctgagttgaaggccagtatcgagaagggcatcgagttcgtccacaaacagcagacagcagcggcatctgtttga

SEQ ID NO: 45085 - protein, 397 aa, Oryza sativa (japonica cultivar-group)
MASAVTISSVGAQAGMISKPRNHGFTSYSGLKAASSVSFESGSSFLGRNASLRASVAPRIVPKAKSGSQISPEASYKVAVLGAAGGIGQPLGLLIKMSPLVSELHLYDIANVKGVAADLSHCNTPSQVLDFTGPSELANCLKGVDVVVIPAGVPRKPGMTRDDLFNINASIVKSLVEAVADNCPEAFIHIISNPVNSTVPIAAEVLKQKGVYNPKKLFGVTTLDVVRANTFVAQKKNLKLIDVDVPVVGGHAGITILPLLSKTMPSVTFTDEETEQLTKRIQNAGTEVVEAKAGAGSATLSMAYAAARFVESSLRALAGDPDVYECTFVQSELTELPFFASRVKLGKNGVESIISADLEGVTEYEAKALEALKSELKASIEKGIEFVHKQQTAAASV

SEQ ID NO: 45086 - DNA, 1017 bp, Yarrowia lipolytica CLIB99
  CDS (1)..(1017)
atgttccgaacccgagttaccggctccaccctgcgatccttctccacctccgctgcccgacagcacaaggttgtcgtccttggcgccaacggaggcattggccagcccctgtctctgctgctcaagctcaacaagaacgtgaccgacctcggtctgtacgatctgcgaggcgcccccggcgttgctgccgatgtctcccacatccccaccaactccaccgtggccggctactctcccgacaacaacggcattgccgaggccctcaagggcgccaagctggtgctgatccccgccggtgtcccccgaaagcccggcatgacccgagacgatctgttcaacaccaacgcctccattgtgcgagacctggccaaggccgtcggtgagcacgcccccgacgcctttgtcggagtcattgctaaccccgtcaactccaccgtccccattgtcgccgaggtgctcaagtccaagggcaagtacgaccccaagaagctcttcggtgtcaccaccctcgacgtcatccgagccgagcgattcgtctcccagctcgagcacaccaaccccaccaaggagtacttccccgttgttggcggccactccggtgtcaccattgtccccctcgtgtcccagtccgaccaccccgacattgccggtgaggctcgagacaagcttgtccaccgaatccagtttggcggtgacgaggttgtcaaggccaaggacggtgccggatccgccaccctttccatggcccaggctgccgcccgattcgccgactctctcctccgaggtgtcaacggcgagaaggacgttgttgagcccactttcgtcgactctcctctgttcaagggtgagggcatcgacttcttctccaccaaggtcactcttggccctaacggtgttgaggagatccaccccatcggaaaggtcaacgagtacgaggagaagctcatcgaggctgccaaggccgatctcaagaagaacattgagaagggtgtcaactttgtcaagcagaacccttaa

SEQ ID NO: 45087 - protein, 338 aa, Yarrowia lipolytica CLIB99
MFRTRVTGSTLRSFSTSAARQHKVVVLGANGGIGQPLSLLLKLNKNVTDLGLYDLRGAPGVAADVSHIPTNSTVAGYSPDNNGIAEALKGAKLVLIPAGVPRKPGMTRDDLFNTNASIVRDLAKAVGEHAPDAFVGVIANPVNSTVPIVAEVLKSKGKYDPKKLFGVTTLDVIRAERFVSQLEHTNPTKEYFPVVGGHSGVTIVPLVSQSDHPDIAGEARDKLVHRIQFGGDEVVKAKDGAGSATLSMAQAAARFADSLLRGVNGEKDVVEPTFVDSPLFKGEGIDFFSTKVTLGPNGVEEIHPIGKVNEYEEKLIEAAKADLKKNIEKGVNFVKQNP

SEQ ID NO: 45088 - DNA, 936 bp, Erwinia carotovora subsp. atroseptica SCRI1043
  CDS (1)..(936)
atgaaagttgcagttctcggagcagcaggtggtatcggtcaggcactcgcactcctcctcaaaacccagcttccttcaggttcagaactatccctctacgatatcgctccggtaacgccgggtgttgccgtcgatctgagccatattcctacagcagtgaagatcaaaggctatagcggtgaagatgctaaaccggcgcttgctggtgcggatatcgtgctgatttctgccggtgtggcacgtaaacctggcatggatcgttccgatctgttcaacgtcaatgctggcattgtacgtaacctggttgagcaaatcgcgattacctgcccgaaagcctgtatcggtataatcaccaacccagtgaacacgaccgttgccatcgcagcagaagtgctgaaaaaagcaggcgtgtatgacaaaaacaaactgttcggtgtaactacgctggatatcatccgttccaacacgtttgttgctgaattgaaaggcaagcagccgcaggatattaacgtgccggttatcggcgggcactctggcgtgacaattctgcctctgctgtctcaggtttcaggcatcagcttcagcgagcaggaagtggccgatctgaccaaacgtatccagaatgcgggcaccgaggttgttgaagccaaagcaggtggcggatcggcaacgctgtctatgggtcaagccgctgcgcgttttggtctgtctctggtccgcgcgctgcaaggcgaaaacggtgtggtggaatgtgcatacgttgaaagtgacggcaaacatgcgcgcttctttgctcaaccaattctgttaggtaaagatggcgtcgctgagcgtaaagacatcggcacattaagtgcttttgagcaaaacgcgcttagcagcatgctggatacgctgaagcaggatattgagttaggcgagacgttcatcaagtaa

SEQ ID NO: 45089 - protein, 311 aa, Erwinia carotovora subsp. atroseptica SCRI1043
MKVAVLGAAGGIGQALALLLKTQLPSGSELSLYDIAPVTPGVAVDLSHIPTAVKIKGYSGEDAKPALAGADIVLISAGVARKPGMDRSDLFNVNAGIVRNLVEQIAITCPKACIGIITNPVNTTVAIAAEVLKKAGVYDKNKLFGVTTLDIIRSNTFVAELKGKQPQDINVPVIGGHSGVTILPLLSQVSGISFSEQEVADLTKRIQNAGTEVVEAKAGGGSATLSMGQAAARFGLSLVRALQGENGVVECAYVESDGKHARFFAQPILLGKDGVAERKDIGTLSAFEQNALSSMLDTLKQDIELGETFIK

SEQ ID NO: 45090 - DNA, 948 bp, Symbiobacterium thermophilum IAM 14863
  CDS (1)..(948): transl_table=11
atgaagcgcaagaagatcgcgattgtgggctccgggttcaccggccagggaaccgccctgtttgcggccgcccgcgacctgggcgacatcgtgctcgtcgacctgcccgcccgggagaactacgccaagggcgtggccctggacatgatggaggccatgcccgtctacggcagtgacacccgcctggtcggcacctcggactacgccgagatcgccggcgctgacgtggtcgtgatcaccgccggcgtcccccgcaagcccggcatgagccgggaggacctggtcaacaccaacgccggcatcgtcaaggatgtcgcggagaaggtggcccggtacgcccccgactcggtgatcatcgtcctgaccaaccccgtcgactccatgacctacgtggccctgaaggcctcgggcttccccaagaaccgggtgatcggccagtccggcgtgctggacaccgcccgcttccgcaccttcctggccaatgcgatcggctgctcgttccaggacgtcgtcggctgcgtgctcggcggccacggcgatgacatggtgccgctggttcggtacacctctgccggcggcatccccgtggagaagctgctgcccaaggagaccatcgacgccatcgtcgaacggacccgcaagggcggcggcgagatcgtcaacctcatgggcacctcggccggctacgccccgggcatggccctggtggagatgatcgacgccattctgaacgaccgcaagcgcatcctgccctcgatcgcctacctggagggcgagtacgggtacaccgacatgtgcctgggcgtgatgaccgtcctgggcgggggcggcctcgagaaggtcatcgagctcgacctcaccgacgaggagaaggtggcgctggacaagggcgcccagggcgtcaggaacctgatcgagatgctgaaggccggcatcctggcgcagtag

SEQ ID NO: 45091 - protein, 315 aa, Symbiobacterium thermophilum IAM 14863
MKRKKIAIVGSGFTGQGTALFAAARDLGDIVLVDLPARENYAKGVALDMMEAMPVYGSDTRLVGTSDYAEIAGADVVVITAGVPRKPGMSREDLVNTNAGIVKDVAEKVARYAPDSVIIVLTNPVDSMTYVALKASGFPKNRVIGQSGVLDTARFRTFLANAIGCSFQDVVGCVLGGHGDDMVPLVRYTSAGGIPVEKLLPKETIDAIVERTRKGGGEIVNLMGTSAGYAPGMALVEMIDAILNDRKRILPSIAYLEGEYGYTDMCLGVMTVLGGGGLEKVIELDLTDEEKVALDKGAQGVRNLIEMLKAGILAQ

SEQ ID NO: 45092 - DNA, 939 bp, Bacillus cereus ZK
  CDS (1)..(939): transl_table=11
atgacaatcaaacgcaagaaagtttcagtcatcggtgcaggatttacaggagcaacaacagcattcttattagcacaaaaagaacttgcagatgttgtattagtggacattccacagctggaaaatccaacaaaagggaaagcgttagatatgttagaagcgagcccagtacaaggttttgatgctaacattattggaacatctgattacgcagatactgctgattctgacgttgttgtgattacagcaggtattgcgcgtaagcctggtatgagccgtgatgatttagtagcaacaaactccaaaattatgaaaagtattacgcgcgacattgcaaaacattcaccaaatgcgattattgttgtattaacaaatccagttgatgcaatgacatattctgtatttaaagaagcaggattcccgaaagagcgtgttatcggtcaatcgggcgtattagatacagctcgtttccgtacattcatcgcacaagaattaaatttttctgtgaaagacattacaggatttgttcttggtggacacggtgacgatatggtacctcttgtacgttattcatatgcaggtggcattccgttagaaacgttaattccgaaagagcgtttagaagcaatcgtagaacgtacccgtaaaggtggcggcgagattgtaggcttattaggaaacggtagtgcatattacgcaccagctgcttctttagttgaaatgacagaagcaatcttaaaagatcaacgccgtgtattaccggctattgcgtaccttgaaggtgaatacggttatagtgacctttacttaggggtaccagtaattctaggtggtaacggaattgaaaaaattattgaattagaacttcttgcagatgaaaaagaagcgttagatcgctctgtagaatctgtacgtaatgttatgaaggttcttgtttaa

SEQ ID NO: 45093 - protein, 312 aa, Bacillus cereus ZK
MTIKRKKVSVIGAGFTGATTAFLLAQKELADVVLVDIPQLENPTKGKALDMLEASPVQGFDANIIGTSDYADTADSDVVVITAGIARKPGMSRDDLVATNSKIMKSITRDIAKHSPNAIIVVLTNPVDAMTYSVFKEAGFPKERVIGQSGVLDTARFRTFIAQELNFSVKDITGFVLGGHGDDMVPLVRYSYAGGIPLETLIPKERLEAIVERTRKGGGEIVGLLGNGSAYYAPAASLVEMTEAILKDQRRVLPAIAYLEGEYGYSDLYLGVPVILGGNGIEKIIELELLADEKEALDRSVESVRNVMKVLV

SEQ ID NO: 45094 - DNA, 939 bp, Mannheimia succiniciproducens MBEL55E
  CDS (1)..(939): transl_table=11
atgaaagttgcagttctaggtgccgcaggcggcattggtcaagcgttggctttattattaaagttacaattaccggctggttcatctttatctctgtatgatgtcgcacccgtcaccccgggtgttgctaaagatcttagccatatcccaacagatgttgtggttgaaggttttgccggtacggatccttcagaagcattaaaaggggcggatattgtgttaatttctgcgggtgtggcacgtaaaccgggcatgacacgtgcggatttattcggtgttaatgcgggtattattcgtagtctgaccgaaaaagtggcggaacaatgcccgaaagcctgtgtgggtattatcaccaacccggttaatgcgatggttgccattgcggccgaagtattgaaaaaagcgggtgtttacgacaaacgtaaattattcggcattactaccttagatattcttcgagcggaaacctttatcgccgaattaaaaggcttagatcctactcgggttacaattcctgttatcggcggtcattcgggtgtaaccattcttccgttattgtctcaagttcaaaatgttgaatggagcagtgaagaggaaatcattgctttaacgcatcgtatccaaaatgcaggtacggaagtggttgaagcaaaagcgggcggcggttctgcaaccttatctatggcgcaggcggcggcacgttttgcattagcattagtgaaagcctcgcaaggtgcgaaagttgttgaatgcgcttatgtggaaggcgacggcaaatatgcccgtttctttgcacaaccggttcgtttaggtacagaaggtgttgaagaatacttaaccctgggtaaattaagtgcatttgaagaaaaagcgttaaatgctatgttagaaactttacaaggtgacattaagtcaggtgaagattttattaacggttaa

SEQ ID NO: 45095 - protein, 312 aa, Mannheimia succiniciproducens MBEL55E
MKVAVLGAAGGIGQALALLLKLQLPAGSSLSLYDVAPVTPGVAKDLSHIPTDVVVEGFAGTDPSEALKGADIVLISAGVARKPGMTRADLFGVNAGIIRSLTEKVAEQCPKACVGIITNPVNAMVAIAAEVLKKAGVYDKRKLFGITTLDILRAETFIAELKGLDPTRVTIPVIGGHSGVTILPLLSQVQNVEWSSEEEIIALTHRIQNAGTEVVEAKAGGGSATLSMAQAAARFALALVKASQGAKVVECAYVEGDGKYARFFAQPVRLGTEGVEEYLTLGKLSAFEEKALNAMLETLQGDIKSGEDFING

SEQ ID NO: 45096 - DNA, 942 bp, Bacteroides fragilis YCH46
  CDS (1)..(942): transl_table=11
atgtcaaaagtaaccgtagtaggcgcaggtaacgtaggtgctacatgtgcaaatgtactggccttcaatgaagtggcagacgaagtagtaatgctggacgtaaaagaaggcgtttcagaaggtaaagcaatggatatgatgcagactgctcagttgttgggtttcgacacaacaatcgttggttgcacaaatgattatgctcaaactgctaactctgacgtggttgtgatcacttctggtattcctcgtaaaccgggcatgactcgtgaagaactgatcggtgtaaatgctggtatcgtaaaatcagtagcagaaaatcttttgaaatactctccgaacgcaatcatcgtagttatctctaacccgatggatacaatgacttacttggcattgaaatcactcggattgccgaaaaaccgtgtaatcggtatgggcggtgctttggatagctcacgtttcaaatatttcttgtctcaggctttaggttgcaacgcaaacgaagtagaaggtatggtgatcggtggtcacggtgatactactatgattccgttggctcgtctggctacttacaaaggacagccggttagcacattgctgagcgaagaaaaactgaacgaagtagttgcttctactatggtaggtggtgctactctgactaagttgctgggtacttctgcatggtatgcaccgggtgcagcaggagcttatgtagtagaatctatcatccacaaccagaaaaagatggttccttgctcagtaatgcttgaaggcgaatatggcgaatctgatctttgcatcggtgttcctgtaattctgggtaaaaacggtatcgaaaaaatcgttgaactggaactgaatgctgatgaaaaagctaaatttgctgccagtgccgctgctgttcacaaaacaaatgctgctttgaaagaagttggcgctctctaa

SEQ ID NO: 45097 - protein, 313 aa, Bacteroides fragilis YCH46
MSKVTVVGAGNVGATCANVLAFNEVADEVVMLDVKEGVSEGKAMDMMQTAQLLGFDTTIVGCTNDYAQTANSDVVVITSGIPRKPGMTREELIGVNAGIVKSVAENLLKYSPNAIIVVISNPMDTMTYLALKSLGLPKNRVIGMGGALDSSRFKYFLSQALGCNANEVEGMVIGGHGDTTMIPLARLATYKGQPVSTLLSEEKLNEVVASTMVGGATLTKLLGTSAWYAPGAAGAYVVESIIHNQKKMVPCSVMLEGEYGESDLCIGVPVILGKNGIEKIVELELNADEKAKFAASAAAVHKTNAALKEVGAL

SEQ ID NO: 45098 - DNA, 963 bp, Rhodobacter sphaeroides 2.4.1
  CDS (1)..(963)
atggccagacccaagattgcgctgatcggtgcggggcagatcggcggcacgctcgcccatctcgccgcgatcaaggaactgggcgacgtcgtcctgttcgacatcgccgaaggcacccctcagggcaaggctctggacatcgcgcaatcgggcccctcggaaggcttcgacgccgtgatgaagggcgcgaacagctacgaagagatcgcgggcgccgacgtctgcatcgtgaccgcgggcgtgccgcgcaagcccggcatgagccgcgacgacctgatcggcatcaacctcaaggtgatgaaatcggtcggcgagggcatcaaggcccatgcgccgaacgccttcgtgatctgcatcaccaacccgctcgacgcgatggtctgggcgctgcagcaattctcgggcctgccggccgagaaggtggtgggcatggcgggcgtgctcgactcggcgcgcttccggcatttcctgtcggtcgagttcaacgtctcgatgcgcgacgtgacggcgttcgttctgggcggccatggcgacacgatggtgccgctcgtccgctactcgacggtggccggcatcccgctgcccgatctcgtgcagatgggctggaccacgcaggagaagctcgaccagatcgtgcagcgcacccgtgacggcggcgccgagatcgtgggcctgctgaagaccggctcggccttctacgcgcccgccacctcggccatcgagatggcggaagcctatctcaaggaccagaagcgtctgctgccctgcgcggcctatgtggacggcgccttcggcctgaacggcatgtatgtgggcgtgcccaccatcatcggcgcgggcgggatcgagaagatcgtcgacatcaagctcaacgacgacgagcaggcgatgttcgacaagtcggtcaatgcggtgaagggcctcgtcgaggcctgcaagggcatcgactcctcgctcgcctga

SEQ ID NO: 45099 - protein, 320 aa, Rhodobacter sphaeroides 2.4.1
MARPKIALIGAGQIGGTLAHLAAIKELGDVVLFDIAEGTPQGKALDIAQSGPSEGFDAVMKGANSYEEIAGADVCIVTAGVPRKPGMSRDDLIGINLKVMKSVGEGIKAHAPNAFVICITNPLDAMVWALQQFSGLPAEKVVGMAGVLDSARFRHFLSVEFNVSMRDVTAFVLGGHGDTMVPLVRYSTVAGIPLPDLVQMGWTTQEKLDQIVQRTRDGGAEIVGLLKTGSAFYAPATSAIEMAEAYLKDQKRLLPCAAYVDGAFGLNGMYVGVPTIIGAGGIEKIVDIKLNDDEQAMFDKSVNAVKGLVEACKGIDSSLA

SEQ ID NO: 45100 - DNA, 960 bp, Magnetospirillum magnetotacticum MS-1
  CDS (1)..(960)
atggcacgcaagaagatcgctctcgtagggtccggcaatatcggcggcacgctcgcccatctgatcggcctcaaggaactgggtgatgtcgtcatgttcgacatcgccgagggcatcccccagggcaagggtctcgacatcctcgagtccaccccggtcgagggcgtggactgccgctattccggtgccaacgactactccgccatcaagggcgccgatgtggtcatcgtcaccgctggcgtgcccaggaagcccggcatgagccgcgacgatctggtcggcatcaacctcaaggtcatggccgccgtcggcgagggcatcaagaagaactgccccggcgctttcgtgatctgcatcaccaatccgctggacgtgatggtctgggcgctgcagcactattccggcgtgcccgccaacatgatcgtcggcatggctggcgtgctggattcggcccgtttccgcaccttcctgtgtgaagagttcaacgtctcggtcgaggacgtcaccgccttcgtgctgggcggccacggcgacaccatggtcccgctggtccgttactccaccgtcgccggcatcccgctgcccgacctggtgaagatgggctggaccacgcaggagaagctggaccagatcgtgcagcgcacccgtgacggcggcgccgagatcgtcaacctgctgaagaccggctcggcctactacgccccggccgcttcgggcgtcgccatggccgaagccttcctcaaggacaagaagcgcgtcctgcccgtcgccaccctggtcaagggcggcacctacggccagcccgacgacgtgttcgtcggcgtgccggtggtcatcggcgaaggcggcgtggagcgcatcgtcgagatcgagctgaacgccgccgagcaggccgagttcaacaagtcggccgacgccgtccgcggcctggtcaaggtcgccaagggcctgatgggctaa

SEQ ID NO: 45101 - protein, 319 aa, Magnetospirillum magnetotacticum MS-1
MARKKIALVGSGNIGGTLAHLIGLKELGDVVMFDIAEGIPQGKGLDILESTPVEGVDCRYSGANDYSAIKGADVVIVTAGVPRKPGMSRDDLVGINLKVMAAVGEGIKKNCPGAFVICITNPLDVMVWALQHYSGVPANMIVGMAGVLDSARFRTFLCEEFNVSVEDVTAFVLGGHGDTMVPLVRYSTVAGIPLPDLVKMGWTTQEKLDQIVQRTRDGGAEIVNLLKTGSAYYAPAASGVAMAEAFLKDKKRVLPVATLVKGGTYGQPDDVFVGVPVVIGEGGVERIVEIELNAAEQAEFNKSADAVRGLVKVAKGLMG

SEQ ID NO: 45102 - DNA, 909 bp, Desulfitobacterium hafniense DCB-2
  CDS (1)..(909)
atgctggctatgaaagggttgggagatattgttttactggatacccaggcaaacgaaaatccgacgaaagggaaagctctggatatcatggaagccggtcctttgactcgttccagtgtccgcgtaacgggtacctcagattatcaggatacacttgattcggatgttgtggtgatcacggccggtatcgcccgtaagccgggaatgtcgcgcaacgaactatgcgatatcaatgctggaatcgtcacccatgtcgtccggcaggttgttcaacattcgcccaatagtactctgatcattttaagcaatcccgtggatattatgacctacgttgctttcaaagagtcggggtttaaacggaacaggattattggacaatcgggagttcttgattcagcgcgtttccgctattttgtagccagcgagcttaaggtatctgccgaagatgtaacaggatttgttctgggggttcatggggacgatatggtaccgctggtacgctattgttctgtccatggtatacccattcagcagctattgccggaagctgaaattgaaaaaattatggaacggacacgtcaggccggttcggaaatcgtcaatttattaggcaatggcagtgcttattatgctcccgctgccgccttaacagaaatgatcgagtctatcctgctggataagcatcgggtcatgccttgtatagttcacttggaaggtgaactgggctatcaagacctggtgctgaatgttcccgctgtgattgggcggcagggagtggaaaagatattgcccatcgatttactgccggaagaggaggacttgatcgaacgctctgttgcatccataagacgtggtattgatgcagttttagaggggaagacaaataagcgatgcagtttaatcagttag

SEQ ID NO: 45103 - protein, 302 aa, Desulfitobacterium hafniense DCB-2
MLAMKGLGDIVLLDTQANENPTKGKALDIMEAGPLTRSSVRVTGTSDYQDTLDSDVVVITAGIARKPGMSRNELCDINAGIVTHVVRQVVQHSPNSTLIILSNPVDIMTYVAFKESGFKRNRIIGQSGVLDSARFRYFVASELKVSAEDVTGFVLGVHGDDMVPLVRYCSVHGIPIQQLLPEAEIEKIMERTRQAGSEIVNLLGNGSAYYAPAAALTEMIESILLDKHRVMPCIVHLEGELGYQDLVLNVPAVIGRQGVEKILPIDLLPEEEDLIERSVASIRRGIDAVLEGKTNKRCSLIS

SEQ ID NO: 45104 - DNA, 936 bp, Haemophilus somnus 129PT
  CDS (1)..(936)
atgaaaatagctgttttaggtgcggctgggggtattggtcaagcattggctctgttattaaaactacaattacctgcgggttcagaattatcattatatgatattgcacctgttacaccgggtgttgcggctgatgtaagccatattccaacagcggtgaagatacaaggttttgcaggggaagatccaactcccgctttagaaaacgctgatgttgtactaatttctgccggtgttgctcgtaaaccgggaatggatcgttcagatttatttaatattaatgcaggtattgtgaaaaatttaattgaaaaagtcgctaaaacttgtcctaaagcctgtgtgggtattattaccaatccggttaatacaacagtagcaattgctgctgaagtgctgaaaaaagcaggcgtttatgataaacgtaaattatttggggtaacaacattagatgtattacgttctgaaacttttgttgctgaattgaaaggactcaatgtttcacgcattgcggtaccggtaattggcggacattccggtgtgacgattcttccattgttatcccaagtgcaatatgccgaatgggaagaggacgaaatagcaccattaacaaaacgtattcaaaatgccggtactgaggttgttgaagcgaaagcgggtggcggttctgctacactttcaatggctcaagcagcagcacgttttgctctctcactggtacaggggctaagtggtgaaactgttgtggaatgtacgtatgttgaaggtgatggtaaatatgctcgtttctttgcacaacctgttcgcttaggaaaagaaggggtagaggaaattttaccggtgggtaccttaagtgcatttgaacaaaaagccttagaagatatgttgccaactttacgagctgatattgaattaggcgaaaaatttgtcaataactaa

SEQ ID NO: 45105 - protein, 311 aa, Haemophilus somnus 129PT
MKIAVLGAAGGIGQALALLLKLQLPAGSELSLYDIAPVTPGVAADVSHIPTAVKIQGFAGEDPTPALENADVVLISAGVARKPGMDRSDLFNINAGIVKNLIEKVAKTCPKACVGIITNPVNTTVAIAAEVLKKAGVYDKRKLFGVTTLDVLRSETFVAELKGLNVSRIAVPVIGGHSGVTILPLLSQVQYAEWEEDEIAPLTKRIQNAGTEVVEAKAGGGSATLSMAQAAARFALSLVQGLSGETVVECTYVEGDGKYARFFAQPVRLGKEGVEEILPVGTLSAFEQKALEDMLPTLRADIELGEKFVNN

SEQ ID NO: 45106 - DNA, 954 bp, Actinobacillus pleuropneumoniae serovar 1 str. 4074
  CDS (1)..(954)
atgaaagttgcacttttaggcgcagcgggcgggattggtcaaaccttagccctattattaaaacttcgtttacctgtcggcaccgacttagcgttatatgatatttcccccgtaacgccggggattgcggtcgatatcagccacataccgacttcggttagtgcggtaggttactccggtgaagatccgagtgaggcgttaaaaggcgcaaatcttgtgattattaccgccggcgtagcgcgtaaaccgggtatgacgcgtgcggatttattcaatatcaatgcggatatcgttaaaaatctagtcgaaaaagtagcggaagtttgcccgaaagcttgtatcggtatcgtaaccaatccggtcaatacccttgtgccgattgcggcggaagtactacgtaaagccggtgtttatgataaacgtaaattattcggtgtaacgacgcttgacgtggttcgcgccaaaacatttacttccgaattaaaagagaaacatgtcgaaacggttaaagttccggtaatcggcggtcactcaggtccgactatccttcctcttctttctcaagcattgtccgaaggtcttccgctttcatttactcaagaagaaatcgaggctttaacttatcgtatccaaaatgccggtactgaagtagtagaagctaaagccggcggcgggtcggcaacgctttctatggcggaatccggcgcacgttttgccgttgcggtatttaaagcgttattaggtgaagattgcgtacgttacgcctatgtagaaagtaaagagggttctggttatcccgaattctttgctcatccggtacgtttcggattaaccggtgtggaagaactgttacctatcggcaaattaagcgaatatgaacaagcaaaactgggcgagttaaaacctgtgcttgaagcggatattgctctcggtaaaaattttgtaaatccataa

SEQ ID NO: 45107 - protein, 317 aa, Actinobacillus pleuropneumoniae serovar 1 str. 4074
MKVALLGAAGGIGQTLALLLKLRLPVGTDLALYDISPVTPGIAVDISHIPTSVSAVGYSGEDPSEALKGANLVIITAGVARKPGMTRADLFNINADIVKNLVEKVAEVCPKACIGIVTNPVNTLVPIAAEVLRKAGVYDKRKLFGVTTLDVVRAKTFTSELKEKHVETVKVPVIGGHSGPTILPLLSQALSEGLPLSFTQEEIEALTYRIQNAGTEVVEAKAGGGSATLSMAESGARFAVAVFKALLGEDCVRYAYVESKEGSGYPEFFAHPVRFGLTGVEELLPIGKLSEYEQAKLGELKPVLEADIALGKNFVNP

SEQ ID NO: 45108 - DNA, 975 bp, Anabaena variabilis ATCC 29413
  CDS (1)..(975)
atgtcttcttctccagactcccccccaattttgcatcgtctacctcgtgtcgccattattggtgctggtagggttggtagcactttagctcaacgtattgctgaaaaaaatctagcagatgtggtgctattagatattgttgagggtatgcctcaaggattggcactagatttattagaagctaggggtattgaactgcataatcgtcagattatcggcacaaataattatgctgatacctctggttcacaaattgtcgttataacagccggatttccccgcaagccagggatgagtcgggatgacttgttgagaactaacgccaaaattgttgtggaagcagcaaagcaagcgatcgcctactctccctgtgctatttttatcgtagtcactaatcctctggatgtaatgacctatttagcttgggaagctacaggtttaccccgtaaccgcatcatgggtatggctggggtgttagactcggcaagatttgaaacttttatagccttggaattaggagtattacctgcggatgtcaaagcgatggtattgggtagtcatggggatttgatggttcccctgtctcgtcatgccacagttaatggtatcccgattacagaattgttagatgcagccacaatagaaaggttggtggagagaacccgtaatggtggtgcggaaattgtggaacttatgcagactggtggcgcattttttgcacctgcatcagctacaagtttgatggtggaatcgattttattgaatcagtcgcgcctgttacctgtgtctgtatatctgcaaggcgaatatggtttaaaagatgtagtgattggtgttccttgtcgcctgggattaaatggaattgagagtgtaatcgaattaaatctcagtgatagtgaaagagaagctttacaaacttcggctcaatcggtgcagaaaaatattgagcgatggcattctacccagcatagctga

SEQ ID NO: 45109 - protein, 324 aa, Anabaena variabilis ATCC 29413
MSSSPDSPPILHRLPRVAIIGAGRVGSTLAQRIAEKNLADVVLLDIVEGMPQGLALDLLEARGIELHNRQIIGTNNYADTSGSQIVVITAGFPRKPGMSRDDLLRTNAKIVVEAAKQAIAYSPCAIFIVVTNPLDVMTYLAWEATGLPRNRIMGMAGVLDSARFETFIALELGVLPADVKAMVLGSHGDLMVPLSRHATVNGIPITELLDAATIERLVERTRNGGAEIVELMQTGGAFFAPASATSLMVESILLNQSRLLPVSVYLQGEYGLKDVVIGVPCRLGLNGIESVIELNLSDSEREALQTSAQSVQKNIERWHSTQHS

SEQ ID NO: 45110 - DNA, 972 bp, Crocosphaera watsonii WH 8501
  CDS (1)..(972)
atgactgtcccttatgacccccttcttctttgtcaatctctccgtgtagctatcatcggcgcaggtaatgtggggcgaactttagcccaacggatcgttgaaaaagacttagctgatgttgtcctcttggatgtaatagagggactcccccaaggagtggccctagatttaatggaggctcaggggctagaatatcataactgtgagatagtggggacaaacaactatgaagatacagctaacgctgatttagtcgtcattaccgcaggccgagccagaacccctggtatcagtagagatgaccttttggcgattaatgctaaaattgtggctgacgtggctgaaaaagcctttaaatactctcctaatgccattttcatagtcattgccaaccccctcgatgtgatgacctatttaacccgcaaagtgatcggtttaccgccacaaagggtgatggggatggctggtgtcttggactcttctcgtctgcaaacttttatcgctatggagttgggcatttctactgccaatgtgacggccatggtattgggtggccacggggatttaatggtgcctttagcccgttattgcaccgtcaacggcattcctattactgaattattagactcccaaactatcgatcgcttaatggagagaacccgtaaaggaggggcagaggtggttaaattattgaaaacaggaggggcttattatgcaccagcttctgcggcttatgtcatggtggaaagcatagtcagggatcaatctcgtttattgccaacggcggcttatttacaaggtgaatatggattaaatgatatttatatcggggttccctgctttttgggttgtcgtggagttaagaaaatattagaagtacaattaacatctgaggaaaaagaagccctacacatttctgctaactctgtcagggaaaatgtcaagcttgctttagaaagtgttggcatttaa

SEQ ID NO: 45111 - protein, 323 aa, Crocosphaera watsonii WH 8501
MTVPYDPLLLCQSLRVAIIGAGNVGRTLAQRIVEKDLADVVLLDVIEGLPQGVALDLMEAQGLEYHNCEIVGTNNYEDTANADLVVITAGRARTPGISRDDLLAINAKIVADVAEKAFKYSPNAIFIVIANPLDVMTYLTRKVIGLPPQRVMGMAGVLDSSRLQTFIAMELGISTANVTAMVLGGHGDLMVPLARYCTVNGIPITELLDSQTIDRLMERTRKGGAEVVKLLKTGGAYYAPASAAYVMVESIVRDQSRLLPTAAYLQGEYGLNDIYIGVPCFLGCRGVKKILEVQLTSEEKEALHISANSVRENVKLALESVGI

SEQ ID NO: 45112 - DNA, 966 bp, Mesorhizobium sp. BNC1
  CDS (1)..(966)
atggctcgccacaaaatcgctctcatcggctcaggcatgatcggcggcactcttgcccatctcgtcggccttaaggaacttggtgacgtagttctcttcgacatcgccgaaggcattccgcagggcaaagggctcgacatcgcggaatccgcgccggtcgaaggctttgacgccaagtttcttggcaccaacgactacgccgcgatcgagggggcggatgtctgcatcgtcaccgctggcgtgccgcgcaagcctggcatgagccgtgacgacctcctggggatcaacctcaaggtgatggagcaggtcggggccgggatcaagaaatacgcgccgaacgcattcgtgatctgcatcaccaatccgctcgacgccatggtctgggcgctgcagaagttctccggcctgccgaaaagccatgtggtgggtatggcgggtgtgctcgactccgcccgcttccgttatttcctggcggaggagttcaaggtctcggtcgaggacgtgaccggtttcgtcttgggcggacacggcgattccatggtgccgctcatccgctattccaccgtcgccggtatcccaattccggatctcgtgaagatgggctggacgacgcaggagaaaatcgaccagatcgtgcagcgcacgcgcgacggcggcgcggaaattgtcggccttttgaagagcggctcggcgttctacgctccagcctcctcggcgatcgcaatggcggaagcctatctgaaagacaagaagcgcgttctgccctgcgctgcccatgtgtctggtcaatatggcgtgaaggacctctatgtgggcgtaccgacggtgatcggcgccggcggcgtggagcgcatcatcgaaatcgacctgaacaagaccgagcagaagatgttcgaaaactcggtggcctctgtcgaggggctgtgcaaagcgtgtggcgatatcgccccgagcttgaagaactag

SEQ ID NO: 45113 - protein, 321 aa, Mesorhizobium sp. BNC1
MARHKIALIGSGMIGGTLAHLVGLKELGDVVLFDIAEGIPQGKGLDIAESAPVEGFDAKFLGTNDYAAIEGADVCIVTAGVPRKPGMSRDDLLGINLKVMEQVGAGIKKYAPNAFVICITNPLDAMVWALQKFSGLPKSHVVGMAGVLDSARFRYFLAEEFKVSVEDVTGFVLGGHGDSMVPLIRYSTVAGIPIPDLVKMGWTTQEKIDQIVQRTRDGGAEIVGLLKSGSAFYAPASSAIAMAEAYLKDKKRVLPCAAHVSGQYGVKDLYVGVPTVIGAGGVERIIEIDLNKTEQKMFENSVASVEGLCKACGDIAPSLKN

SEQ ID NO: 45114 - DNA, 942 bp, Ehrlichia canis str. Jake
  CDS (1)..(942)
atgattaagcgtaaaaaaattgctcttattggtgctggtaatattggtggtatgatagcctatttgattaggctgaaaaatttaggagatgtagttttattagacgttaatgatggcatagctaagggaaaagcacttgatatggctgaatcttctccagtaggaaaatataatggtgaaatattagggactaataattatgctgatattgaaggtgctgatgccattgtcgttacagctggcattactagaaaacctggaatgagtcgtgaagatttgattaatactaatgtaaatatcataaaagaagtagcagacaatataggtaaatatgcacctaatgcatttgtggttgtagttactaatccacttgatgtaatggtttttgctatgcataagtattcgaaattatcaagtaacatggttgttggtatggctggtatacttgattcggcgagattttcttattttattgcaaaggaattgaacgtatcggttgataatgttaattctttggtattaggtggccatggagacctaatgcttcctttagtaaaatattcttcagttgctggaatatctatagctgatttgataaaaattgatttgattactcaagataaagttgatgcaattatagaaagaactagaaaaggtggagaagaaatagtaagtttactaaaaataggttcagcttattatgctcctgctgagtctgcattattaatgatagattcttatttaaatgatagaaggctaatattaccttgttctgtttatttaaaaggtgaatatggcgtaagcaatttatttgtgggtgttcctgttattattggaagaaatggagtggaaaaaataatcgagttggaattaaccgaacaagaaaaaaacatatttgataattctgtaaaattaatcaaaaatttagtaagtaatgtttaa

SEQ ID NO: 45115 - protein, 313 aa, Ehrlichia canis str. Jake
MIKRKKIALIGAGNIGGMIAYLIRLKNLGDVVLLDVNDGIAKGKALDMAESSPVGKYNGEILGTNNYADIEGADAIVVTAGITRKPGMSREDLINTNVNIIKEVADNIGKYAPNAFVVVVTNPLDVMVFAMHKYSKLSSNMVVGMAGILDSARFSYFIAKELNVSVDNVNSLVLGGHGDLMLPLVKYSSVAGISIADLIKIDLITQDKVDAIIERTRKGGEEIVSLLKIGSAYYAPAESALLMIDSYLNDRRLILPCSVYLKGEYGVSNLFVGVPVIIGRNGVEKIIELELTEQEKNIFDNSVKLIKNLVSNV

SEQ ID NO: 45116 - DNA, 957 bp, Rhodospirillum rubrum
  CDS (1)..(957)
atggcacgcaagaagatcgcccttgtcggcgccggcaatatcggtggcacgcttgcccatctcatcggtctcaaggaattgggcgatgtggtgctcttcgacatcgccgaggggactcctcagggcaaggctctggatatcgccgaatccaccccgatcgaaggggtcgacgccagctactcggggtccaacgattacgccgcgatcaaggacgccgatgtggtgatcgtcaccgccggcgtgccgcgcaagccgggcatgagccgcgacgacctgatcggcatcaacgccaaggtgatgtcggccgtcggccagggcatccgcgccaattgccccaacgccttcgtcatctgcatcaccaacccgctcgacgccatggtctgggtgttgcgcgaggtttcggggctgccccacaacaaggtggtcggcatggccggcgtgctcgacagcgcccgcttccgctatttcctgtccgaggaattcaatgtctcggtcaaggacgtcaacgccttcgtgctcggcggccacggcgacaccatggttccgctgccgcgctattcgaccgtcgccggtattccgctgcccgatctggtgaagatgggctggaccacccaggagaagctcgaccagatcatccagcgcacccgcgacggtggcgccgagatcgtcggcctgctcaagaccggatcggccttctatgccccggccgccgccgccgtgcagatggccgaagcctatctcaaggaccagaagcgcgttctgccctgcgccgcctgggttgagggccagtatggtctggacggcatctatgtcggcgtccccaccatcatcggcgccggcggcatcgagaaggtgatcgagatcgaactgaacgccgacgaaaaggcggcgttcgccaaatccgtcgacagcgtgcgcgggctgatcgccgcgtcgaaggaactgatgccgaaataa

SEQ ID NO: 45117 - protein, 318 aa, Rhodospirillum rubrum
MARKKIALVGAGNIGGTLAHLIGLKELGDVVLFDIAEGTPQGKALDIAESTPIEGVDASYSGSNDYAAIKDADVVIVTAGVPRKPGMSRDDLIGINAKVMSAVGQGIRANCPNAFVICITNPLDAMVWVLREVSGLPHNKVVGMAGVLDSARFRYFLSEEFNVSVKDVNAFVLGGHGDTMVPLPRYSTVAGIPLPDLVKMGWTTQEKLDQIIQRTRDGGAEIVGLLKTGSAFYAPAAAAVQMAEAYLKDQKRVLPCAAWVEGQYGLDGIYVGVPTIIGAGGIEKVIEIELNADEKAAFAKSVDSVRGLIAASKELMPK

SEQ ID NO: 45118 - DNA, 924 bp, Methanosarcina barkeri str. fusaro
  CDS (1)..(924)
atggctaaaatttccgtgattggtgcaggaaacgtaggggcaactacagtccagcgactagctgaacttgaacttggcgaaattgtcatgacggatattgtggaaggactaccacaaggaaaagcactcgaccttatacaggcaggggcaataaaaggttatgatacgtcaataattgggaccaacgattatgcagaaatcgtagactctgatcttgtaataattacagcagggattgcaagaaaacctgggatgactcgggaagatctgattaaaacgaattctaaaataatagcagaggtttccagaaatattgcaaagtatgctccagactccatagtaattaatgtcacaaatccgcttgacattataacgtacatagctatgaaatcaacaggatttgagacaaagaaagtattcggaatgagcggagttctggattcgggacgttttgcaagctttattgcagaagaactgaagtgttcaaaaaaagatgttcaggcaatggttataggtggtcatggagatctgatggtgcctcttcctcaatatacaacagtgtcaggagttccactcacggacctgcttccgggggatagaattgccaggctggtagagaggacagtaaacggaggagcagagatcgtagagctccttaaacagggcagtgctttttatgcaccgtccgcggctattgtctcaatggcggaagccgttattaaaaattcaaagagaattttgcctgcttcggcttatcttgaaggacattacggacaggaaggtatttacttcggtgtacccgtaaagcttggggcatcaggagtagaagaaatccttgaactcaagctcgatgaaagccagtacgagactctcagaaaatcctcggaaactattcgaaacacgatttcacagctagaaatataa

SEQ ID NO: 45119 - protein, 307 aa, Methanosarcina barkeri str. fusaro
MAKISVIGAGNVGATTVQRLAELELGEIVMTDIVEGLPQGKALDLIQAGAIKGYDTSIIGTNDYAEIVDSDLVIITAGIARKPGMTREDLIKTNSKIIAEVSRNIAKYAPDSIVINVTNPLDIITYIAMKSTGFETKKVFGMSGVLDSGRFASFIAEELKCSKKDVQAMVIGGHGDLMVPLPQYTTVSGVPLTDLLPGDRIARLVERTVNGGAEIVELLKQGSAFYAPSAAIVSMAEAVIKNSKRILPASAYLEGHYGQEGIYFGVPVKLGASGVEEILELKLDESQYETLRKSSETIRNTISQLEI

SEQ ID NO: 45120 - DNA, 963 bp, Novosphingobium aromaticivorans DSM 12444
  CDS (1)..(963)
atggcacgcaagaagatcgcgctgatcggcgcgggcaacatcggtggcactcttgcccacctcgccgcccagaaggaacttggcgacatcgtcctgttcgacgtcgttgaaggcgtgccccagggcaaggcgctcgacctttcgcagtgcggtccggtcgaaggcttcgacgccaacatcatcggcaccaacgactacaagggcatcgcaggcgcggacgtgatcatcgtcaccgccggcgtcgcccgcaagcccggcatgagccgcgacgacctgctcggcatcaacctcaaggtgatgaaggccgtcggcgaaggcatccgcgacaacgcgcccgacgcgttcgtgatctgcatcaccaacccgctcgacgcgatggtctgggcgctgcgcgagttctcgggcctgcccgcgaacaaggtcgtcggcatggccggcgtgctcgactcggcgcgcttcagcacgttcctggcatgggaattcggcgtctcgatccgcgacgtgaacacgttcgttctcggcggccacggcgacaccatggttccggtcacccagtactcgaccgtcaacggcatcccggtgcccgacctcgtcaagatgggcctgtccacccaggaaaagatcgacgcgatcgtgcagcgcacccgttcgggcggcggcgagatcgtcgggctgctcaagaccggttcggcgttctacgcgcctgccgcatcgggcatcgcgatggccgaagcctatctcaacgaccagaagcgcatcctgccctgcgccgcctacgttgacggcgaatacggcgtgaacggtctttacgtcggcgtgccggtgctgatcggcgcgaacggcgtcgagaaggtgatcgagatcgaactcgacgacgaagccaagggcaacctccaggtctccgtcgacgcggtcaaggaactgctggaagcctgcaagggcatcgaccccagcctcgcctga

SEQ ID NO: 45121 - protein, 320 aa, Novosphingobium aromaticivorans DSM 12444
MARKKIALIGAGNIGGTLAHLAAQKELGDIVLFDVVEGVPQGKALDLSQCGPVEGFDANIIGTNDYKGIAGADVIIVTAGVARKPGMSRDDLLGINLKVMKAVGEGIRDNAPDAFVICITNPLDAMVWALREFSGLPANKVVGMAGVLDSARFSTFLAWEFGVSIRDVNTFVLGGHGDTMVPVTQYSTVNGIPVPDLVKMGLSTQEKIDAIVQRTRSGGGEIVGLLKTGSAFYAPAASGIAMAEAYLNDQKRILPCAAYVDGEYGVNGLYVGVPVLIGANGVEKVIEIELDDEAKGNLQVSVDAVKELLEACKGIDPSLA

SEQ ID NO: 45122 - DNA, 969 bp, Ferroplasma acidarmanus
  CDS (1)..(969)
atggacaagaagatttctattattggcgcaggagcagtaggtgcaagtgtagcacaggttctggctatcaagaatatcgcagatattagcatttttgatattgttgagggcgttgcagagggaaaagcactggatatacaggaaggagcaccacattttggctttgattgcaaattgcagggattttgcacccaggaccctaaggaatatgcaaatttaaaaggttcagatgtaatagtagttacagccgggcttgcaagaaggccaggaatgagcagggacgatcttctggtaaagaatataggaataatgaaggatgttggggaacagataaagaaatattcaccggattcaataatagttgctgtaacaaatccagcagatataatggcatacgcattgcagaaagcatccggaattagcccagagagaataataggattgggcgggtcgctggacagttccagattcaggactttcctggctgaagcacttaatgtatctgtaagggatgtaaatgctttcgtaataggtgggcatggtgacgatatggttccgtttatacattactccagtgtttcaggaatacccatatctgatcttcttagcgaagagaaaatacaggaaatcattaaaagaaccagatttggagggggagagatacttaacctttacaaaacaggaacagcattctatgcaccatcaatatccatttctgtaatggttgagtctgtagttaacgatcaacacagggtaattccatgtgcagcataccttacaggaaaacacgctgaaaattataaagtcagcaacgcctttatcggagtgccaataaaaattggaaagaatggcgttgaggaaatatatgatttaaaattcagtgaagccgatgcaaaggaatggatgaagagcgtagaatctgtaaagaaaaacaacaaacttgcagatgattacttcgcatcacactga

SEQ ID NO: 45123 - protein, 322 aa, Ferroplasma acidarmanus
MDKKISIIGAGAVGASVAQVLAIKNIADISIFDIVEGVAEGKALDIQEGAPHFGFDCKLQGFCTQDPKEYANLKGSDVIVVTAGLARRPGMSRDDLLVKNIGIMKDVGEQIKKYSPDSIIVAVTNPADIMAYALQKASGISPERIIGLGGSLDSSRFRTFLAEALNVSVRDVNAFVIGGHGDDMVPFIHYSSVSGIPISDLLSEEKIQEIIKRTRFGGGEILNLYKTGTAFYAPSISISVMVESVVNDQHRVIPCAAYLTGKHAENYKVSNAFIGVPIKIGKNGVEEIYDLKFSEADAKEWMKSVESVKKNNKLADDYFASH

SEQ ID NO: 45124 - DNA, 939 bp, Cytophaga hutchinsonii
  CDS (1)..(939)
atgaaagtaacagtagttggtgctggtaatgttggtgctacttgcgcagacgtattagcatacagagaaattgtaaatgaagtaattctacttgatattaaagaaggtgtagcagaaggcaaagctttggatatctggcagaaagctccaatcacacagtacgacactaaaacaacaggtgtaacaaatgattattctaaaacagctaattcagatgtagtcgtgatcacttcaggtttaccacgtaagccaggtatgacacgtgatgatttgatctctacaaacgctggtattgttagagctgtaactgaaagcgttgttaagtattctccgaatgcgatcattattgtggtatcaaacccgttagacgtaatgacgtattgcgcgcacatcacatcaaaattaccaagaaataaagttatcggcatggcgggtgttcttgacacagcccgttaccgtgcattccttgcagacgaaatcggctgttctccaaaagagattcagggtatgttattaggtggccatggtgatacaatggttccgcttccccgttacacaacggttggtggtattccggtaactgaattggtagaagcagataaattaaacgcaatcatcgaacgcactaaaaatggtggtggtgaattagtaaaattaatgggtacttctgcatggtatgcaccgggtgcagcggcagcccagatggttgaagcgatcgtaaaagatcagaaaaaaatcatcccggtttgtatcaagcttgaaggtgaatacggcatagacgactgttatttaggtgttcctgcagtaatcggtaaaaacggtattgaaaaagtaattgaattgaaattgaatgccgaagaaaaagcattgatggaaacttcaagaaaacacgttaaagaagtaatgaatgtactggatggtttaccgcaacaagcgtaa

SEQ ID NO: 45125 - protein, 312 aa, Cytophaga hutchinsonii
MKVTVVGAGNVGATCADVLAYREIVNEVILLDIKEGVAEGKALDIWQKAPITQYDTKTTGVTNDYSKTANSDVVVITSGLPRKPGMTRDDLISTNAGIVRAVTESVVKYSPNAIIIVVSNPLDVMTYCAHITSKLPRNKVIGMAGVLDTARYRAFLADEIGCSPKEIQGMLLGGHGDTMVPLPRYTTVGGIPVTELVEADKLNAIIERTKNGGGELVKLMGTSAWYAPGAAAAQMVEAIVKDQKKIIPVCIKLEGEYGIDDCYLGVPAVIGKNGIEKVIELKLNAEEKALMETSRKHVKEVMNVLDGLPQQA

SEQ ID NO: 45126 - DNA, 963 bp, Silicibacter sp. TM1040
  CDS (1)..(963)
atggcacgacccaaaatcgccctcatcggcgcaggtcagatcggtggcaccctcgcacatcttgtagccctcaaagaactcggcgacgtcgttttgttcgacatcgcagaaggcacccccgaaggcaaagcgctggacatcgcagaatccggtccttccgaaggctttgacgcaagcctcaaaggcacccaggattatgccgacatcgcgggcgcggacgtctgcatcgtgaccgcgggcgttccgcgcaagccgggcatgtcccgcgacgacctcctgggcatcaacctcaaggtgatgaaatccgtcggcgaaggcatccgcgacaacgcgccggacgcctttgtgatctgcatcaccaacccgctcgacgcgatggtttgggcgctgcgcgaattctccggcctgccgcacgaaaaagtctgcggcatggcgggtgttctggacagcgcgcgcttccgtcacttcctcgcggaggaattcaacgtctccatgaaagacgtcaccgcgtttgtgctcggtggccatggcgacaccatggtgccgtcggtgcgttactccaccgtagcaggcattccgctccccgacctgatcgagatgggctggaccacccaggacaagatggacgcgatcgttcagcgcacccgtgacggtggcgccgaaatcgtgggtctcctgaaaaccggctccgcctattacgcgcctgcgacctctgcaatcgagatggcagaagcctatctcaaggaccagaagcgcgtcctgccctgcgcggcctatgtggacggcgctctgggtctcaacggcatgtatgtcggcgttccgaccgtgatcggtgccggaggcatcgagcgtgtggtcgacatcaagctgaacgctgaagagcaggcgatgttcgacacctccgtcaacgcggtcaaaggcctcgtagacgcgtgcaaaggcatcgacagctcgctggcataa

SEQ ID NO: 45127 - protein, 320 aa, Silicibacter sp. TM1040
MARPKIALIGAGQIGGTLAHLVALKELGDVVLFDIAEGTPEGKALDIAESGPSEGFDASLKGTQDYADIAGADVCIVTAGVPRKPGMSRDDLLGINLKVMKSVGEGIRDNAPDAFVICITNPLDAMVWALREFSGLPHEKVCGMAGVLDSARFRHFLAEEFNVSMKDVTAFVLGGHGDTMVPSVRYSTVAGIPLPDLIEMGWTTQDKMDAIVQRTRDGGAEIVGLLKTGSAYYAPATSAIEMAEAYLKDQKRVLPCAAYVDGALGLNGMYVGVPTVIGAGGIERVVDIKLNAEEQAMFDTSVNAVKGLVDACKGIDSSLA

SEQ ID NO: 45128 - DNA, 945 bp, Rickettsia akari str. Hartford
  CDS (1)..(945)
atgaaaaaaaatccaaaaatctcattaataggtagcggtaacataggtggtacgcttgctcacctaattagccttagagaactcggtgatatcgtattatttgatgttgctgaaggagtaccgcaaggaaaagcattggatctcatgcaagccagtacaatagccgggtctgatatcaaaataacaggtacaaacgactataaagatattgaagggtctgatgcaataattattactgccggtttaccaaggaaaccagggatgagtagagacgatttaattagtattaataccggtattatgaaaaatgttgcagagaacgttaaaaaatacgctcctgatgcttttgtaatagtaattaccaatccgcttgatgttatggtatatgtcatgcttaaagcaagcggattacctcataatcaagtcataggtatggcaggcgtacttgactcatcaagatttaatctttttcttgccgaagagtttaaagtatcggtgagcaatgttaatagcacggttctcggcggtcatggtgatgctatggtacctcttgcaagatattctacaatatcaggcataccgatacctgacttgataaaaatgggcttatcaagtaatgaaaatattgaaaaaataatcgatcgtactaggaacggcggcggcgatattgttgcattacttaaaacaggttctgcttattatgcacccgcagcctcagcaatagaaatgcttgaagcatatttaaaagataaacgtcaaatgctaacttgtgccgcttatctacaaggtgaatatggggttcatgatttatatgtcggagtacctattattataggtaaagaaggtgtcataaaagtagtagaactacaattaactaaagaagaaaaaacattattcgacaaatcagttgagggagttaaaacactcattgagacgatacaataa

SEQ ID NO: 45129 - protein, 314 aa, Rickettsia akari str. Hartford
MKKNPKISLIGSGNIGGTLAHLISLRELGDIVLFDVAEGVPQGKALDLMQASTIAGSDIKITGTNDYKDIEGSDAIIITAGLPRKPGMSRDDLISINTGIMKNVAENVKKYAPDAFVIVITNPLDVMVYVMLKASGLPHNQVIGMAGVLDSSRFNLFLAEEFKVSVSNVNSTVLGGHGDAMVPLARYSTISGIPIPDLIKMGLSSNENIEKIIDRTRNGGGDIVALLKTGSAYYAPAASAIEMLEAYLKDKRQMLTCAAYLQGEYGVHDLYVGVPIIIGKEGVIKVVELQLTKEEKTLFDKSVEGVKTLIETIQ

SEQ ID NO: 45130 - DNA, 930 bp, Chloroflexus aurantiacus
  CDS (1)..(930)
atgcgcaagaagattagtattatcggggcaggatttgtcggttcgacgacagctcactggctggccgctaaagaattaggtgacattgttctgcttgattttgtcgagggtgtgcctcaaggcaaggctctcgatctctacgaggcatcaccaattgaagggtttgatgttcgggtgaccggcacgaacaactacgccgatactgccaactcggatgtcatcgttgttacgtcaggtgctccgcgcaagccgggcatgagccgtgaggatttgatcaaggtcaacgccgacatcacccgtgcctgtatcagtcaggctgccccgctctcgccgaatgccgtgattatcatggtcaataatcctctggatgcgatgacctatctggcggcggaggttagtggcttccccaaagagcgtgtcattggtcaggccggcgtcctcgatgcggcccgctatcgcaccttcattgccatggaggcgggtgtttcggttgaagatgttcaggcgatgctgatgggtggtcacggcgatgagatggtaccgctgccccggttttcaaccattagcggtattccggtgagcgagttcattgcgcctgatcgtctggctcagattgttgagcgcacccggaagggtggtggcgagattgtgaatctgctgaagaccggcagtgcgtattatgctcccgccgccgccacagcgcagatggtcgaagcggtgctcaaagacaagaagcgggtcatgccggtggcagcctacctgaccggtcagtacggcctgaatgatatttactttggtgtaccggtgatcctcggtgccggtggagtagagaaaattctcgaattgccgctcaacgaagaggagatggcactgctgaacgcatcggcgaaagcggtacgtgccaccctcgacacgctgaagtctctctaa

SEQ ID NO: 45131 - protein, 309 aa, Chloroflexus aurantiacus
MRKKISIIGAGFVGSTTAHWLAAKELGDIVLLDFVEGVPQGKALDLYEASPIEGFDVRVTGTNNYADTANSDVIVVTSGAPRKPGMSREDLIKVNADITRACISQAAPLSPNAVIIMVNNPLDAMTYLAAEVSGFPKERVIGQAGVLDAARYRTFIAMEAGVSVEDVQAMLMGGHGDEMVPLPRFSTISGIPVSEFIAPDRLAQIVERTRKGGGEIVNLLKTGSAYYAPAAATAQMVEAVLKDKKRVMPVAAYLTGQYGLNDIYFGVPVILGAGGVEKILELPLNEEEMALLNASAKAVRATLDTLKSL

SEQ ID NO: 45132 - DNA, 957 bp, Trypanosoma brucei
  CDS (1)..(957)
atgcgtaccagtgcaactctccagtttaaagttgccgtcctcggtgctgccggtggtattggtcaaccgttatcgcttatcctgaaaaccaatcctcttgtgtctcacttgagttgttatgacatacatggtgtgacgggcgtggctgcagacctctcgcacatttgttctccagctaaggtgactggtcacctgaaagatgaacttcacaaagcagttgacggagctgacgttgtcatcatccccgcaggcacaccgcgaaagccggggatgactcgcgaagatctcttcagtgttaatgcaacgatcgttcgagacctcgtatcggcttgtgcaaaacaatgccccaaggctcttatcggtgttgtttccaaccctgtcaacagtgttgtacctattgcttcggaggtgctcaaaaaggctggtgtctttgaccctgctcgcctctttggcataaccacgcttgatgtggtgagagctcgaacatttgtggctgaggccgctggtaagagtccgtatgacgttaatgttcaggtggtgggtggacacagtggtccgactattattccattattatctcaagctggtgtatcattgacggaggaacaagtcaaggctataacgcaccgagtacagtatggcggtgacgaagttgtgaaagctaaaggaggggcgggttcagcaactctttcaatggcgtacgccgctggggaatggatgtcctccgtgttgaaagggcttcgtggtgacaagggtatcgtggagtgtacgtatgttcagacggatattattcccggcgtgaactttttcggttgcccggtggaacttgggaaaggtggcgttgaaaagattcacaaacctgtgtttgacgcgtatgaacagagtcttttggagaaatgtgttgcggacttggagaaaaatatcgcagcaggttttgccttcggttccagacagtga

SEQ ID NO: 45133 - protein, 318 aa, Trypanosoma brucei
MRTSATLQFKVAVLGAAGGIGQPLSLILKTNPLVSHLSCYDIHGVTGVAADLSHICSPAKVTGHLKDELHKAVDGADVVIIPAGTPRKPGMTREDLFSVNATIVRDLVSACAKQCPKALIGVVSNPVNSVVPIASEVLKKAGVFDPARLFGITTLDVVRARTFVAEAAGKSPYDVNVQVVGGHSGPTIIPLLSQAGVSLTEEQVKAITHRVQYGGDEVVKAKGGAGSATLSMAYAAGEWMSSVLKGLRGDKGIVECTYVQTDIIPGVNFFGCPVELGKGGVEKIHKPVFDAYEQSLLEKCVADLEKNIAAGFAFGSRQ

SEQ ID NO: 45134 - DNA, 1077 bp, Medicago sativa
  CDS (1)..(1077)
atggagccaaattcatatgcaaattcacgaatcacaagaatcgccagccacctcaatcctcccaatctcaagatgaatgaacatggtggttcttctttgacgaatgttcattgccgtgccaaagggggtacaccaggattcaaagttgcgattttgggtgctgctggtggcataggacaacctctttctatgttgatgaagatgaatctcttggtttctgttcttcatctttatgatgtcgttaatactcctggtgttacttctgatatcagtcacatggatacttctgctgttgttcgaggattcttggggcaaaatcagcttgaggatgcacttacaggtatggatttggtaatcattcctgctggggttccccgtaaacctggaatgacaagagatgatctcttcaatattaatgctgggattgttaagacgctttgtgaagcgattgcaaagcgatgtcctaaggcgattgtaaacttgataagcaatccagttaactccactgttcctattgcggctgaggttttcaaaagagctggtacttatgatcccaagagactgttgggagtgacaatgcttgacgtggttagggccaatacgtttgtggctgaagttatgggtcttgatccaagggatgtggatgttcctgttgtcgggggacatgccggaatcacgattttacctcttctttctcaggttaaaccaccttcctctttcaccccaaaggaaattgagtacttgacagatcgcatacaaaatgggggaacagaagttgttgaggccaaagctggagctggatctgcaacactatcaatggcatatgctgctgttaaatttgcagatgcatgtcttcgtgcgttgaaaggagaggctgatatcattcaatgtgcatatgttgattcacaggtaactgaattgccattctttgcatcaaaagtacgacttggccgtaacggagttgaggaatttcttcctcttggtcccctaagtgattatgagagggcaagtttggaaaaggccaagaaagagttagcaacaagcgtggagaagggagtttctttcatcagaaaatga

SEQ ID NO: 45135 - protein, 358 aa, Medicago sativa
MEPNSYANSRITRIASHLNPPNLKMNEHGGSSLTNVHCRAKGGTPGFKVAILGAAGGIGQPLSMLMKMNLLVSVLHLYDVVNTPGVTSDISHMDTSAVVRGFLGQNQLEDALTGMDLVIIPAGVPRKPGMTRDDLFNINAGIVKTLCEAIAKRCPKAIVNLISNPVNSTVPIAAEVFKRAGTYDPKRLLGVTMLDVVRANTFVAEVMGLDPRDVDVPVVGGHAGITILPLLSQVKPPSSFTPKEIEYLTDRIQNGGTEVVEAKAGAGSATLSMAYAAVKFADACLRALKGEADIIQCAYVDSQVTELPFFASKVRLGRNGVEEFLPLGPLSDYERASLEKAKKELATSVEKGVSFIRK

SEQ ID NO: 45136 - DNA, 1032 bp, Medicago sativa
  CDS (1)..(1032)
atgatgaggccgtcgatactcagatccgtcaagtcagccgtgtcccgcagcataacccgccgtggctatgccaccgaaccggttcctgaacgcaaggtggccattctcggtgccgccggtgggatcggtcagcccctctctcttctcatgaagctcaaccctctcgtttcaaccctttctctttatgatattgctggtacccctggtgttgctgccgatgttagccacatcaactccagatctcaggtaactgggtacgcaggtgaagatgagcttggaaaagctttggagggtgctgacgttgttataattcctgccggcgtgcccagaaagcctggaatgactcgtgatgatcttttcaacattaacgctggcattgttaaatcacttgccactgctatttctaagtactgcccccatgctcttgttaacatgataagcaaccctgtgaactcaactgtccccattgctgctgaggttttcaagaaggcagggacatacgacgagaagagattgtttggggttacaactcttgatgtagttagggcaaaaactttttatgctgggaaagctaatgttccagttgcggaggtcaatgtacctgttataggaggccatgcaggagttactattctcccactattttctcaggcatcacctcaagccaatctggatgatgatgtcattaaggctctaactgcgaggacccaagatggaggaacagaggttgtgactgccaaggctggaaagggttccgcaactttgtcaatggcttatgctggagccatatttgctgatgcttgcctcaaaggtcttaatggagttccagatgttgttgagtgctcgtatgtgcaatccaatctcattgctgaacttcctttctttgcttccaaggtgaggattgggaagaatggtgtagaggaaattctgggcctaggttctctctcagattttgagaaacaaggccttgaaaacctcaagtctgaacttaagtcatctattgagaagggaatcaaatttgcctcccagtaa

SEQ ID NO: 45137 - protein, 343 aa, Medicago sativa
MMRPSILRSVKSAVSRSITRRGYATEPVPERKVAILGAAGGIGQPLSLLMKLNPLVSTLSLYDIAGTPGVAADVSHINSRSQVTGYAGEDELGKALEGADVVIIPAGVPRKPGMTRDDLFNINAGIVKSLATAISKYCPHALVNMISNPVNSTVPIAAEVFKKAGTYDEKRLFGVTTLDVVRAKTFYAGKANVPVAEVNVPVIGGHAGVTILPLFSQASPQANLDDDVIKALTARTQDGGTEVVTAKAGKGSATLSMAYAGAIFADACLKGLNGVPDVVECSYVQSNLIAELPFFASKVRIGKNGVEEILGLGSLSDFEKQGLENLKSELKSSIEKGIKFASQ

SEQ ID NO: 45138 - DNA, 1227 bp, Medicago sativa
  CDS (1)..(1227)
atggcggcagcagcatcagctacttttactattggaaccacccaaacagggaggtcacttcctcaatctagtccttttggtttgaaattcaattcccaggttaatttcaacaccttctctggcctcaaagccatgccatctctcagatgtgactctgaatcatctttctccggcaaagaaacttgtgccgctctgcgtgcaacttttgcacccaaagctcaaaaggaaaaccgaaacctcacccgcaacttgcagcctcaggcatcctacaaagtagcggttcttggtgctgcaggagggattggtcagccactggcacttctcatcaagatgtcgcctttggtttccgacctgcatctctatgatatcgcgaatgttaagggagttgctgctgatatcagtcattgcaacaccccttcgaaagttttggatttcacaggtgcttctgagttagcaaattgtttgaaaggtgtggatgttgttgttatccctgctggtgttcctaggaagcccggcatgactcgtgacgaccttttcaacatcaatgctggtatagtcagggacttggtcactgccgttgcagataattgccccaatgcttttattcatattatcagtaatccagtgaactctacagttcctattgccgctgaaattctaaaacagaagggtgtctatgatcctaagaagctctttggtgtttctacacttgatgttgtgagggcaaacacatttgttgctcagaagaagaacctgaggttgattgatgtggatgttccagttgttggaggtcatgccgggattacaattcttcctctcttgtcaaagacaaaaccctcagtgagtttcactgatgaagaaattgaggagctaactgtcaggattcaaaacgctggaactgaggttgttgaggcgaaggctggtgcagggtctgctactttgtcaatggcttatgcagcagcaagatttgttgaatcgtctcttcgtgcacttgacggagacgctgatgtgtatgagtgctcattcgtacagtcagatctgaccgaccttccgttttttgcttcaagggtgaagattggtaggaaaggagtcgaggctttaattccaactgatctccaaggattgagtgagtatgagcagaaggctttggaagcacttaagccagaacttaaggccagcatcgagaagggggttgcttttgctcaaaagcaaactgttactgcttag

SEQ ID NO: 45139 - protein, 408 aa, Medicago sativa
MAAAASATFTIGTTQTGRSLPQSSPFGLKFNSQVNFNTFSGLKAMPSLRCDSESSFSGKETCAALRATFAPKAQKENRNLTRNLQPQASYKVAVLGAAGGIGQPLALLIKMSPLVSDLHLYDIANVKGVAADISHCNTPSKVLDFTGASELANCLKGVDVVVIPAGVPRKPGMTRDDLFNINAGIVRDLVTAVADNCPNAFIHIISNPVNSTVPIAAEILKQKGVYDPKKLFGVSTLDVVRANTFVAQKKNLRLIDVDVPVVGGHAGITILPLLSKTKPSVSFTDEEIEELTVRIQNAGTEVVEAKAGAGSATLSMAYAAARFVESSLRALDGDADVYECSFVQSDLTDLPFFASRVKIGRKGVEALIPTDLQGLSEYEQKALEALKPELKASIEKGVAFAQKQTVTA

SEQ ID NO: 45140 - DNA, 972 bp, Trypanosoma cruzi
  CDS (1)..(972)
atggtgaatgtcgctgttattggtgccgctggaggcatcggccaatccctttccctgctgctccttcgggagctgccgtttggcagcaccctgtcactgtatgacgtggcaggggcacctggggttgccgctgacctgtcccacatcgaccgtgccggaattactgtgaagtacgccgcaggaaagctgccccccgtaccccgcgaccccgcactgactgaactggccgagggagttgatgtttttgtcattgtggctggtgtaccgcgcaagcccggtatgacgcgcgacgatctgttcaacgtgaacgccggcattgtcatggatcttgtcttgacatgcgcctctgtatcgcccagtgcctgcttctgtattgttacgaaccctgtgaacagcatggtgcccattgcagcccagacactgaggaagattggtgtgtacaacaaaaacaaactgcttggtgtgagcctgctcgatggactgcgagccacacgttttatcaacaatgctcgacacccacttgtcgttccatacgtcccagttgtcggtgggcacagcgatatcactattgtacccctgtattcgcagattcctggccctctgcctgatgaatctaccctgaaagagatccgcaaacgtgtgcaggtggcggggacggaggtggtgaaagcaaaggcgggtcgcggcagtgcgacgctctccatggcggaggcaggcgcccgcttcaccatgcatgtcgtgaaggcgcttatgggtctggatacgcccatggtttacgcgtatgttgacacggacggcaaacacgaatgcccatttctcgcaataccggtggttctaggaaagaatggcattgagaggcgccttcctattggccccatcacaacggtcgagaaggagatgcttgaagaggccgtcggcgtggtgaaaaagaatattgagaaggctgagacgtttgcgcggtcaaagttgtag

SEQ ID NO: 45141 - protein, 323 aa, Trypanosoma cruzi
MVNVAVIGAAGGIGQSLSLLLLRELPFGSTLSLYDVAGAPGVAADLSHIDRAGITVKYAAGKLPPVPRDPALTELAEGVDVFVIVAGVPRKPGMTRDDLFNVNAGIVMDLVLTCASVSPSACFCIVTNPVNSMVPIAAQTLRKIGVYNKNKLLGVSLLDGLRATRFINNARHPLVVPYVPVVGGHSDITIVPLYSQIPGPLPDESTLKEIRKRVQVAGTEVVKAKAGRGSATLSMAEAGARFTMHVVKALMGLDTPMVYAYVDTDGKHECPFLAIPVVLGKNGIERRLPIGPITTVEKEMLEEAVGVVKKNIEKAETFARSKL

SEQ ID NO: 45142 - DNA, 972 bp, Trypanosoma brucei
  CDS (1)..(972)
atggtcagcgttgccgtaattggagccgccggtggtattggccagtctctatcgctacttcttcttcgccaactgccgtacgggagcacgctctcgctgtacgacgtggcgggtgcccccggagtggccgccgatctctcacatgttgaccgcgccggcgtcaccgtcaaatatgctgctggaaagctccccccagtgaagcgggatcccgccctcgccgaacttgcgcgcggtgttgatgtttttgtcattgtcgccggtgtgccccgtaagcccggtatgtctcgtgacgacctcttcaacgtgaacgccggcatcattatggatcttgttctcacatgtggttcctcatcgccgcaggcatgtttctgcgtcgtgacgaaccccgtaaacagcaccgtgccgattgccgctgaggccttaaagaagcttggcatctacaacaagaacaaactcctgggcgtaactctgctggatgggctccgtgctacccgtttcatcaacaacgctcgccaccctcttgccgtcgcctccgtccccgttgttggtggccatagcgacgtaacgattgtcccactgttttctcaacttcctggtccactccctgaggagggggaactgacacagatccgcaagcgtgtgcaggtggcgggtacggaggtggtgaaggcaaaggcaggccgtggaagtgccaccttgtcgatggctgaggcaggtgcccgtttcgcgatgtttgttgtgaacgccatcacaggtcagtcttccccgatggtttatgcgtatgtggatacagatggcactcagaattgctcgttcctcgcaataccggtggttcttggcaagaatggcattgaaaagcgcctaccgataggtcccatgaatgctgtggagaaggaaatgcttaagcaatccatctccgttgtgaaggcgaacattgagaagggaatgaatttcgcgcgctcaaagttgtaa

SEQ ID NO: 45143 - protein, 323 aa, Trypanosoma brucei
MVSVAVIGAAGGIGQSLSLLLLRQLPYGSTLSLYDVAGAPGVAADLSHVDRAGVTVKYAAGKLPPVKRDPALAELARGVDVFVIVAGVPRKPGMSRDDLFNVNAGIIMDLVLTCGSSSPQACFCVVTNPVNSTVPIAAEALKKLGIYNKNKLLGVTLLDGLRATRFINNARHPLAVASVPVVGGHSDVTIVPLFSQLPGPLPEEGELTQIRKRVQVAGTEVVKAKAGRGSATLSMAEAGARFAMFVVNAITGQSSPMVYAYVDTDGTQNCSFLAIPVVLGKNGIEKRLPIGPMNAVEKEMLKQSISVVKANIEKGMNFARSKL

SEQ ID NO: 45144 - DNA, 1242 bp, Glycine max
  CDS (1)..(1242)
atggcagcggcaccagcagctaccttcactattggaaccaccggttccctaggccaaagaggaaactcgcttcctcaattaaagtcttctgggttgaaattcaactcccagaatcatttgaagagcttctgcggcctcaaggccatgtcatccgtgagatgtgagtcagaatcgtctttcttggttaacaaaactggtgctgctctgcgggcgtcttttgcatccaaggctcaaaaggaaaacgaccaaaacttcaactacaactcgcagcctcaggcttcgtacaaagttgcagttcttggtgctgctggagggataggtcagccactcgcgcttctcatcaagatgtcgcctctaatttccgacctccatctctatgatattgcgaatgtcaagggagttgctgctgatatcagtcactgcaacaccccctcacaagtcagggatttcactggagcttctgagttggcgaattgtttgaagagtgtgaatgttgttgtcatacccgccggtgttccaaggaagcctggcatgactcgtgatgaccttttcaacatcaatgccggcatagtcagggacttggtttctgctgttgcggataatagccctgatgcttttattcaaatcatcagtaaccctgtgaactccaccgtgcctattgccgcagaagttttgaaacagaagggtgtgtatgatcctaagaagctctttggtgttaccacactggatgttgtgagggcaaacacatttgttgctcagaggaagaaccttaagctgattgatgttgatgtccccgttgttggtgggcatgccgggattaccattcttcctctgttgtcaaagaccaagccctcagcgagtttcactgatgaagaaattgaggagttgactgtcaggattcaaaatgctggaactgaagttgttgaagcaaaggcaggtgcagggtctgctaccttgtcaatggcgtatgcagcagctagatttgttgaatcgtctcttcgtgcccttgatggagatggggatgtgtatgagtgctcatatgtggaatcagatttgactgaccttccattctttgcttcaagggtgaagcttggtaggaaaggagttgaggcattaattccatctgacctccaagggttgactgactatgagcagaaggctttggaatcacttaagccagaactcatggccagcatagagaaggggattgcttttgctcagaagcaagctgttgctgcttaa

SEQ ID NO: 45145 - protein, 413 aa, Glycine max
MAAAPAATFTIGTTGSLGQRGNSLPQLKSSGLKFNSQNHLKSFCGLKAMSSVRCESESSFLVNKTGAALRASFASKAQKENDQNFNYNSQPQASYKVAVLGAAGGIGQPLALLIKMSPLISDLHLYDIANVKGVAADISHCNTPSQVRDFTGASELANCLKSVNVVVIPAGVPRKPGMTRDDLFNINAGIVRDLVSAVADNSPDAFIQIISNPVNSTVPIAAEVLKQKGVYDPKKLFGVTTLDVVRANTFVAQRKNLKLIDVDVPVVGGHAGITILPLLSKTKPSASFTDEEIEELTVRIQNAGTEVVEAKAGAGSATLSMAYAAARFVESSLRALDGDGDVYECSYVESDLTDLPFFASRVKLGRKGVEALIPSDLQGLTDYEQKALESLKPELMASIEKGIAFAQKQAVAA

SEQ ID NO: 45146 - DNA, 1197 bp, Pisum sativum
  CDS (1)..(1197)
atggcaacagcagcatcagcagctactttttctattggaaccgcccaaacagggaggtcactttctccatcaaacccttttggtttcaaatccaattcccaggttaatttctctggcctcaaggccatgtcatctttctctggcaacgaaacttgtgctgctcttcgtgcaacttttgctcccaaagctgtaaaagaaaaccaaaaccgaaaccacatcttgcagccacaggcatcctacaaagtagcgcttctcggtgctgccggagggattggtcagccactggcacttctcatcaagatgtcgcctttggtatccgacctgcatctctatgatatcgcgaacgttaagggagttgctgctgatattagtcattgcaacactccttcaaaagttgcggatttcacaggagctgctgagttagccaattgtttgaaaggtgtggatgttgttgttatacctgctggtgttcctaggaaacccgggatgactcgtgatgatcttttcaacatcaatgccggtatagttagagacttggtctctgccgttgcagataattgccctggggcttttattcatattattagtaatccggtgaattctactgtgcctattgctgctgaaattctgaaacaaaaaggtgtctatgatcctaaaaagctctttggtgttagcacacttgatgttgtgagggcaaacacctttgttgctcagagaaagaacttgaggctgattgatgtagatgtccctgttgttggggggcatgctgggattaccattcttcctcttttgtcaaagacaaaaccctcggcgagtttcactgatgaagaaattgaggagctgactgtcaggattcaaaatgctggaactgaagttgttgaggcaaaagctggtgcagggtctgcaactttgtcaatggcttatgcagcagctagatttgttgaatcctctcttcgtgcgcttgacggagatgctgatgtgtacgagtgctcatatgtacagtcagatctgactgaccttccgttttttgcttcaagggtgaagattggtaggaaaggagtcgaggctttcattccaactgatctccaaggattgagtgagtacgagcagaaggctttggaagcactcaagccagaacttaaggccagtatcgagaagggggttgcttttgctcaaaagcaaactgttgtcgcttaa

SEQ ID NO: 45147 - protein, 398 aa, Pisum sativum
MATAASAATFSIGTAQTGRSLSPSNPFGFKSNSQVNFSGLKAMSSFSGNETCAALRATFAPKAVKENQNRNHILQPQASYKVALLGAAGGIGQPLALLIKMSPLVSDLHLYDIANVKGVAADISHCNTPSKVADFTGAAELANCLKGVDVVVIPAGVPRKPGMTRDDLFNINAGIVRDLVSAVADNCPGAFIHIISNPVNSTVPIAAEILKQKGVYDPKKLFGVSTLDVVRANTFVAQRKNLRLIDVDVPVVGGHAGITILPLLSKTKPSASFTDEEIEELTVRIQNAGTEVVEAKAGAGSATLSMAYAAARFVESSLRALDGDADVYECSYVQSDLTDLPFFASRVKIGRKGVEAFIPTDLQGLSEYEQKALEALKPELKASIEKGVAFAQKQTVVA

SEQ ID NO: 45148 - DNA, 1212 bp, Arabidopsis thaliana
  CDS (1)..(1212)
atggcaacagcaacatcagcttctctgttttcaactgtttcttcatcttactccaaagctagctccataccacattcaagactccaatctgtgaaatttaactcagtccctagcttcaccggtctcaaatcaacctctctcatctccggatctgattcctcttccttaaccaagactctccgcggttccgtaacgaatgcacaaacatctgacaagaagccttacggattcaaaatcaacgcttcgtacaaagtagctgttcttggtgctgctggtggtataggtcagcctttatcacttctcatcaagatgtctccgttagtctctacgcttcatctttacgatatcgccaatgttaaaggagttgctgctgatctaagtcattgtaacactccttctcaagttcgtgatttcactggtccttctgagttagctgattgtttgaaagatgttaacgttgttgtcatccctgctggtgtgccgaggaaacccggtatgactcgtgacgatcttttcaacatcaatgccaatattgtcaagactcttgttgaagctgttgctgagaattgccctaatgctttcattcatattattagtaacccggttaactctacggtacctattgctgctgaagtgttgaagaagaaaggtgtttatgatcctaagaagctgtttggtgtcactactttggatgttgtgagggctaacacttttgtttctcagaagaagaatcttaagcttattgatgttgatgttccggttattggtggacatgctggaatcaccattttgcctctcctctcgaagacaaaaccgtctgttaactttactgatgaagagatccaagagctcactgttaggattcagaacgctggtactgaggttgttgatgctaaggcaggtgcaggttcagctactttgtcaatggcttatgctgctgctagatttgtggagtcatctcttcgtgctcttgatggagacggagatgtctacgagtgctcgtttgtggagtcgactctgactgatcttcctttctttgcatcacgggttaagatagggaagaacggtcttgaagctgtgattgagtcagaccttcagggattgactgagtatgagcagaaagcactagaagctcttaaggtagaattgaaagctagcattgacaagggtgtcgcatttgcaaacaaaccagctgctgcagcagctaactag

SEQ ID NO: 45149 - protein, 403 aa, Arabidopsis thaliana
MATATSASLFSTVSSSYSKASSIPHSRLQSVKFNSVPSFTGLKSTSLISGSDSSSLTKTLRGSVTNAQTSDKKPYGFKINASYKVAVLGAAGGIGQPLSLLIKMSPLVSTLHLYDIANVKGVAADLSHCNTPSQVRDFTGPSELADCLKDVNVVVIPAGVPRKPGMTRDDLFNINANIVKTLVEAVAENCPNAFIHIISNPVNSTVPIAAEVLKKKGVYDPKKLFGVTTLDVVRANTFVSQKKNLKLIDVDVPVIGGHAGITILPLLSKTKPSVNFTDEEIQELTVRIQNAGTEVVDAKAGAGSATLSMAYAAARFVESSLRALDGDGDVYECSFVESTLTDLPFFASRVKIGKNGLEAVIESDLQGLTEYEQKALEALKVELKASIDKGVAFANKPAAAAAN

SEQ ID NO: 45150 - DNA, 951 bp, Piromyces sp
  CDS (1)..(951)
atggttaaggtcgctgttcttggtgctgctggtggtattggtcaaccactttctcttctccttaagtctcacccacaagttaccgaattaaatttatacgatatcgttaactctccaggtgttgctgctgatttatctcacatttgcactaaggctaaggttactggttacaagggtcaagaaaaccttgacgctgctcttgctggttgtgatattgttgttatcccagctggtattccacgtaagccaggtatgactcgtgacgatcttttcaacatcaatgccggtattgttaagggtcttgctgaaggtattgctaagaactgcccaaaggctttcgtttgcattatctctaacccagttaactctactgtcccaatctgtgccgaagtcttcaagaaggccggtacctacgacccaaagagactctttggtgttactcttcttgatatggttcgttcctctaccttcgtttctgaatgcaagggtaccagcccagctgatactaaggttactgttattggtggtcactctggtgttaccattgttccacttctttctcaagttaagggtttaaccttcactcaagaagaagttgaagctcttactcaccgtattcaattcggtggtgatgaagttgttaaggctaaggatggtgctggttctgccactctttccatggcttacgctgccgctcgtttcgtcgactctcttattgaaggtgccttcatgaagaagccagtcattgaatgtgcttacgtcgaatctccacttgctgttgatgatggttgctccttcttcgcttccgccattgaactcggtccatctggtgctgaaaagattctcccaattggtccactctctgaatacgaacaaggtctttacaaggcttgtgttgaacaacttaaggctaacattgccaagggtgtcaacttcgttaaccaagcttaa

SEQ ID NO: 45151 - protein, 316 aa, Piromyces sp
MVKVAVLGAAGGIGQPLSLLLKSHPQVTELNLYDIVNSPGVAADLSHICTKAKVTGYKGQENLDAALAGCDIVVIPAGIPRKPGMTRDDLFNINAGIVKGLAEGIAKNCPKAFVCIISNPVNSTVPICAEVFKKAGTYDPKRLFGVTLLDMVRSSTFVSECKGTSPADTKVTVIGGHSGVTIVPLLSQVKGLTFTQEEVEALTHRIQFGGDEVVKAKDGAGSATLSMAYAAARFVDSLIEGAFMKKPVIECAYVESPLAVDDGCSFFASAIELGPSGAEKILPIGPLSEYEQGLYKACVEQLKANIAKGVNFVNQA

SEQ ID NO: 45152 - DNA, 1068 bp, Chlamydomonas reinhardtii
  CDS (1)..(1068)
atgctgctcgcgaaccgtgttaacgccggtgccgcccgccgtgtgagcgggcgggccgctgctcccatcgcggtgcgtgcgggccgtcgctctcttgtgtgcgaggcgcgcaaggttgcgctgctcggcgctgccggtggcattggccagcctctggctctgctgctgaagatgaacaagtttgtgacggagctggcgctttacgatatcgcaaatgtcgtcggcgttgccgctgacctgagccactgcaacaccccggtgaaggttactggctacaccggccccgaggagctgggcgcctgcctgaagggtgctgatctcatcgttattccggctggcgtgccccgcaagcctggcatgacccgtgacgacctgttcaacaccaacgctggcatcgttaaggcgctggtggaggcggtcgccaagcacgctcccaacgccgtgctggagattatcaccaaccccgtcaactcgaccgtgcctatcgctgtggagaccctaaagctggcgggcgtgtatgaccccaagaaggttattggtgtgacctcgctggacattgtccgcgccaacacctttgtgtcggaggctaagggcctggacatgaaggacgtggacgtgccggtcattggtggccacgctggctccaccatcctgccgctgctgtctcagacgactccccccgtgaccttcactgaggctgagaagaaggccatgaccgacaagatcgccaacgccggcaccgtggtggtggaggccaaggctggcaagggctccgccaccttgtccatggcctacgccgccgcccgcatggctgagtcgacgctgctgggtctgaacggcgagcccaacatctacgagtgcgccttcgtgcagtcggacgttgttgcggactgccccttcttcgccagcaaggtgctgctgggccccaacggcgtggccaaggtgatgggcctgggcgagctggacgccttcgagcaggccgccatggccgccatgctgccgcagctcaagagcgagatccagaagggcctcgactttgtcaagagcccccccgcccccgcctcgtaa

SEQ ID NO: 45153 - protein, 355 aa, Chlamydomonas reinhardtii
MLLANRVNAGAARRVSGRAAAPIAVRAGRRSLVCEARKVALLGAAGGIGQPLALLLKMNKFVTELALYDIANVVGVAADLSHCNTPVKVTGYTGPEELGACLKGADLIVIPAGVPRKPGMTRDDLFNTNAGIVKALVEAVAKHAPNAVLEIITNPVNSTVPIAVETLKLAGVYDPKKVIGVTSLDIVRANTFVSEAKGLDMKDVDVPVIGGHAGSTILPLLSQTTPPVTFTEAEKKAMTDKIANAGTVVVEAKAGKGSATLSMAYAAARMAESTLLGLNGEPNIYECAFVQSDVVADCPFFASKVLLGPNGVAKVMGLGELDAFEQAAMAAMLPQLKSEIQKGLDFVKSPPAPAS

SEQ ID NO: 45154 - DNA, 939 bp, Actinobacillus succinogenes
  CDS (1)..(939): transl_table=11
atgaaagtaaccttattaggcgccagcggcggtatcggtcaacctctttcattgttgttaaaattacatcttccggcagaaagcgatttaagcttatacgatgttgcgccggtcacccccggtgtggcgaaagacatcagccatattccgacttcggttgaagtggaaggtttcggcggcgatgatccgtccgaggcattaaaaggggcggatatcgttttaatctgtgcgggtgtggcgcgtaagccgggtatgactcgtgcggatttgtttaatgttaacgccggtattatccagaatttagtggaaaaagttgcgcaagtttgcccgcaggcttgtgtttgcattatcactaatccggtgaactcgattattccgattgcggcggaagtgctgaaaaaagcgggcgtatacgataaacggaaattattcggtattactacgctggataccatccgttccgaaaaatttatcgtgcaagcgaaaaatattgaaatcaaccgtaacgatatttcagttatcggcggacattcaggtgtgacgattttacctttgttgtcacaaattccgcatgtggaatttaccgagcaggaattaaaagatttaactcaccgcatccaaaatgccggcaccgaagtggtagaagctaaagccggtgcgggttccgctacactttccatggcgtatgcggcaatgcgttttgtggtttccatggctcgcgcattaaacggcgaagtgattacggaatgcgcctatattgaaggcgacggtaaattcgcccgtttctttgcacaaccggttcgtttgggtaaaaacggcgtagaagaaattctgccgttaggtacattaagcgcatttgagcaacaagcgcttgaagcgatgttaccgaccttgcaaactgacattgataacggtgtgaaatttgttaccggcgaataa

SEQ ID NO: 45155 - protein, 312 aa, Actinobacillus succinogenes
MKVTLLGASGGIGQPLSLLLKLHLPAESDLSLYDVAPVTPGVAKDISHIPTSVEVEGFGGDDPSEALKGADIVLICAGVARKPGMTRADLFNVNAGIIQNLVEKVAQVCPQACVCIITNPVNSIIPIAAEVLKKAGVYDKRKLFGITTLDTIRSEKFIVQAKNIEINRNDISVIGGHSGVTILPLLSQIPHVEFTEQELKDLTHRIQNAGTEVVEAKAGAGSATLSMAYAAMRFVVSMARALNGEVITECAYIEGDGKFARFFAQPVRLGKNGVEEILPLGTLSAFEQQALEAMLPTLQTDIDNGVKFVTGE

SEQ ID NO: 45156 - DNA, 945 bp, Bacillus clausii
  CDS (1)..(945)
atggcaattaaacgaagaaaaatttctgtaatcggcagtggctttacaggagctaccactgcgcttatggttgcccaaaaagagctaggggatgttgttttattggacattccaaacatggaaggtcctacgaaaggaaaggcccttgatatgcttgaatcgacacctgtccaaggcgtcgattcaacgatcacgggtacctctagctacgaagatacgaaagattcggatgtcgttgtcattacggctggcattgcccgcaaaccgggaatgagccgtgatgatcttgtagccacaaatgcaaaaatcatgaagtctgtcacaaaagaagttgttaagtattcgcctaacagctacattatcgttttgaccaaccctgctgacgcgatgacgtatacggtttataaagaatcaggctttccgaaaaaccgtgtcatcggccagtctggcgttcttgacacagcacgtttccgcacgtttgtcgcccaagaactaaatgtatccgtagaggatgtcactggttttgtcttaggcggccatggagatgatatggttccgcttatccgttattcagcagcaggcggtgtgccgttaacaaaactgatcgctccagaacggattgaagaaattgttgaacgcacgcgcaaaggcggcggcgaaatcgttggcttattaggcaatggcagcgcctattacgcaccagctgcttcgcttacacaaatggtcgaagcgatcttgaaagacaaaaaacgcattatcccaacaattgcctacctcgaaggcgagtatgggcagcatgacctgtacttaggcgtaccgaccattcttggtggtgacggcattgagaaagtcattgagcttgacttgacagaggaagaaaaggcacaattggacaaatcagtacaatccgtgcgcaatgtaatggcagcattgccagcggagtaa

SEQ ID NO: 45157 - protein, 314 aa, Bacillus clausii
MAIKRRKISVIGSGFTGATTALMVAQKELGDVVLLDIPNMEGPTKGKALDMLESTPVQGVDSTITGTSSYEDTKDSDVVVITAGIARKPGMSRDDLVATNAKIMKSVTKEVVKYSPNSYIIVLTNPADAMTYTVYKESGFPKNRVIGQSGVLDTARFRTFVAQELNVSVEDVTGFVLGGHGDDMVPLIRYSAAGGVPLTKLIAPERIEEIVERTRKGGGEIVGLLGNGSAYYAPAASLTQMVEAILKDKKRIIPTIAYLEGEYGQHDLYLGVPTILGGDGIEKVIELDLTEEEKAQLDKSVQSVRNVMAALPAE

SEQ ID NO: 45158 - DNA, 1074 bp, Lycopersicon esculentum
  CDS (1)..(1074)
atgcagccatcaggtgcagaagttcaccaacgaatagccagaatttcagctcatctttacccttcaaatccccagatgggagatgggtctattttggaaagaacaaattgcagagcaaaaggtggagcagctggattcaaagttgctatactgggtgctgctggaggaattgggcagccacttgcaatgttgatgaagatgaatcctttagtctcagttcttcatctctatgatgttgttaatgctcctggtgttactgctgatattagccacatggacactggtgctgttgtgaggggttttctagggcaaagtgagcttgaaggtgcacttacaggaatggaccttgtgatcatacctgctggtattccaagaaaacctggaatgacaagagatgatctttttaagattaatgctggaattgtgaggaccctctgtgaaggaattgcaaagtgctgtcctaatgctattgtcaatttgattagtaatccagtgaactccacagttcctattgcagctgaagttttcaagaaagcaggcacttatgatccaaagaagcttcttggagttacctcacttgatgttgtgagagctaacacttttgtggcagaagtcttgggactagatcctagggaagtagaggttcctgtcgttggaggtcatgctggggtgacaattttgcctcttctctcacaggtcaagcctccttgctccttcacacacgaggaaacagaatatttgactaagcgcattcaagatggaggaacagaggttgttgaggcaaaaaaaggggctggatctgcaactctatctatggcatatgcagctgtaaaatttgcagatgtttgtctcaagggcttaagaggagatgccggtgtggtggcttgtgcttttgtagcttctcaggtcacagaactccctttctttgcctccaaagtacgacttggccgtactggagctgaagaagtctatcaacttggtcccctaaatgagtatgagaggattggactggagaaggccaagaaagagcttgctgagagcattcagaaaggaatttccttcatcaggaattag

SEQ ID NO: 45159 - protein, 357 aa, Lycopersicon esculentum
MQPSGAEVHQRIARISAHLYPSNPQMGDGSILERTNCRAKGGAAGFKVAILGAAGGIGQPLAMLMKMNPLVSVLHLYDVVNAPGVTADISHMDTGAVVRGFLGQSELEGALTGMDLVIIPAGIPRKPGMTRDDLFKINAGIVRTLCEGIAKCCPNAIVNLISNPVNSTVPIAAEVFKKAGTYDPKKLLGVTSLDVVRANTFVAEVLGLDPREVEVPVVGGHAGVTILPLLSQVKPPCSFTHEETEYLTKRIQDGGTEVVEAKKGAGSATLSMAYAAVKFADVCLKGLRGDAGVVACAFVASQVTELPFFASKVRLGRTGAEEVYQLGPLNEYERIGLEKAKKELAESIQKGISFIRN

SEQ ID NO: 45160 - DNA, 1041 bp, Lycopersicon esculentum
  misc_feature (766)..(766): n is a, c, g, or t
  CDS (1)..(1041)
atgaggacctccatgttgaaatccatcgtccgccggagctccactgccggagcatcctatgtatctcgccgtggattcgcatcgggatccgcgccggagaggaaagttgcagttttgggggcagccggagggattggacagcctttatctcttctaatgaagcttaaccctttagtatccagcctttcactctacgatatcgccggtactcccggtgttgccgccgatgttagtcacatcaacaccagatctgaggttgccggttttgcaggagaagagcagctagggcaggcactggaaggagctgatgttgttatcattcctgctggtgtgccccgaaagcctggtatgacccgagatgatctgttcaacattaatgcgggtattgttaaatctctatgcacggccattgctaagtactgccccaatgctctggtcaatatgataagcaacccagtgaattccactgtccctattgctgctgaggtgtttaagaaagctggaacttatgatgaaaagaagctctttggagttaccatgcttgatgtggttagggccaagacattttatgctggaaaagctaaagtaaatgttgctgaggtcaatctcccagtagttggtggtcatgctggcataactatcctcccattattttctcaagccactccaaaggcaaatctatcatatgaggaaattgttgcactcacaaagcgaacccaagatggtgggacagaagttgtagaagccaaagctggaaagggttcanccaccctctcaatagcctatgctggggctatttttgccgatgcttgcttgaaggggttgaatggagttcccgatgttgttgaatgtgcttttgtgcagtccaatgtcaccgagcttcccttcttcgcatccaaggtaagacttgggaaaaatggagtggaggaagtcctagggttgggtccacttaacgactacgagaagcaaggacttgaggctcttaagccagagctgctctcctccattgaaaagggaatcaagtttgccaaagaaaactaa

SEQ ID NO: 45161 - protein, 346 aa, Lycopersicon esculentum
  misc_feature (256)..(256): Xaa can be any naturally occuring amino acid
MRTSMLKSIVRRSSTAGASYVSRRGFASGSAPERKVAVLGAAGGIGQPLSLLMKLNPLVSSLSLYDIAGTPGVAADVSHINTRSEVAGFAGEEQLGQALEGADVVIIPAGVPRKPGMTRDDLFNINAGIVKSLCTAIAKYCPNALVNMISNPVNSTVPIAAEVFKKAGTYDEKKLFGVTMLDVVRAKTFYAGKAKVNVAEVNLPVVGGHAGITILPLFSQATPKANLSYEEIVALTKRTQDGGTEVVEAKAGKGSXTLSIAYAGAIFADACLKGLNGVPDVVECAFVQSNVTELPFFASKVRLGKNGVEEVLGLGPLNDYEKQGLEALKPELLSSIEKGIKFAKEN

SEQ ID NO: 45162 - DNA, 939 bp, Moritella japonica
  CDS (1)..(939): transl_table=11
atgaaagtcgctgtattaggtgctgctggtggtatcggtcaagctttagcccttcttttgaaaactcaactacctgcgggttctgaactgtcgctatatgatatcgcggcagtgacaccgggtgttgctgttgatttaagccatatccctacagacgttactattgctggttttgctggtacagatccaactgatgcacttgttggtgctgacgtggtacttatctctgcgggtgttgctcgtaaaccaggtatggaccgttcagatctattcaatatcaatgctggaattattaaaaacctagcaggtaaatgtgctgaagtatgtccaaacgcatgtatcggtattattactaacccagtaaacacaactgtgccaatcgctgctgaagtacttaagcaagcgggggtttacgacaagcgtaaactattcggtattactacgctggatgttattcgttctgaaacttttgtgagtgagctgaaaggtatttcacttgctgatgttgaagttcctgttatcggtggtcactcaggtgtcacaattctaccgctactttctcaagttaaaggtgttgaatttactgctgaagaaattgcgacgctaacgccacgtatccaaaatgcaggtactgaagttgttgaagctaaagcgggtggcggttctgcgacactttctatgggacaagcagcggcacgtttcggtctatctcttgtgcgcgcactacaaggtgaagaaggtatcgttgaatgtacttatgttgatggtggctctgagcacgcaacattcttcgcacaacctgtattattaggtaaaaatggcgttgaagaagtactagcgtacggtgagttaagcgaatttgaagctaacgcacgcgatgcaatgctagaagaactaaaagcgaacatcacgttaggtgaagaattcgttgctggttaa

SEQ ID NO: 45163 - protein, 312 aa, Moritella japonica
MKVAVLGAAGGIGQALALLLKTQLPAGSELSLYDIAAVTPGVAVDLSHIPTDVTIAGFAGTDPTDALVGADVVLISAGVARKPGMDRSDLFNINAGIIKNLAGKCAEVCPNACIGIITNPVNTTVPIAAEVLKQAGVYDKRKLFGITTLDVIRSETFVSELKGISLADVEVPVIGGHSGVTILPLLSQVKGVEFTAEEIATLTPRIQNAGTEVVEAKAGGGSATLSMGQAAARFGLSLVRALQGEEGIVECTYVDGGSEHATFFAQPVLLGKNGVEEVLAYGELSEFEANARDAMLEELKANITLGEEFVAG

SEQ ID NO: 45164 - DNA, 939 bp, Vibrio marinus
  CDS (1)..(939): transl_table=11
atgaaagtcgctgtattaggtgctgctggtggtatcggtcaagctttagccttacttttgaaaactcaactacctgcgggttctgatctgtcgctatatgatatcgcgccagttacaccgggtgttgctgttgatttaagccacatccctacagacgttactattgctggttttgctggtatggatccaacggatgcacttgttggtgctgacgtggtacttatctctgcgggtgttgctcgtaaaccaggtatggaccgttcagatctattcaatatcaatgctgggatcatcaaaaatctagcgggtaaatgtgctgaagtatgcccaaatgcatgtatcggtattattactaacccagtaaatacaactgtgccaatcgctgcagaagtacttaagcaagccggtgtttacgacaaacgtaaactattcggtattacaacgctggatgttatccgttctgaaactttcgtgagcgagcttaaaggcatttcacttgctgacgttgaagttccagttattggtggtcattcaggcgtaacaattctgccgctactttctcaagttaaaggcgttgaatttacagctgaagaaatcgcaacacttacaccacgcattcaaaacgcgggtactgaagttgttgaagcgaaagccggtggcggttctgcgacactttctatgggtcaagcagctgctcgtttcggtctatctcttgttcgcgcattacaaggtgaagaaggtatcgttgaatgtacttatgttgacggtggctctgagcacgcaacattcttcgcacaaccggtattattaggtaaaaacggcgttgaagaagtactcgcatatggcgagctaagcgagtttgaaaccaacgcacgcgatgcgatgttagaagaactaaaagcgaacatcacgttaggtgaagaattcgttgctggttaa

SEQ ID NO: 45165 - protein, 312 aa, Vibrio marinus
MKVAVLGAAGGIGQALALLLKTQLPAGSDLSLYDIAPVTPGVAVDLSHIPTDVTIAGFAGMDPTDALVGADVVLISAGVARKPGMDRSDLFNINAGIIKNLAGKCAEVCPNACIGIITNPVNTTVPIAAEVLKQAGVYDKRKLFGITTLDVIRSETFVSELKGISLADVEVPVIGGHSGVTILPLLSQVKGVEFTAEEIATLTPRIQNAGTEVVEAKAGGGSATLSMGQAAARFGLSLVRALQGEEGIVECTYVDGGSEHATFFAQPVLLGKNGVEEVLAYGELSEFETNARDAMLEELKANITLGEEFVAG

SEQ ID NO: 45166 - DNA, 1017 bp, Xenopus laevis
  CDS (1)..(1017)
atgttctctcgcatcgccagaccagctgctcatgggctcatccggggtctttccaccactgcacaggccaatgccagggtgacagtgcttggtgcttcaggaggaattgggcagccattatccctgctgcttaagaacagtccattgattagcaaccttgctttgtatgatattgcccacacaccaggtgtcgcagctgatctgagccacattgagactagagcaaaggttacaggttatcttggagcagaacagcttcctgaaagtctcaagagtgctgatgttgttgttattccagccggtgtgccaaggaaaccaggtatgacccgtgatgatctgtttaacactaatgcttccattgtggccaccctgactgatgcatgtgcaaagcattgcccagaagcaatgatctgtatcatttccaaccctgtaaattcaactatcccaatcacatcagaagtgtttaaaaaacatggtgtttacaaccccaaccgcatttttggtgtaaccacattggatattgttagagccaatacctttgttgctgagctcaagggcttggacccagcacgtgtgaatgtgcctgtgattggtggacatgctggcaaaacaattattcctcttatttctcagagcacaccaaaagtagagtttccccaagaccagctggaagtactgattggccgaattcaagaggctggtacagaggttgtcaaggctaaagcaggagcaggatcagccactctttccatggcatatgctggagcccgatttgtcttttccctcctggatgctatgaatggaaaggaaggtgtgattgagtgctcatttgtcaggtctgaggaaactgagagcccttacttctcaactcctctgctgctggggaaaaatggcattgagaagaatctgggactaggcaagctgactgcttatgaggagaaactggtttcagaagccatggcagaactaaaaggctccattaaaaagggtgaagaattcatcaagagccggaagtga

SEQ ID NO: 45167 - protein, 338 aa, Xenopus laevis
MFSRIARPAAHGLIRGLSTTAQANARVTVLGASGGIGQPLSLLLKNSPLISNLALYDIAHTPGVAADLSHIETRAKVTGYLGAEQLPESLKSADVVVIPAGVPRKPGMTRDDLFNTNASIVATLTDACAKHCPEAMICIISNPVNSTIPITSEVFKKHGVYNPNRIFGVTTLDIVRANTFVAELKGLDPARVNVPVIGGHAGKTIIPLISQSTPKVEFPQDQLEVLIGRIQEAGTEVVKAKAGAGSATLSMAYAGARFVFSLLDAMNGKEGVIECSFVRSEETESPYFSTPLLLGKNGIEKNLGLGKLTAYEEKLVSEAMAELKGSIKKGEEFIKSRK

SEQ ID NO: 45168 - DNA, 939 bp, Moritella sp
  CDS (1)..(939): transl_table=11
atgaaagtcgctgtattaggtgctgctggtggtatcggtcaagctttagcccttcttttgaaaactcaattacctgcgggttctgaactgtcgctatatgatatcgcgccagttacaccgggtgttgctgttgatttaagtcatatccctaccgacgttactattactggtttttcgggtacagatccaacggctgcactggttggtgctgacgtggtacttatctcggcgggtgttgctcgtaaaccaggtatggaccgttcagatctattcaatatcaatgctggcattatcaaaaatctagcgagtaaatgtgcggaagtatgcccaacggcatgtatcggtattattactaatccagttaacaccacggtgccaattgcggccgaagtacttaagcaagcgggcgtgtacgacaaacgtaaactattcggtatcacgactctggatgttattcgttctgagactttcgtcagtgcgcttaaaggcatttcacttgctgacgttgcagtaccggttatcggtggtcactcaggtgtaacaattctgccgctactttctcaagttaaaggtgttgaatttacggctgaagaaattgcgacactcacgacccgcattcaaaacgccggtactgaagtggttgaagctaaagcgggtggcggttctgcgacactttctatgggtcatgccgctgcacgtttcggtctctctctggtgcgcgcactacaaggagaaaaaggtattgttgagtgtacttatgttgacggtggctctgagcacgcgacattcttcgcccaaccggtattactcggtaaaaacggcgttgaagaagtactcgcatacggtgacttaagcgactttgaaaccaacgcacgcgatgcgatgttagaagaactaaaagcgaatatcaccttaggtgaagaattcgttgctggttaa

SEQ ID NO: 45169 - protein, 312 aa, Moritella sp
MKVAVLGAAGGIGQALALLLKTQLPAGSELSLYDIAPVTPGVAVDLSHIPTDVTITGFSGTDPTAALVGADVVLISAGVARKPGMDRSDLFNINAGIIKNLASKCAEVCPTACIGIITNPVNTTVPIAAEVLKQAGVYDKRKLFGITTLDVIRSETFVSALKGISLADVAVPVIGGHSGVTILPLLSQVKGVEFTAEEIATLTTRIQNAGTEVVEAKAGGGSATLSMGHAAARFGLSLVRALQGEKGIVECTYVDGGSEHATFFAQPVLLGKNGVEEVLAYGDLSDFETNARDAMLEELKANITLGEEFVAG

SEQ ID NO: 45170 - DNA, 936 bp, Shewanella sp
  CDS (1)..(936): transl_table=11
atgaaagttgctgtacttggtgccgctggtggtattggccaggctcttgccctattactcaaaacgcaattgccagccggttcaaaactatccctttatgatattgctcctgtaacacctggtgttgcggtcgatttaagccatatcccgacagcagtcgaagttaaaggctttgctggtcaagatccatctgctgcgctggaaggtgccgatgtggtgcttatttctgctggtgttgcacgtaagccgggcatggatcgttcagatctgtttaacatcaacgcaggtatcgtgagaaacctgatggagaaatgtgccgcaacttgtccaaaagctttgattggtattattactaacccagtcaacaccacagtcgctatcgccgctgaagtgttaaaagctgccggtgtttatgacaagaaccgtctattcggtataacgacactagacgttattcgttctgagacctttatcgccgaagcgaaaggactaaacgttgccgatgttaaagtcagtgttatcggtggccacagtggtgtgacgattcttccactactctctcaggtagaaggcgtaagctttaccgatgaagaagttgccgcaatgacgactcgtatccagaatgcgggtaccgaagtggttgaagctaaagccggtggcggcagcgcgacactttctatgggccaggctgcatgtcgcttcggtctatctttggttcgcggtcttcaaggtgaagagaatattgttgagtgtgcctatgtcgatggtggcagtgagcatgcagaattcttcgctcagccagttctactgggtaagaatggcgtagagaaagttctggcttacggtgacgtgagtgagttcgaagctaatgcccgtgatgctatgctagatacattgaaagcagatatcaccttaggcgttgatttcgttaagtaa

SEQ ID NO: 45171 - protein, 311 aa, Shewanella sp
MKVAVLGAAGGIGQALALLLKTQLPAGSKLSLYDIAPVTPGVAVDLSHIPTAVEVKGFAGQDPSAALEGADVVLISAGVARKPGMDRSDLFNINAGIVRNLMEKCAATCPKALIGIITNPVNTTVAIAAEVLKAAGVYDKNRLFGITTLDVIRSETFIAEAKGLNVADVKVSVIGGHSGVTILPLLSQVEGVSFTDEEVAAMTTRIQNAGTEVVEAKAGGGSATLSMGQAACRFGLSLVRGLQGEENIVECAYVDGGSEHAEFFAQPVLLGKNGVEKVLAYGDVSEFEANARDAMLDTLKADITLGVDFVK

SEQ ID NO: 45172 - DNA, 939 bp, Moritella sp
  CDS (1)..(939): transl_table=11
atgaaagtcgctgtattaggtgctgctggtggtatcggtcaagctttagcccttcttttgaaaactcaattacctgcgggttctgaactgtcgctatatgatatcgcgccagttacaccgggtgttgctgttgatttaagtcatatccctaccgacgttactattactggtttttcgggtacagatccaacggatgcactggttggtgctgacgtggtacttatctcggcgggtgttgctcgtaaaccgggtatggaccgttcagatctattcaatatcaatgctggcattatcaaaaatctagcgagtaaatgtgcggaagtatgcccaacggcatgtatcggtattattactaatccagttaataccacggtgccaattgcggccgaagtacttaagcaagcgggcgtgtacgacaaacgtaaactattcggtatcactactctggatgttattcgttctgagactttcgtcagtgcgcttaaaggcatttcacttgctgacgttgcagtacccgttatcggtggtcactccggtgcaacaattctgccgctactttctcaagttaaaggtgttgaatttacggctgaagaaattgcgacactcacgacccgcattcaaaacgccggtactgaagtggttgaagctaaagcgggtggcggttctgcgacactttctatgggtcatgccgctgcacgtttcggtctctctctggtgcgcgcactacaaggagaaaaaggtattgttgagtgtacttatgttgacggtggctctgagcacgcgacattcttcgcccaaccggtattactcggtaaaaacggtgttgaagaagtactcgcatacggtgacttaagtgagtttgaaaccaacgcacgcgatgctatgttagaagaactaaaagcgaatatcaccttaggtgaagaattcgttgctggttaa

SEQ ID NO: 45173 - protein, 312 aa, Moritella sp
MKVAVLGAAGGIGQALALLLKTQLPAGSELSLYDIAPVTPGVAVDLSHIPTDVTITGFSGTDPTDALVGADVVLISAGVARKPGMDRSDLFNINAGIIKNLASKCAEVCPTACIGIITNPVNTTVPIAAEVLKQAGVYDKRKLFGITTLDVIRSETFVSALKGISLADVAVPVIGGHSGATILPLLSQVKGVEFTAEEIATLTTRIQNAGTEVVEAKAGGGSATLSMGHAAARFGLSLVRALQGEKGIVECTYVDGGSEHATFFAQPVLLGKNGVEEVLAYGDLSEFETNARDAMLEELKANITLGEEFVAG

SEQ ID NO: 45174 - DNA, 939 bp, Moritella sp
  CDS (1)..(939): transl_table=11
atgaaagtcgctgtattaggtgctgctggtggtatcggtcaagctttagcccttcttttgaaaactcaattacctgcgggttctgaactgtcgctatatgatatcgcgccagttacaccgggtgttgctgttgatttaagtcatatccctaccgacgttactattactggttttgcgggtacagatccaacggatgcactggttggtgctgacgtggtacttatctcggcgggtgttgctcgtaaaccaggtatggaccgttcagatctattcaatatcaatgctggcattatcaaaaatctagcgagtaaatgtgcggaagtatgcccaacggcatgtatcggtattattactaatccagttaacaccacggtgccaattgcggccgaagtacttaagcaagcgggcgtgtacgacaaacgtaaactattcggtatcactactctggatgttattcgttctgagactttcgtcagtgcgcttaaaggcatttcacttgctgacgttgcagtaccggttatcggtggtcactcaggtgtaacaattctgccgctactttctcaagttaaaggtgttgaatttacggctgaagaaattgcgacactcacgacccgcattcaaaacgccggtactgaagtggttgaagctaaagcgggtggcggttctgcgacactttctatgggtcatgccgctgcacgtttcggtctctctctggtgcgcgcactacaaggagaaaaaggtattgttgagtgtacttatgttgacggtggctctgagcacgcgacattcttcgcccaaccggtattactcggtaaaaacggcgttgaagaagtactcgcatacggtgacttaagcgactttgaaaccaacgcacgcgatgctatgttagaagaactaaaagcgaatatcaccttaggtgaagaattcgttgctggttaa

SEQ ID NO: 45175 - protein, 312 aa, Moritella sp
MKVAVLGAAGGIGQALALLLKTQLPAGSELSLYDIAPVTPGVAVDLSHIPTDVTITGFAGTDPTDALVGADVVLISAGVARKPGMDRSDLFNINAGIIKNLASKCAEVCPTACIGIITNPVNTTVPIAAEVLKQAGVYDKRKLFGITTLDVIRSETFVSALKGISLADVAVPVIGGHSGVTILPLLSQVKGVEFTAEEIATLTTRIQNAGTEVVEAKAGGGSATLSMGHAAARFGLSLVRALQGEKGIVECTYVDGGSEHATFFAQPVLLGKNGVEEVLAYGDLSDFETNARDAMLEELKANITLGEEFVAG

SEQ ID NO: 45176 - DNA, 936 bp, Shewanella sp
  CDS (1)..(936): transl_table=11
atgaaagtttgtgtacttggtgccgctggcggtattggacaggcgctggccctgttactaaaaacacaattacctgttggttcaaaactatcactttatgatattgcaccggtaacacctggagttgcagtagacttaagtcatattcctactgacgttgaagttgaaggtttcgcaggtcaagatccaactgctgctctcgaaggcgctgatgtggtgttgatctcagccggtgttgcacgtaagccgggtatggatcgctctgatctattcaacatcaatgcaggcatcgtaagaaacctggttgaaaagtgcgcggcaacgtctcccaaggccttgattggcattattactaacccagtcaataccacggtcgctatcgctgcggaagtactaaagaaagccggtgtatacgataaaaaccgtttgttcgggatcacaacgttagatgtgcttcgttctgagacctttatcgccgaagctaagggtgtgaaggttgctgatgtcaaagttaatgtgatcggtggccatagcggcgtgactattttaccgctgttatcgcaagttgaaggcgtaagctttagcgaagaagaagctgcggcaatgaccaagcgtattcagaatgcgggtactgaagtcgtcgaagctaaagccggtggcggcagcgcaaccttgtctatgggtcaagcggcatgtcgtttcggcctatcattggttcgcggtctacaaggtgagtcaaatgtgattgagtgtgcttatatcgatggtggcagtgagcatgcagcattctttgctcaacctgtcttgcttggcaaaaatggcgtagagaaagtactgccttatggcaaactcagtgaatttgaagtcaatgcccgtgatgccatgctcgatactctgaaagcagatattaagttaggcgttgatttcgttaagtaa

SEQ ID NO: 45177 - protein, 311 aa, Shewanella sp
MKVCVLGAAGGIGQALALLLKTQLPVGSKLSLYDIAPVTPGVAVDLSHIPTDVEVEGFAGQDPTAALEGADVVLISAGVARKPGMDRSDLFNINAGIVRNLVEKCAATSPKALIGIITNPVNTTVAIAAEVLKKAGVYDKNRLFGITTLDVLRSETFIAEAKGVKVADVKVNVIGGHSGVTILPLLSQVEGVSFSEEEAAAMTKRIQNAGTEVVEAKAGGGSATLSMGQAACRFGLSLVRGLQGESNVIECAYIDGGSEHAAFFAQPVLLGKNGVEKVLPYGKLSEFEVNARDAMLDTLKADIKLGVDFVK

SEQ ID NO: 45178 - DNA, 939 bp, Moritella sp
  CDS (1)..(939): transl_table=11
atgaaagtcgctgtattaggtgctgctggcggtatcggtcaagctttagcccttcttttgaaaactcaattacctgctggttctgaactgtcgctatatgatattgcgccagttacaccgggtgttgctgttgatttaagtcatatccctacagacgttactattgctggctttgcgggtacagatccaacggatgcactgattggtgcagatgtggtgcttatctcggcgggtgttgctcgtaaaccgggtatggatcgttcagatttatttaatatcaatgcgggtattatcaaaaatctagcgagtaaatgtgcggaagtatgcccaacggcatgtatcggtattattactaatcccgtgaacaccacagtgccaattgcggccgaagtacttaagcaagcgggtgtgtacgacaaacgtaaactattcggtattaccacgctggatgttattcgttctgaaactttcgttagtgcgctgaaaggcattccacttgctgacgttacagtacccgttatcggtggtcactcaggtgtaacaattctgccgctactttctcaagttaaaggcgttgaatttacggctgaagaaatagcgacgctcacgccacgcattcaaaacgccggtaccgaagtggttgaagctaaagctggtggcggttctgcgacactttctatgggtcatgccgctgcacgtttcggtctctctctagtgcgcgcactacaaggtgaaaaaggtattgttgagtgtacttatgttgacggtggctctgagcacgcgaaattcttcgcccaaccggtattactcggtaaaaacggcgttgaagaagtactcgcatacggtgacttaagcgaatttgaaaccaaggcacgcgatgctatgttagaagaactaaaagcgaatatcaccttaggtgaagaattcgttgctggttaa

SEQ ID NO: 45179 - protein, 312 aa, Moritella sp
MKVAVLGAAGGIGQALALLLKTQLPAGSELSLYDIAPVTPGVAVDLSHIPTDVTIAGFAGTDPTDALIGADVVLISAGVARKPGMDRSDLFNINAGIIKNLASKCAEVCPTACIGIITNPVNTTVPIAAEVLKQAGVYDKRKLFGITTLDVIRSETFVSALKGIPLADVTVPVIGGHSGVTILPLLSQVKGVEFTAEEIATLTPRIQNAGTEVVEAKAGGGSATLSMGHAAARFGLSLVRALQGEKGIVECTYVDGGSEHAKFFAQPVLLGKNGVEEVLAYGDLSEFETKARDAMLEELKANITLGEEFVAG

SEQ ID NO: 45180 - DNA, 939 bp, Moritella sp
  CDS (1)..(939): transl_table=11
atgaaagtcgctgtattaggtgctgctggtggtatcggtcaagctttagcccttcttttgaaaactcaattacctgcgggttctgaactgtcgctatatgatatcgcgccagttacaccgggtgttgctgttgatttaagtcatatccctacagacgttactattactggttttgcgggtacagatccaacggatgcactagttggtgctgacgtggtacttatctcggcgggtgttgctcgtaaaccaggtatggaccgttcagatctattcaatatcaatgctggcattatcaaaaatctagcgagtaaatgtgcggaagtatgcccaacggcatgtatcggtattattactaatccagttaacacgacggtgccaattgcggccgaagtacttaagcaagcgggtgtgtacgacaaacgtaaactattcggtatcactactctggatgttattcgttctgagactttcgtcagtgcgcttaaaggcatttcacttgctgacgttgcagtacccgttatcggtggtcactccggtgcaacaattctgccgctactttctcaagttaaaggtgttgaatttacggctgaagaaattgcgacactcacgacccgcattcaaaacgccggtactgaagtggttgaagctaaagcgggtggcggttctgcgacactttctatgggtcatgccgctgcacgtttcggtctctctctggtgcgcgcactacaaggagaaaaaggtattgttgagtgtacttatgttgacggtggctctgagcacgcgacatccttcgcccaaccggtattactcggtaaaaacggcgttgaagaagtactcgcatacggtgacttaagcgaatttgaaaccaacgcacgcgatgctatgttagaagaactaaaagcgaatatcaccttaggtaaagaattcgttgctggttaa

SEQ ID NO: 45181 - protein, 312 aa, Moritella sp
MKVAVLGAAGGIGQALALLLKTQLPAGSELSLYDIAPVTPGVAVDLSHIPTDVTITGFAGTDPTDALVGADVVLISAGVARKPGMDRSDLFNINAGIIKNLASKCAEVCPTACIGIITNPVNTTVPIAAEVLKQAGVYDKRKLFGITTLDVIRSETFVSALKGISLADVAVPVIGGHSGATILPLLSQVKGVEFTAEEIATLTTRIQNAGTEVVEAKAGGGSATLSMGHAAARFGLSLVRALQGEKGIVECTYVDGGSEHATSFAQPVLLGKNGVEEVLAYGDLSEFETNARDAMLEELKANITLGKEFVAG

SEQ ID NO: 45182 - DNA, 939 bp, Moritella sp
  CDS (1)..(939): transl_table=11
atgaaagtcgctgtattaggtgctgctggtggtatcggtcaagctttagcccttcttttgaaaactcaattacctgcgggttctgaactgtcgctatatgatatcgcgccagttacaccgggtgttgctgttgatttaagtcatatccctacagacgttactattactggttttgcgggtacagatccaacggatgcactagttggtgctgacgtggtacttatctcggcgggtgttgctcgtaaaccaggtatggaccgttcagatctattcaatatcaatgctggcattatcaaaaatctagcgagtaaatgtgcggaagtatgcccaacggcatgtatcggtattattactaatccagttaacacgacggtgccaattgcggccgaagtacttaagcaagcgggtgtgtacgacaaacgtaaactattcggtatcactactctggatgttattcgttctgagactttcgtcagtgcgcttaaaggcatttcacttgctgacgttgcagtacccgttatcggtggtcactccggtgcaacaattctgccgctactttctcaagttaaaggtgttgaatttacggctgaagaaattgcgacactcacgacccgcattcaaaacgccggtactgaagtggttgaagctaaagcgggtggcggttctgcgacactttctatgggtcatgccgctgcacgtttcggtctctctctggtgcgcgcactacaaggagaaaaaggtattgttgagtgtacttatgttgacggtggctctgagcacgcgacattcttcgcccaaccggtattactcggtaaaaacggcgttgaagaagtactcgcatacggtgacttaagcgaatttgaaaccaacgcacgcgatgctatgttagaagaactaaaagcgaatatcaccttaggtgaagaattcgttgctggttaa

SEQ ID NO: 45183 - protein, 312 aa, Moritella sp
MKVAVLGAAGGIGQALALLLKTQLPAGSELSLYDIAPVTPGVAVDLSHIPTDVTITGFAGTDPTDALVGADVVLISAGVARKPGMDRSDLFNINAGIIKNLASKCAEVCPTACIGIITNPVNTTVPIAAEVLKQAGVYDKRKLFGITTLDVIRSETFVSALKGISLADVAVPVIGGHSGATILPLLSQVKGVEFTAEEIATLTTRIQNAGTEVVEAKAGGGSATLSMGHAAARFGLSLVRALQGEKGIVECTYVDGGSEHATFFAQPVLLGKNGVEEVLAYGDLSEFETNARDAMLEELKANITLGEEFVAG

SEQ ID NO: 45184 - DNA, 951 bp, Toxoplasma gondii
  CDS (1)..(951)
atgtctcgaagaaaaatcggcctcatcggcggcggcaacatcggcgccacgcttgcccttctctccgctgtcaaggaactcggcgacgtcgtcatgttcgacgtcgtccaggacctcccgcaaggaaaatgcctcgatctgtaccagttgactccgatctctggagttgacgttcgcttcgagggctcgaacgactacagcgtcctcaaggatgcggatgtcatcatcgtcactgcaggggtgcctcggaagccaggtatgtctcgcgacgacctgctggcgattaacgcgaaaatcatgggccaagttggagaagccatcaagcagtactgccccaacgcattcgtcatttgcatcacgaatccactcgatgtgatggtctacatcctccgcgaaaaatgcggcttgcctccccacaaagtttgcggcatggccggcgtcctcgactcagctcggcttcgcacgtttctctcggagcgtctcaacgtctccgtcgatgacatccacgccctcgtcatgggtggccatggagacaccatggtgcccctccctcgattcaccactgtgggaggcatccccctgcctgagctggtgaagatgggtatgatttctcaacaagaagtcgacgatatcgtccaacgcactcgcaatggaggtggagaaatcgtctcattgctgaagacgggctctgctttcttcgctcccgcggctgcgggcgtcttgatggccgaggcgtacctgaaggaccgcaaacgcgtgctgccttgtgccgcctatttgaacggagagtacggtgtcaaggacatgtatgtgggcgtgccgtgcgtgatcggcgcgggcggcgtcgagaagattgtcgaattggacttgacgcctgaggagaagaagatgttcgagcgctcggttgaaagtgtgaagacgcttctcgccgctgctccaaagtcagcctga

SEQ ID NO: 45185 - protein, 316 aa, Toxoplasma gondii
MSRRKIGLIGGGNIGATLALLSAVKELGDVVMFDVVQDLPQGKCLDLYQLTPISGVDVRFEGSNDYSVLKDADVIIVTAGVPRKPGMSRDDLLAINAKIMGQVGEAIKQYCPNAFVICITNPLDVMVYILREKCGLPPHKVCGMAGVLDSARLRTFLSERLNVSVDDIHALVMGGHGDTMVPLPRFTTVGGIPLPELVKMGMISQQEVDDIVQRTRNGGGEIVSLLKTGSAFFAPAAAGVLMAEAYLKDRKRVLPCAAYLNGEYGVKDMYVGVPCVIGAGGVEKIVELDLTPEEKKMFERSVESVKTLLAAAPKSA

SEQ ID NO: 45186 - DNA, 1017 bp, Homo sapiens
  CDS (1)..(1017)
atgctctccgccctcgtccggcctgtcagcgctgctctccgccgcagcttcagcacctcggcccagaacaatgctaaagtagctgtgctaggggcctctggaggcatcgggcagccactttcacttctcctgaagaacagccccttggtgagccgcctgaccctctatgatatcgcgcacacacccggagtggccgcagatctgagccacatcgagaccaaagccgctgtgaaaggctacctcggacctgaacagctgcctgactgcctgaaaggttgtgatgtggtagttattccggctggagtccccagaaagccaggcatgacccgggacgacctgttcaacaccaatgccacgattgtggccaccctgaccgctgcctgtgcccagcactgcccggaagccatgatctgcgtcattgccaatccggttaattccaccatccccatcacagcagaagttttcaagaagcatggagtgtacaaccccaacaaaatcttcggcgtgacgaccctggacatcgtcagagccaacacctttgttgcagagctgaagggtttggatccagctcgagtcaacgtccctgtcattggtggccatgctgggaagaccatcatccccctgatctctcagtgcacccccaaggtggactttccccaggaccagctgacagcactcactgggcggatccaggaggccggcacggaggtggtcaaggctaaagccggagcaggctctgccaccctctccatggcgtatgccggcgcccgctttgtcttctcccttgtggatgcaatgaatggaaaggaaggtgttgtggaatgttccttcgttaagtcacaggaaacggaatgtacctacttctccacaccgctgctgcttgggaaaaagggcatcgagaagaacctgggcatcggcaaagtctcctcttttgaggagaagatgatctcggatgccatccccgagctgaaggcctccatcaagaagggggaagatttcgtgaagaccctgaagtga

SEQ ID NO: 45187 - protein, 338 aa, Homo sapiens [sequence omitted]

SEQ ID NO: 45188 - DNA, 1017 bp, Xenopus laevis
  CDS (1)..(1017)
atgttctctcgcatcgccagaccagctgctcatgggctcatccggggtctttccaccactgcacaggccaatgccagggtggcggtgcttggtgcttcaggaggaattgggcagccattatccctgctgctaaagaacagtcctttgattagcaaccttgctttgtatgatattgcccacacaccaggtgtagcagctgatctgagccatattgagacccgagcaaaggttacaggttatcttggagcagagcaacttccagaaagtctcaaaggtgccgatgttgttgttataccagctggtgtgccaaggaaaccaggaatgacccgtgatgacctgtttaatactaatgcctccattgtggccaccctaactgaagcttgtgcaaaacattgcccagaagccatgatctgtatcattgctaaccctgtaaattctaccatcccaatcacatcagaagtgtttaaaaaacatggtgtttacaaccccaaccgcatttttggtgtgaccacattggatattgtaagagccaatacctttgttgctgagcttaagggcttagacccagcacgtgtgaatgtgcccgtgattggtgggcatgctggcaaaacaattattccccttatttctcagagcacaccaaaagtagagtttccccaagaccagctggcagtactgattggccgaattcaagaggctggtacagaggttgtcaaggctaaagcaggagcaggatcagccactctttccatggcatatgctggagcccgatttgtcttctcactcctggatgctatgaatggaaaggagggtgtaattgagtgctcatttgtcaggtctgaggaaactgagagcccatacttctcaactccactgctgctggggaaaaatggcatagagaagaatctgggactaggcaagctgactgcttatgaagagaaactgatttcagaagccatggcagagctaaaaggctccattaaaaagggtgaagaattcatcaagaatcggaagtga

SEQ ID NO: 45189 - protein, 338 aa, Xenopus laevis
MFSRIARPAAHGLIRGLSTTAQANARVAVLGASGGIGQPLSLLLKNSPLISNLALYDIAHTPGVAADLSHIETRAKVTGYLGAEQLPESLKGADVVVIPAGVPRKPGMTRDDLFNTNASIVATLTEACAKHCPEAMICIIANPVNSTIPITSEVFKKHGVYNPNRIFGVTTLDIVRANTFVAELKGLDPARVNVPVIGGHAGKTIIPLISQSTPKVEFPQDQLAVLIGRIQEAGTEVVKAKAGAGSATLSMAYAGARFVFSLLDAMNGKEGVIECSFVRSEETESPYFSTPLLLGKNGIEKNLGLGKLTAYEEKLISEAMAELKGSIKKGEEFIKNRK

SEQ ID NO: 45190 - DNA, 1005 bp, Saccharomyces cerevisiae
  CDS (1)..(1005)
atgttgtcaagagtagctaaacgtgcgttttcctctacagttgccaacccttataaagtgactgttttgggtgcaggcggtggtattggacaaccattgtctttgcttctaaagcttaaccataaagtcacggacttaagactgtacgacctaaagggcgcaaaaggtgttgccaccgatttgtctcatattccaacaaactccgtggtcaaggggtttactccagaagagccagacggattgaacaacgctttaaaggacacagacatggttttaattcctgctggtgtgcccagaaagcctggtatgacacgtgatgacttgttcgccatcaacgcaagcatcgttcgcgatttggcagcagcaaccgccgaatccgctcccaatgctgccattctggtcatttccaacccagtcaattctaccgttccaattgtcgcccaagtcttgaaaaacaagggtgtttacaacccaaagaaattgttcggtgtgactaccttggactctattagagccgccagattcatctcagaagtcgagaacaccgatccaactcaggaaagggttaacgtcatcggtggacattctggtattaccatcatcccattgatttcgcaaacaaaccataagttgatgtctgatgacaagagacacgagttgattcacagaatacagtttggtggtgacgaagtcgtcaaagcaaagaatggtgctggctctgctacgttgtcaatggcccatgctggtgctaaattcgctaacgctgttttgtccggtttcaaaggcgaaagagacgtcatcgagccttccttcgtggactctcccttgttcaaatccgaaggcatcgaattctttgcatctccggtcactttgggcccagatggtattgaaaagatccatccaataggtgagttattttcagaagaagaagaaatgttacaaaaatgtaaagaaactttgaagaagaatatcgaaaagggtgtcaactttgttgctagtaaatag

SEQ ID NO: 45191 - protein, 334 aa, Saccharomyces cerevisiae
MLSRVAKRAFSSTVANPYKVTVLGAGGGIGQPLSLLLKLNHKVTDLRLYDLKGAKGVATDLSHIPTNSVVKGFTPEEPDGLNNALKDTDMVLIPAGVPRKPGMTRDDLFAINASIVRDLAAATAESAPNAAILVISNPVNSTVPIVAQVLKNKGVYNPKKLFGVTTLDSIRAARFISEVENTDPTQERVNVIGGHSGITIIPLISQTNHKLMSDDKRHELIHRIQFGGDEVVKAKNGAGSATLSMAHAGAKFANAVLSGFKGERDVIEPSFVDSPLFKSEGIEFFASPVTLGPDGIEKIHPIGELFSEEEEMLQKCKETLKKNIEKGVNFVASK

SEQ ID NO: 45192 - DNA, 951 bp, Cryptosporidium parvum
  CDS (1)..(951)
atgagaaagaaaatttcaattattggagctggacaaattggctcaactatagcacttcttttaggacaaaaagatttaggagatgtttatatgtttgatattattgagggagttccacaaggaaaagctttagatttgaatcactgcatggcattgattgggtcaccagcgaaaatatttggtgaaaataactatgagtatttacaaaactctgatgtcgtcataataacagctggagttcctagaaaaccaaatatgacacgttcagatttacttactgttaatgcaaagattgttggttcagttgcagaaaatgtcggtaaatactgccctaatgcatttgtaatatgtattactaatcctctagatgcgatggtttactactttaaagaaaagagtggaataccagctaataaagtttgtggtatgtcaggtgtgcttgattccgctaggttcagatgtaatttaagtcgagcattaggtgtaaagccatctgatgtatcagccattgttgtaggtggccatggagatgagatgataccattaactagttcagttacaattggtggaattctgcttagtgattttgttgagcaaggaaaaattactcattcacaaatcaatgaaattattaagaagacagcatttggtggcggtgaaattgttgaacttttaaaaactggctcagcattctatgctccagccgcttcagctgtagctatggctcaagcttatttgaaagattctaaatcagtattagtttgttcaacatatcttactggccagtataatgttaacaatctttttgtcggtgttcctgttgttattggaaaaaatggtattgaagacgttgttattgtaaatttatctgatgacgaaaaatcattattttctaaatcagttgaatctattcaaaaccttgtccaagacttaaaaagccttaatctttaa

SEQ ID NO: 45193 - protein, 316 aa, Cryptosporidium parvum
MRKKISIIGAGQIGSTIALLLGQKDLGDVYMFDIIEGVPQGKALDLNHCMALIGSPAKIFGENNYEYLQNSDVVIITAGVPRKPNMTRSDLLTVNAKIVGSVAENVGKYCPNAFVICITNPLDAMVYYFKEKSGIPANKVCGMSGVLDSARFRCNLSRALGVKPSDVSAIVVGGHGDEMIPLTSSVTIGGILLSDFVEQGKITHSQINEIIKKTAFGGGEIVELLKTGSAFYAPAASAVAMAQAYLKDSKSVLVCSTYLTGQYNVNNLFVGVPVVIGKNGIEDVVIVNLSDDEKSLFSKSVESIQNLVQDLKSLNL

SEQ ID NO: 45194 - DNA, 1023 bp, Branchiostoma belcheri tsingtaunese
  CDS (1)..(1023)
atgttttccaggctagctcgcccccaaaacctcgccgccctggcaggggcactgaggaacttctctaccaccacagcatgtaacaacaaagttgcagtgctcggtgcctctggtggaatcggccaaccgctgagcctcttgctgaagcacaatgcagccatcacccagttggctctgtacgatatcgcacacacgcccggcgtggcctgcgatctcagccacatcgagaccgggtcagaggtcaagggttacctgggagatgcggagctgggggcgtgtctggaaggatgcgacgttgtggtgattcctgctggagtccccaggaagcctggtatgaccagagatgacctgttcaacaccaatgcctccatcgtacgagacctggtgaaggcctgtacccagcactgtcctactgccttcctcctcctcgtcactaaccctgtaaactccacagtgcccatcgcctccgaggtgtgcaaggctgctggtacctacgaccccggcagggtcattggggtcacgaccttggatgtggtcagagctaacacctttgtggctaacctgaagggtctgaacccagcagaggttaatgttccagtggtcggaggtcatgctggcaagaccatcatccctctcatttcacaggctactccatctgtggagtttgatccagagacactggacaacctgaccaagagaatccaggatgccggcactgaggtcgtcaatgctaaggctggagctgggtcagctacactgtccatggcatatgctggggccaggtttaccaactcactccttgctgcattgaatgggaaggaaggagtgattgaatgtggtttcatcaagtcctcggagactgagtcttcctacttctccactcctcttctcctcgggaaaaatggcattgagaagaatctgggtctggggaagctgagcgactttgagacgaagctggtggaagacgccatggatgaactcaagggttccatcgctaagggagagaaatttgcctcacaataa

SEQ ID NO: 45195 - protein, 340 aa, Branchiostoma belcheri tsingtaunese
MFSRLARPQNLAALAGALRNFSTTTACNNKVAVLGASGGIGQPLSLLLKHNAAITQLALYDIAHTPGVACDLSHIETGSEVKGYLGDAELGACLEGCDVVVIPAGVPRKPGMTRDDLFNTNASIVRDLVKACTQHCPTAFLLLVTNPVNSTVPIASEVCKAAGTYDPGRVIGVTTLDVVRANTFVANLKGLNPAEVNVPVVGGHAGKTIIPLISQATPSVEFDPETLDNLTKRIQDAGTEVVNAKAGAGSATLSMAYAGARFTNSLLAALNGKEGVIECGFIKSSETESSYFSTPLLLGKNGIEKNLGLGKLSDFETKLVEDAMDELKGSIAKGEKFASQ

SEQ ID NO: 45196 - DNA, 1017 bp, Echinococcus granulosus
  CDS (1)..(1017)
atgaattgtctgcgcaagattggctttgtcttgggacgctcagctaaactcttttccacctccacccaaaatccacagaagatcgcgattttgggtgcaagtggcggcattggccaaccactggcactcctcatgaaacaatccctattcgtttcggaaatagccctctacgatatcgcgaatgcagcaggagttgctgcggatctgagtcacatagagactcgtgctaaggtgactggtcacaccggacccgacaacctgaaggcggcgctggacggtgcgaaggtggtaatcattcctgcgggtgtgcctcgaaagcctggcatgactcgggatgacctcttttcgatgaatgcatcggttgtggcggatctttccagagcctgtgggaagtactgttctgatgcgatgatttgcatcatcacgaacccggtgaacagcacggtgccgatagcggcggagatactgaagaaagagggtttgtacaacccgaggagactgttcggtgtcactactctggacatcacccgatcgaataccttcatcgctgaggcgaagggtttggacgtttcgaaggtgtcctgtcccgtcatcggtggtcattcaggcaacactatagtcccagtactctcccaatgtactccatctgtaaacttcgctcagaaagcacgtgaggaattggtggctcgaatacaaaacgcaggcactgaagtggtcaatgcgaaggctggcgcgggatcggcaaccctgtcaatggcctatgcgggggcacttttcgccaactccctgttgcatgcaatgaaggggcacgcggacatagtggagtgcgcgttcgtggagtgtgatgtggcggagacggagttctttgcctcacctgtactccttgggccgaacggtgtggagaaggtgtttggtgctggcaagctgaatgagtatgagattgagttggtgaagaaggcaatgccagaactgaagaagagcatccagaaaggcaaggagtttgcagccgcctactag

SEQ ID NO: 45197 - protein, 338 aa, Echinococcus granulosus
MNCLRKIGFVLGRSAKLFSTSTQNPQKIAILGASGGIGQPLALLMKQSLFVSEIALYDIANAAGVAADLSHIETRAKVTGHTGPDNLKAALDGAKVVIIPAGVPRKPGMTRDDLFSMNASVVADLSRACGKYCSDAMICIITNPVNSTVPIAAEILKKEGLYNPRRLFGVTTLDITRSNTFIAEAKGLDVSKVSCPVIGGHSGNTIVPVLSQCTPSVNFAQKAREELVARIQNAGTEVVNAKAGAGSATLSMAYAGALFANSLLHAMKGHADIVECAFVECDVAETEFFASPVLLGPNGVEKVFGAGKLNEYEIELVKKAMPELKKSIQKGKEFAAAY

SEQ ID NO: 45198 - DNA, 1023 bp, Paracoccidioides brasiliensis
  CDS (1)..(1023)
atgtttgccgcccgcagagctttcggctttgcccagcgacgggccttctccgtctctgcgccccagtcttccaaagtggccattctaggtgccgcaggtggtattgggcagtcattgtctctgctgatgaagctcagtcctcgtgtcactcagctggctctgtacgatatccggggtggcccaggtgttgccgccgatcttagccatatcaacaccaacagcactgttacgggctatgatcctaccccctccggtctccgggacgctctcaaggactctgaaattgtcctcattcctgctggtgtgcctcgcaagcctggcatgacccgtgacgatctttttaacaccaacgcttcaattgtccgtgacttggcaaaggctgctgccgatgcctctcctaacgccaacatcctcgtcatcgccaaccccgtcaactccaccgtcccaattgtcgcagaggtcttcaagtccaagaatgtctacaaccccaagcgccttttcggtgtcaccaccctggacgtcatccgtgcctcccgcttcatctcccaagtcaaaggcaccgatccaaaggatgagaaagtcaccgtcgttggcggccactccggcgtcaccatcgtacccctgatctcccaatccaaccaccctgacatctccggcgagaaactcgaaaccctcgtcaaccgcatccagttcggtggtgacgaagtcgtcaaggccaaggacggtgctggttccgccaccctctccatggccatggctggtgcccggttcgctgagagccttctgaaggcctcccagggtgagaagggagtcatcgagcccactttcgttgacagtcccctctacaaggaccagggcatcgacttcttcgcgtcccgtgtcgagcttggacccaatggtgtcgagaagatcctccccgtcggcaaggtctctgagtacgagcagaagctcctcgatgcctgcctcgttgatctgaagaagaacatcgccaagggtgtcgagttcgtcaagacgaacccatga

SEQ ID NO: 45199 - protein, 340 aa, Paracoccidioides brasiliensis
MFAARRAFGFAQRRAFSVSAPQSSKVAILGAAGGIGQSLSLLMKLSPRVTQLALYDIRGGPGVAADLSHINTNSTVTGYDPTPSGLRDALKDSEIVLIPAGVPRKPGMTRDDLFNTNASIVRDLAKAAADASPNANILVIANPVNSTVPIVAEVFKSKNVYNPKRLFGVTTLDVIRASRFISQVKGTDPKDEKVTVVGGHSGVTIVPLISQSNHPDISGEKLETLVNRIQFGGDEVVKAKDGAGSATLSMAMAGARFAESLLKASQGEKGVIEPTFVDSPLYKDQGIDFFASRVELGPNGVEKILPVGKVSEYEQKLLDACLVDLKKNIAKGVEFVKTNP

SEQ ID NO: 45200 - DNA, 960 bp, Francisella tularensis subsp
  CDS (1)..(960): transl_table=11
atggctagaaaaaaaataacacttgttggtgctggtaatattggtggtacactagctcacttagcacttataaaacaattaggtgatgtagtcctttttgatatagctcagggcatgcctaatggcaaagcacttgatttactacaaacttgccctatcgagggagttgattttaaagtcaggggtacaaatgattacaaagatttagaaaattctgatgttgttattgtaactgctggtgttccgagaaagcctggcatgtctcgtgatgacctacttggtattaatatcaaagtaatgcaaacagtcggagaaggtatcaaacataactgtcctaatgctttcgtaatatgtatcacaaatccactagatattatggtaaatatgttacaaaaattctcaggcgtaccagataacaaaatcgttggtatggctggtgttttagattctgctagatttagaacatttttagcagatgaactaaatgtatcagtacaacaagtacaagcatatgtaatgggcggtcatggcgatactatggtccctctaactaaaatgtcaaatgttgcaggtgtgtcgttagagcagctagttaaagaaggtaaacttaaacaagagcgtttagatgctatagtatcgagaactagaagtggtggtggcgaaattgttgctttacttaaaacaggttcagcatattatgcaccagctgctgcaggtattcaaatggctgaaagcttcttaaaagataaaaagatgattttaccttgtgctgcaaaagtaaaagctggtatgtatggccttgatgaagatctatttgttggtgtaccaactgagatttctgcaaatggtgtcagacctattgaagtagagatttctgataaagaaagagaacaattacaagtatctataaacgctgtaaaagatcttaataaagcagctgctgaaattttagcaaaataa

SEQ ID NO: 45201 - protein, 319 aa, Francisella tularensis subsp
MARKKITLVGAGNIGGTLAHLALIKQLGDVVLFDIAQGMPNGKALDLLQTCPIEGVDFKVRGTNDYKDLENSDVVIVTAGVPRKPGMSRDDLLGINIKVMQTVGEGIKHNCPNAFVICITNPLDIMVNMLQKFSGVPDNKIVGMAGVLDSARFRTFLADELNVSVQQVQAYVMGGHGDTMVPLTKMSNVAGVSLEQLVKEGKLKQERLDAIVSRTRSGGGEIVALLKTGSAYYAPAAAGIQMAESFLKDKKMILPCAAKVKAGMYGLDEDLFVGVPTEISANGVRPIEVEISDKEREQLQVSINAVKDLNKAAAEILAK

SEQ ID NO: 45202 - DNA, 1035 bp, Solanum tuberosum
  CDS (1)..(1035)
atgaggacatccatgttgagaactctggctcgcagaacctcaaccgccggaacacgccggggattcgcatcggagtctgctccggacaggaaagttgctattttaggtgcagctggagggatcgggcagccgctgtcacttctcatgaaactgaatcctttagtttccagacttgcactctacgatattgctggaactcctggtgttgccgctgatgtcagccacatcaacaccagatctgagattttgggttatgcaggagaagaacagctagggaaggctttggagggagctgatgttgtcattattccagctggtgtgccacgaaagcctggtatgacccgtgatgatctgttcaacattaacgctggtattgttaagtctctttgcacagctattgcaaagtattgccctcatgcacttgtcaatgtgatcagcaaccccgtgaattccactgtcccaattgcatctgaggtgttcaagaaggctggaacctatgatgagaagagactctttggagtgaccacacttgatgttgttagggcaaagactttctatgctggaaaagctaaagttaatgttgctgatgtcattgtccccgttgttggtggtcacgctggcgtaactatcctcccgttattttcccaagccactccaagtgcaaatttgtcaagtgaagaaattgaggcactcaccaagcgcacccaagatggtggcactgaagttgtggaggccaaggctggaaagggttcagccaccctctcgatggcctatgctggtgccatctttgcagattgcttgcttgaatgggacttgaatggggttccaggatgtttgtacagttgtcattcgtacagtcaacttgtgacagaacctgccatctctttgcatccaaggttgagattcgggaaaaatggcgtggaagaagtcttgggattaggcgcactttcagactacgagaaagaaggacttgaagctcttaaaccagagctgaaatcgtccattgagaaaggaatcaaatttgccaatgcctaa

SEQ ID NO: 45203 - protein, 344 aa, Solanum tuberosum
MRTSMLRTLARRTSTAGTRRGFASESAPDRKVAILGAAGGIGQPLSLLMKLNPLVSRLALYDIAGTPGVAADVSHINTRSEILGYAGEEQLGKALEGADVVIIPAGVPRKPGMTRDDLFNINAGIVKSLCTAIAKYCPHALVNVISNPVNSTVPIASEVFKKAGTYDEKRLFGVTTLDVVRAKTFYAGKAKVNVADVIVPVVGGHAGVTILPLFSQATPSANLSSEEIEALTKRTQDGGTEVVEAKAGKGSATLSMAYAGAIFADCLLEWDLNGVPGCLYSCHSYSQLVTEPAISLHPRLRFGKNGVEEVLGLGALSDYEKEGLEALKPELKSSIEKGIKFANA

SEQ ID NO: 45204 - DNA, 1041 bp, Solanum tuberosum
  CDS (1)..(1041)
atgaggacctccatgttgaaatccatcgtccgccggagctccactgccggagaatcctatgtatcccgccgtggattcgcatcgggatccgcaccagagaggaaagttgcagttttgggggcagccggagggattggacagcctttatctcttctaatgaagcttaaccctttagtatccagcctttcactctacgatatcgccggcactcccggtgttgccgccgatgttagtcacatcaacaccagatctgaggttgtcggttttgcaggagaagagcagctagggaaggctctggaaggagctgatatagttatcattcctgctggtgtgccccgaaagcctggtatgacccgagatgatctgttcaacattaatgcgggtattgttaaatctctttgcacggccattgctaagtactgccccaatgctctggtcaatatgataagcaacccagttaattccactgtcccaattgctgctgaggtgtttaagaaggctggaacttatgatgaaaagaagctctttggagttaccatgcttgatgtggttagggccaagacattttatgctggaaaagctaaagtaaatgttgctgaggtcaatcttccggtagttggtggtcatgctggcataactatcctcccattattttctcaagccactccaaaggcaaatctgtcaaatgaggaaattgttgcactcacaaagcgaacacaagatggtggcacagaagtcgtggaggccaaggctggaaagggttcagccaccctctcaatggcctatgctggggctatttttgccgatgcttgcttgaagggtttgaatggagttcccgatgttgttgaatgtgcttttgtgcagtccaatgttaccgagcttcccttctttgcatccaaggtgagacttgggaaaaatggagtggaggaagtcctagggttgggtccacttaacgagtatgagaagcaaggacttgaggctctgaagccagagctgctctcctccattgaaaagggaatcaagtttgccaaagagaactaa

SEQ ID NO: 45205 - protein, 346 aa, Solanum tuberosum
MRTSMLKSIVRRSSTAGESYVSRRGFASGSAPERKVAVLGAAGGIGQPLSLLMKLNPLVSSLSLYDIAGTPGVAADVSHINTRSEVVGFAGEEQLGKALEGADIVIIPAGVPRKPGMTRDDLFNINAGIVKSLCTAIAKYCPNALVNMISNPVNSTVPIAAEVFKKAGTYDEKKLFGVTMLDVVRAKTFYAGKAKVNVAEVNLPVVGGHAGITILPLFSQATPKANLSNEEIVALTKRTQDGGTEVVEAKAGKGSATLSMAYAGAIFADACLKGLNGVPDVVECAFVQSNVTELPFFASKVRLGKNGVEEVLGLGPLNEYEKQGLEALKPELLSSIEKGIKFAKEN

SEQ ID NO: 45206 - DNA, 1041 bp, Solanum tuberosum
  CDS (1)..(1041)
atgaggacctccatgttgaaatccatcgtccgccggagctccactgccggagcatcctatgtatcccgccgtggattcgcatcgggatccgcaccagagaggaaagttgcagttttgggggcagccggaggaattggacagcctttatctcttccaatgaagcttaaccctttagtatccagcctttcactctacgatatcgccggcactcccggtgttgccgccgatgttagtcacatcaacaccagatctgaggttgtcggttttgcaggagaagagcagctagggaaggctctggaaggagctgatatagttatcattcctgctggtgtgccccgaaagcctggtatgacccgagatgatctgttcaacattaatgcgggtattgttaaatctctttgcacggccattgctaagtactgccccaatgctctggtcaatatgataagcaacccagtgaattccactgtcccaattgctgctgaggtgtttaagaaggctggaacttatgatgaaaagaagctctttggagttaccatgcttgatgtggttagggccaagacattttatgctggaaaagctaaagtaaatgttgctgaggtcaatcttccggtagttggtggtcatgctggcataactatcctcccattattttctcaagccactccaaaggcaaatctgtcaaatgaggaaattgttgcactcacaaagcgaacacaagatggtggcacagaagtcgtggaggccaaggctggaaagggttcagccaccctctcaatggcctatgctggggctatttttgccgatgcttgcttgaagggtttgaatggagttcccgatgttgttgaatgtgcttttgtgcagtccaatgttaccgagcttcccttctttgcatccaaggtgagacttgggaaaaatggagtggaggaagtccttgggttgggtccacttaacgagtatgagaagcaaggacttgaggctctgaagccagagctgctctcctccattgaaaagggaatcaagtttgccaaagagaactaa

SEQ ID NO: 45207 - protein, 346 aa, Solanum tuberosum
MRTSMLKSIVRRSSTAGASYVSRRGFASGSAPERKVAVLGAAGGIGQPLSLPMKLNPLVSSLSLYDIAGTPGVAADVSHINTRSEVVGFAGEEQLGKALEGADIVIIPAGVPRKPGMTRDDLFNINAGIVKSLCTAIAKYCPNALVNMISNPVNSTVPIAAEVFKKAGTYDEKKLFGVTMLDVVRAKTFYAGKAKVNVAEVNLPVVGGHAGITILPLFSQATPKANLSNEEIVALTKRTQDGGTEVVEAKAGKGSATLSMAYAGAIFADACLKGLNGVPDVVECAFVQSNVTELPFFASKVRLGKNGVEEVLGLGPLNEYEKQGLEALKPELLSSIEKGIKFAKEN

SEQ ID NO: 45208 - DNA, 1026 bp, Arabidopsis thaliana
  CDS (1)..(1026)
atgttcagatctatgctcgtccgatcttctgcctccgcgaagcaggcggctatccgccgtagcttctcctccggttccgtccccgagcgtaaagtcgccatccttggtgccgccggtggaattggtcagcctcttgctctcctcatgaagcttaatcctcttgtctcttctctctccctctacgatatcgctaacactcccggagttgctgctgatgtcggtcacatcaacaccagatctgaggttgttggatacatgggcgatgataacttggccaaagctctagaaggagctgatctcgttatcattccagctggtgtgccaaggaagcctggtatgacccgtgacgatcttttcaacattaatgctggaattgtcaagaacctttgcactgccatcgccaagtactgcccacatgcgcttattaatatgatcagcaaccctgtgaactctactgttccaattgcagctgagatatttaagaaggctggtatgtacgatgaaaagaaattgtttggtgttaccactcttgacgtcgtcagggccaggactttctatgctggaaaggcaaatgtcccagttgcagaagttaatgttccggtgattggtggtcatgctggggttactattctccctctcttctctcaggcaactcctcaagccaacttgtcaagtgacatacttaccgcccttactaagcgtacccaagatggaggtacagaagtcgtggaggcaaaagcaggaaaaggttcagctacattgtccatggcctatgccggagcattgttcgctgatgcatgcttgaaaggactcaacggtgttccagatgtcatagaatgctcatacgtgcaatctacaatcaccgagcttcctttctttgcctcgaaggtgaggttggggaagaatggtgtggaggaggttcttgacttgggaccactctcagactttgagaaggaaggcttggaagcattgaagccagaactcaagtcctccatagaaaagggagtcaagtttgccaaccagtga

SEQ ID NO: 45209 - protein, 341 aa, Arabidopsis thaliana
MFRSMLVRSSASAKQAAIRRSFSSGSVPERKVAILGAAGGIGQPLALLMKLNPLVSSLSLYDIANTPGVAADVGHINTRSEVVGYMGDDNLAKALEGADLVIIPAGVPRKPGMTRDDLFNINAGIVKNLCTAIAKYCPHALINMISNPVNSTVPIAAEIFKKAGMYDEKKLFGVTTLDVVRARTFYAGKANVPVAEVNVPVIGGHAGVTILPLFSQATPQANLSSDILTALTKRTQDGGTEVVEAKAGKGSATLSMAYAGALFADACLKGLNGVPDVIECSYVQSTITELPFFASKVRLGKNGVEEVLDLGPLSDFEKEGLEALKPELKSSIEKGVKFANQ

SEQ ID NO: 45210 - DNA, 1020 bp, Talaromyces emersonii
  CDS (1)..(1020)
atgttcgctactcgccaggccttcaacctcttccagaagcgggctttctccgcctctgctcgccagtcctccaaggtcgccatccttggtgccgctggtggcattggccagcccctttctctcttgatgaagctcaaccctcgcgtcaccgagctcgctctctacgacatccgcggaggccctggtgtcgctgctgacctgagccacatcaacacgaacagcaccgtcactggctaccagcccactcctgagggccttcgtgatgctctcaagggctctgagatcgtcctcattcccgccggtgttcctcgcaagcgtggtatgacccgtgacgacctcttcaacaccaacgcttctattgtccgtgacctcgccaaggctgctgctgatgcctgccctaacgccaacatcctggtgatctccaaccctgtcaactccactgtccccattgtcgccgaggtcttcaagtccaagggtgtctacaaccccaagcgcctcttcggtgtcacgaccctggacgttgtccgtgcctcgcgcttcatctccgaggtcaagaacaccgacccggccaacgaggaggtgaccgttgttggtggccactccggtgtcaccattgttcctctgatctcccagtccaaccaccccgatattgagggcgagactcgcgacaagctggtcaaccgcattcaatttggtggtgacgagggtgtcaaagcaaaggacggtgctggttctgccgccctctccatggcgttcgccggtgcccgttcgccgagtctttgctcaagcggccagggcgtcaagggcgttgtcgagcccagctttgtcgacagccctctgtacaaggaccagggcattgacttcttcgcctcccgtgttgagcttggccctaacggtgccgagaaggtcttgccggttggcaaggtctccccatacgaggagaagctgctggaggctgcctttgcggacctcaagaagaacatccagaagggtatcgactttgtcaagaacaacccctaa

SEQ ID NO: 45211 - protein, 339 aa, Talaromyces emersonii
MFATRQAFNLFQKRAFSASARQSSKVAILGAAGGIGQPLSLLMKLNPRVTELALYDIRGGPGVAADLSHINTNSTVTGYQPTPEGLRDALKGSEIVLIPAGVPRKRGMTRDDLFNTNASIVRDLAKAAADACPNANILVISNPVNSTVPIVAEVFKSKGVYNPKRLFGVTTLDVVRASRFISEVKNTDPANEEVTVVGGHSGVTIVPLISQSNHPDIEGETRDKLVNRIQFGGDEGVKAKDGAGSAALSMAFAGARSPSLCSSGQGVKGVVEPSFVDSPLYKDQGIDFFASRVELGPNGAEKVLPVGKVSPYEEKLLEAAFADLKKNIQKGIDFVKNNP

SEQ ID NO: 45212 - DNA, 1020 bp, Talaromyces emersonii
  CDS (1)..(1020)
atgttcgctactcgccaggccttcaacctcttccagaagcgggctttctccgcctctgctcgccagtcctccaaggtcgccatccttggtgccgctggtggcattggccagcccctttctctcttgatgaagctcaaccctcgcgtcaccgagctcgctctctacgacatccgcggaggccctggtgtcgctgctgacctgagccacatcaacaccaacagcaccgtcactggctaccagcccactcctgagggccttcgtgatgctctcaagggctctgagatcgtcctcattcccgccggtgttcctcgcaagcgtggcatgacccgtgacgacctcttcaacaccaacgcttctattgtccgtgacctcgccaaggctgctgctgatgcctgccctaacgccaacatcctggtgatctccaaccctgtcaactccactgtccccattgtcgccgaggtcttcaagtccaagggtgtctacaaccccaagcgcctcttcggtgtcacgaccctggacgttgtccgtgcctcgcgcttcatctccgaggtcaagaacaccgacccggccaacgaggaggtgaccgttgttggtggccactccggtgtcaccattgttcctctgatctcccagtccaaccaccccgatattgagggcgagactcgcgacaagctggtcaaccgcattcaatttggtggtgacgagggtgtcaaagcaaaggacggtgctggttctgccgccctctccatggcgttcgccggtgcccgttcgccgagtctttgctcaagcggccagggggtcaagggggttgtcaagcccagctttgtcgacagccctctgtacaaggaccagggcattgacttcttcgcctcccgtgttgagcttggccctaacggtgccgagaaggtcttgccggttggcaaggtctccccatacgaggagaagctgctggaggctgcctttgcggacctcaagaagaacatccagaagggtatcgactttgtcaagaacaacccctaa

SEQ ID NO: 45213 - protein, 339 aa, Talaromyces emersonii
MFATRQAFNLFQKRAFSASARQSSKVAILGAAGGIGQPLSLLMKLNPRVTELALYDIRGGPGVAADLSHINTNSTVTGYQPTPEGLRDALKGSEIVLIPAGVPRKRGMTRDDLFNTNASIVRDLAKAAADACPNANILVISNPVNSTVPIVAEVFKSKGVYNPKRLFGVTTLDVVRASRFISEVKNTDPANEEVTVVGGHSGVTIVPLISQSNHPDIEGETRDKLVNRIQFGGDEGVKAKDGAGSAALSMAFAGARSPSLCSSGQGVKGVVKPSFVDSPLYKDQGIDFFASRVELGPNGAEKVLPVGKVSPYEEKLLEAAFADLKKNIQKGIDFVKNNP

SEQ ID NO: 45214 - DNA, 1014 bp, Sphyraena idiastes
  CDS (1)..(1014)
atgttttcccgtgccgtgagacctaccgttagcctcgtgcggacgttgtccacctcgtctcagaacaacgccaaggtggcggtgctcggagcgtcgggcggcataggccagccgctctctctgctactcaagaatagccccctggtgagtcacctctccctctatgatatcgcccacacccccggtgtggctgcagacctgagccacatcgagacaagggcccaggtgaccggccacatgggtcccgaccagctcgatgccgctctgcagggctgcgaggtcgtggtcatccccgccggtgtgcccaggaaacccggcatgacccgtgatgacctcttcaacaccaacgccaccatcgtagccaccttggccgatgcttgcgcccgcaactgccccgaggctatgatctgcatcatcgccaaccccgtcaactccaccatccctattacatcagaggtcatgaagaagcgtggcgtgtacaaccccaacaaattgtttggtgttacaaccttggacattgtcagagcgaacaccttcgtggcagagctcaaaggccttgacccagctcgcgtcagcgtaccagtcattgggggtcacgctggaaagaccatcatccccctcatctcccagtgcacacccaaggtagagttccccgccgaccagctgtctgccctgaccggcagaatccaggaggccggcacagaggtggtgaaggccaaggccggagccggatctgccaccctctccatggcttacgccggcgcccgcttcaccttctctgtcctggatgccatgaatggcaaggagggtgtggtggagtgcgcctatgtcaggtctgaggaaacagagtccaagtatttctccacacctctcctcctggggaagaacggcatcgagaagaaccttgggctgggcaagctgaccgccttcgaagagaagctggtgattgacgccatgggcgagctgaaggcttcaatcaagaaaggagaggattttgtggcgaacatgaagtga

SEQ ID NO: 45215 - protein, 337 aa, Sphyraena idiastes
MFSRAVRPTVSLVRTLSTSSQNNAKVAVLGASGGIGQPLSLLLKNSPLVSHLSLYDIAHTPGVAADLSHIETRAQVTGHMGPDQLDAALQGCEVVVIPAGVPRKPGMTRDDLFNTNATIVATLADACARNCPEAMICIIANPVNSTIPITSEVMKKRGVYNPNKLFGVTTLDIVRANTFVAELKGLDPARVSVPVIGGHAGKTIIPLISQCTPKVEFPADQLSALTGRIQEAGTEVVKAKAGAGSATLSMAYAGARFTFSVLDAMNGKEGVVECAYVRSEETESKYFSTPLLLGKNGIEKNLGLGKLTAFEEKLVIDAMGELKASIKKGEDFVANMK

SEQ ID NO: 45216 - DNA, 1065 bp, Arabidopsis thaliana
  CDS (1)..(1065)
atggagtttcgtggagatgccaaccagaggattgctaggatttcagctcatctcactcctcagatggaggccaagaactctgtaatcggacgggaaaactgcagagctaaaggtggtaatccaggattcaaagtagcaattcttggagctgcaggtggaattggacaatctttatctttgctgatgaagatgaaccctcttgtctctttacttcatctctacgatgttgtcaatgctcctggcgtcactgctgacgtcagtcatatggacactggagctgttgtccgcgggttcttgggagcgaagcagcttgaggacgcgctaacgggtatggatcttgtgatcataccagccggtataccgaggaaaccagggatgacccgcgatgatctgtttaaaatcaatgctgggattgttaaaacactatgtgaaggtgtagcaaaatgttgtcctaatgctattgtcaacttgatcagcaaccctgtgaactctactatccccattgccgctgaggttttcaagaaagctggaacttatgatcctaagaagctccttggagttactacactcgatgttgctcgtgccaacacatttgtggcagaagttcttggccttgatccaagagaagtcgatgtgccagtagttgggggacacgccggagtcacaatcttgccactactgtcacaggttaaacctcctagcagcttcacacctcaagaaattgagtacctgacaaaccggattcaaaatggtggaactgaagttgtggaggcaaaagctggagctggttctgcaacactttcaatggcatatgctgcagccaagtttgcagatgcttgccttcgcgggttaagaggagatgcgaatgtcgtagaatgctcttttgttgcttcacaggtgacagaattagctttctttgcaacaaaagtgcgccttggccgtacaggagcagaggaagtgtatcagcttggacccttaaacgaatacgaaaggattggtctggagaaagcaaaagatgaattagccggaagtattcagaaaggtgttgaattcatcagaaaatga

SEQ ID NO: 45217 - protein, 354 aa, Arabidopsis thaliana
MEFRGDANQRIARISAHLTPQMEAKNSVIGRENCRAKGGNPGFKVAILGAAGGIGQSLSLLMKMNPLVSLLHLYDVVNAPGVTADVSHMDTGAVVRGFLGAKQLEDALTGMDLVIIPAGIPRKPGMTRDDLFKINAGIVKTLCEGVAKCCPNAIVNLISNPVNSTIPIAAEVFKKAGTYDPKKLLGVTTLDVARANTFVAEVLGLDPREVDVPVVGGHAGVTILPLLSQVKPPSSFTPQEIEYLTNRIQNGGTEVVEAKAGAGSATLSMAYAAAKFADACLRGLRGDANVVECSFVASQVTELAFFATKVRLGRTGAEEVYQLGPLNEYERIGLEKAKDELAGSIQKGVEFIRK

SEQ ID NO: 45218 - DNA, 1029 bp, Nucella lapillus
  CDS (1)..(1029)
atgttgtctcgggttgctcgtccttcacggttactctgcgtcgtcagggaacagttttctccaaaacgaaacctgacgaaggaggcgcgcgtggcagtgttgggggcggcggggggcatagggcagcccctgtccctgttgctgaagcagatgcccatcgtgtcccacctcaacctctacgacatcgcgcacgtcatgggcgtggcctcggacctgagccacatcgagtcacgcgccaaggtgcaggggttcctgggcccagacaacctgcggccctgtctggacggcgccgacatcgtcctcatacctgccggcgtgcccaggaaaccaggcatgacccgggatgacctgttcaacaccaacgcggccatcgtgcgtgacctgacggcagctgtggcagagtcgtgccccaaagctatgttgggcatcatcaccaacccagtgaactcgacggcgccaatagcgtccgaggtgctgaagaagcatggagtgtacgatccacgccgcgcgtttggcgtgacaacgctggacgtggttcgatccaacactttcatcgccgaggccaaggggctggatgtgagcaagacgaacgtgccggtgatcgggggtcacagcggcatcaccatcatccccctcatctcccagtgcacgccccctgtgtccttccccccggaggagcgggtcaagctgtccatgcgtatccagaatgcaggcacagaggtggtggatgccaaggcgggggctgggtcggccactctgtccatggcattcgcagcagcagagttctgcaagagtctgattgaggcgctgaatggacaggagggcaaagtgcagtgcgcatacgtgcgatcggaggagaccgaggccaagtactttgccactcccgtcttgttgggcaaagagggcatcgagaagaacctgggcatgggcaagctgctggacgttgaggtgaacctgctgaaggcggccatgccagagctgatcgccaacatccagaagggcgagcagtttgtcggcgactccaagtaa

SEQ ID NO: 45219 - protein, 342 aa, Nucella lapillus
MLSRVARPSRLLCVVREQFSPKRNLTKEARVAVLGAAGGIGQPLSLLLKQMPIVSHLNLYDIAHVMGVASDLSHIESRAKVQGFLGPDNLRPCLDGADIVLIPAGVPRKPGMTRDDLFNTNAAIVRDLTAAVAESCPKAMLGIITNPVNSTAPIASEVLKKHGVYDPRRAFGVTTLDVVRSNTFIAEAKGLDVSKTNVPVIGGHSGITIIPLISQCTPPVSFPPEERVKLSMRIQNAGTEVVDAKAGAGSATLSMAFAAAEFCKSLIEALNGQEGKVQCAYVRSEETEAKYFATPVLLGKEGIEKNLGMGKLLDVEVNLLKAAMPELIANIQKGEQFVGDSK

SEQ ID NO: 45220 - DNA, 969 bp, Phytomonas sp
  CDS (1)..(969)
atggcccatgtgtgtgttgttggtgcggctggtggtattggccaggccctctctctccttctcacgcgctcgcttccttatgggagcacactatccctctacgatgttgtgggagcgccaggcgtggcggcagacctgtcgcacattgacaacgccggtgtaactgtgaagtttgccgctggcaagattggcgttacacgtgacccagcccttgcagctcttgccaccggcgttgacgtgttcgtgttcgttgcgggagttgcgcgcaagcctgggatgacacgcgacgatctcttcagcattaacgcaggtattgtcctggatcttgttatgacgtgtgcctcttccagccccaaggctatgttctgcgtggtcgcaaaccctgtgaacagcaccgtccccattgctgctgaggttctcaagaagcttggcgtgtacaataagaatcgtctgtttggtgttaccacgcttgatatgctacgtgcgacccgcttcattaacgaagcccgcatgccgttggttgtggatagggttccggttgtcggtgggcacagtggaaactctattgtgccgctgttccatcaactgcagggtccgctgccacctaaggagcagctggacaagattacgctgcgcgtgcagatgggaggcgacgaagtggtcaaggcaaaggccgggcgtggatctgcgacgcttgccatgggtgaggctggcgctcgcttcgtgctggatgttgtgaaggggttgactggtgcgagcaacccactcgtgtatgcgtacgtggacaccgatggccagagcgaatcagagtttcttgctattcctgtcatactcggcaagagcggtattgagcgccgcctaccgatcggtcctatggctgagtcggaaaaagagctcctggacaaggctattccaatggtcaaagagaacattgaaaggggtaagaaatttgcgctctctaagctctaa

SEQ ID NO: 45221 - protein, 322 aa, Phytomonas sp
MAHVCVVGAAGGIGQALSLLLTRSLPYGSTLSLYDVVGAPGVAADLSHIDNAGVTVKFAAGKIGVTRDPALAALATGVDVFVFVAGVARKPGMTRDDLFSINAGIVLDLVMTCASSSPKAMFCVVANPVNSTVPIAAEVLKKLGVYNKNRLFGVTTLDMLRATRFINEARMPLVVDRVPVVGGHSGNSIVPLFHQLQGPLPPKEQLDKITLRVQMGGDEVVKAKAGRGSATLAMGEAGARFVLDVVKGLTGASNPLVYAYVDTDGQSESEFLAIPVILGKSGIERRLPIGPMAESEKELLDKAIPMVKENIERGKKFALSKL

SEQ ID NO: 45222 - DNA, 969 bp, Phytomonas sp
  CDS (1)..(969)
atggcccatgtgtgtgttgttggtgcggctggtggtgttggccaggccctctctctccttctcacgcgctcgcttccttatgggagcacactatccctctacgatgttgtgggagcgccaggcgtggcggcagacctgtcgcacattgacaacgccggtgtaactgtgaagtttgccgctggcaagattggcgttacacgtgacccagcccttgcagctcttgccaccggcgttgacgtgttcgtgttcgttgcgggaggtccaatcatgcctgggatgaagcgcgacgatctttttaactctacggccggtattgtcctggatcttgttatgacgtgtgcctcttccagccccaaggctatgttctgcatgatctcgaaccctgtgaacagcaccgtccccattgctgctgaggttctcaagaagcttggcgtgtacaataagaatcgtctgctgggcgttacacggcttgatatgctacgtgcgacccgcttcattaacgaagcccgcatgccgttggttgtggatagggttccggttgtcggtgggcacagcgataactctattgtgccgctgttccatcaactgcagggtccgctgccacctaaggagcagctggacaagattacgctgcgcgtgcagtcggcagcctatgaggtaattgacgcaaagggcgggcgtggatctgcgacgcttgccatgggtgaggctggcgctcgcttcgtgctggatgttgtgaaggggttgactggtgcgagcaaccccctcgtgtatgcgtacgtggacaccgatggccagagcgaatcagagtttcttgctattcctgtcatactcggcaagagcggtattgagcgccgcctaccgatcggtcctatgactgagtcggaaaagaaactcgtagacgtggctatttctatcgtcaaaaagaacattgaaaagggtaaggaatttgcgctctctaagctctaa

SEQ ID NO: 45223 - protein, 322 aa, Phytomonas sp
MAHVCVVGAAGGVGQALSLLLTRSLPYGSTLSLYDVVGAPGVAADLSHIDNAGVTVKFAAGKIGVTRDPALAALATGVDVFVFVAGGPIMPGMKRDDLFNSTAGIVLDLVMTCASSSPKAMFCMISNPVNSTVPIAAEVLKKLGVYNKNRLLGVTRLDMLRATRFINEARMPLVVDRVPVVGGHSDNSIVPLFHQLQGPLPPKEQLDKITLRVQSAAYEVIDAKGGRGSATLAMGEAGARFVLDVVKGLTGASNPLVYAYVDTDGQSESEFLAIPVILGKSGIERRLPIGPMTESEKKLVDVAISIVKKNIEKGKEFALSKL

SEQ ID NO: 45224 - DNA, 1059 bp, Vitis vinifera
  CDS (1)..(1059)
atgaaggcttcgttgttcagatctgcagaaactgctctaaggagggtctcatccccctccgcatcttcgcatctactccgccgatcttactgcgtggaatccaagccagaacgcaaggtcgccgttcttggagccgccggcggcattggacagccccttgccctcctcatgaagctcaatcctcttgtctcctcgctctctctctacgatatcgctggtactcctggcgtggccgctgatgtcagccacatcaacactcgttcccaagtcgcggggtacatgggcgacgatcagctagggcaagccttggagggagcagatttggtgattattccagccggtgttccaagaaagcccggtatgactcgtgacgatctgttcaacatcaatgccggaattgtgaagtccttatgcactgccattgccaagtactgtcccaatgcattggttaatatgataagcaaccctgtgaactcgactgtgccaattgccgctgaggttttcaagaaggctggaacttatgatgagaagaagctgtttggtgtgactacactagatgtggttagggctaagaccttctatgctgggaaggccaaggtcccagttgctgaggccaatgtaccagttgttggtggtcatgcaggcataacgatccttccactcttttctcaagccacaccgaaatccaacaatttgtcagatgaagatattgtggctctaacaaaacgaacacaagatggaggaacagaggttgtggaagccaaggctggaaaaggatctgcaaccctctcaatggcatatgctggagcagtctttgcagatgcttgcttgaaggttcttaatggcgttccagatgtagttgaatgctcttttgttcaatcaaccattgttcctgatttgccttactttgcctctaaggtaaagcttggaaagaatggtgtggaagaggtccttgggttgggtcctttgtcggactatgagaaacaaggtcttgaaagcctcaaacatgagctcaaagcctcaattgagaagggaatcaaatttgccactcaaagttaa

SEQ ID NO: 45225 - protein, 352 aa, Vitis vinifera
MKASLFRSAETALRRVSSPSASSHLLRRSYCVESKPERKVAVLGAAGGIGQPLALLMKLNPLVSSLSLYDIAGTPGVAADVSHINTRSQVAGYMGDDQLGQALEGADLVIIPAGVPRKPGMTRDDLFNINAGIVKSLCTAIAKYCPNALVNMISNPVNSTVPIAAEVFKKAGTYDEKKLFGVTTLDVVRAKTFYAGKAKVPVAEANVPVVGGHAGITILPLFSQATPKSNNLSDEDIVALTKRTQDGGTEVVEAKAGKGSATLSMAYAGAVFADACLKVLNGVPDVVECSFVQSTIVPDLPYFASKVKLGKNGVEEVLGLGPLSDYEKQGLESLKHELKASIEKGIKFATQS

SEQ ID NO: 45226 - DNA, 1026 bp, Nucella lapillus
  CDS (1)..(1026)
atgttttcaagaattgctcgtccgtcacaaactctgtgcctattcaggcatcacttttcgacaagcagcaaggtcgggaaggatgtgaaggtggctgtgctgggggcggcggggggcatcggccagcccctgtccctgctgctgaaggagatcccgctcatctcccacctcaacctgtacgacatcgcccacacgcccggggtggccgctgacctcagccacatcgagacccgcgccaaggtggccggcttcctggggcctgaggagctggacaagtgcctggagggggccaacatcgtgctcatccccgccggcgtgcccagaaagccaggtatgacgagagatgatctgttcaacaccaacgcgggcatcgtgagagatctgacagaaagggtggcccacgtctgcccaacagccatgctgggaatcatcacaaaccctgtgaactcgacagtgcccattgcctcagaagtgctgaagaagcacggcgtgtacgacccgaagcgagtgtttggcgtcaccacactggatgtggtccggtccaacaccttcatcgcagaggccaaggctttggatgtgagcaagacaaacgtgccggtgatcggaggtcacagcggggtcaccattatccccctcatctcccagtgcactccccctgtctcctttcctgagaatgagcgcgagaagctgtcggtgcgaatccagaatgcaggcactgaagtggtggaggcgaaggccggggcgggctcagcaacgttgtccatggcctatgccgctgcccagttctgcaagagtctgatcgatgccctcaacggcaagaatgaagtggtgcagtgtgcctttgtcaggtcggatgtcacggacgccacctacttttccacccctctcttgctcgggaaaaacggggtggagaagaacctgggcatgggcaagctgttggactacgaggtgaacctgctgaaggccgccttgcctgagctgattgccaacatcaagaagggagaggagtttgtggctaagagctag

SEQ ID NO: 45227 - protein, 341 aa, Nucella lapillus
MFSRIARPSQTLCLFRHHFSTSSKVGKDVKVAVLGAAGGIGQPLSLLLKEIPLISHLNLYDIAHTPGVAADLSHIETRAKVAGFLGPEELDKCLEGANIVLIPAGVPRKPGMTRDDLFNTNAGIVRDLTERVAHVCPTAMLGIITNPVNSTVPIASEVLKKHGVYDPKRVFGVTTLDVVRSNTFIAEAKALDVSKTNVPVIGGHSGVTIIPLISQCTPPVSFPENEREKLSVRIQNAGTEVVEAKAGAGSATLSMAYAAAQFCKSLIDALNGKNEVVQCAFVRSDVTDATYFSTPLLLGKNGVEKNLGMGKLLDYEVNLLKAALPELIANIKKGEEFVAKS

SEQ ID NO: 45228 - DNA, 1038 bp, Glycine max
  CDS (1)..(1038)
atgatgaagccatcgatgctcagatctctccactccgccgccacccgcggcgcctctcatctcttccgccgtgggtacgcctccgagccggtgccggagcgcaaggtagccgttctcggcgccgccggcgggatcgggcagcctctctcccttctcatgaagctcaatcccctcgtttcgagcctctccctttacgatatcgccggaacccccggcgtcgccgccgatatcagccacataaacaccagatctgaggtagtggggtaccaaggtgatgaagagcttggaaaagctttggagggtgccgatgttgttataattcctgctggtgtgcccagaaagcctggaatgactcgtgatgatctttttaacatcaatgctggcattgtaaagacgctgtgtactgctattgctaagtattgcccccatgcccttgttaacatgataagcaatcctgtgaactccactgttcctattgctgctgaagttttcaagaaggcaggaacttatgatgagaagagattgtttggtgttaccacccttgatgttgttagggcaaaaactttctatgctgggaaagccaatgttccagttgctggtgttaatgtacctgttgtgggcggccatgcaggcattactattctgccactattttctcaagccacaccaaaagccaatcttgatgatgatgtcattaaggctcttacaaagaggacacaagatggaggaacagaagttgtagaagctaaggctggaaagggttctgcaactttgtcaatggcctatgctggtgccctttttgctgatgcttgcctcaagggcctcaatggagtcccagatgttgtcgagtgctctttcgtgcaatccactgttactgaacttcccttctttgcttccaaggtgaggcttgggacggttggtgtggaggaagttctgggcttggggcacctctcagattttgagcaacaaggcctcgaaagccttaagcctgaactcaaatcatcaattgagaagggaatcaaatttgccaaccagtaa

SEQ ID NO: 45229 - protein, 345 aa, Glycine max
MMKPSMLRSLHSAATRGASHLFRRGYASEPVPERKVAVLGAAGGIGQPLSLLMKLNPLVSSLSLYDIAGTPGVAADISHINTRSEVVGYQGDEELGKALEGADVVIIPAGVPRKPGMTRDDLFNINAGIVKTLCTAIAKYCPHALVNMISNPVNSTVPIAAEVFKKAGTYDEKRLFGVTTLDVVRAKTFYAGKANVPVAGVNVPVVGGHAGITILPLFSQATPKANLDDDVIKALTKRTQDGGTEVVEAKAGKGSATLSMAYAGALFADACLKGLNGVPDVVECSFVQSTVTELPFFASKVRLGTVGVEEVLGLGHLSDFEQQGLESLKPELKSSIEKGIKFANQ

SEQ ID NO: 45230 - DNA, 969 bp, Leishmania major
  CDS (1)..(969)
atggtgaacgtgtgcgttgttggtgctgccggcggcattggccagtcgctgtcgctgctgttggtgcgccagctgccgtacgggagcacgttgtcgctgttcgacgttgtgggcgctgcaggcgtcgcagcagacctgtcgcatgtggacaacgccggtgtgcaggtgaagtttgcggagggcaagatcggccataagcgcgaccctgcgctggcagagcttgcgaagggcgtggatgtgtttgtaatggtggctggcgttccacgcaagccgggcatgacgcgcgacgaccttttcaaaatcaacgccggaatcatcctggaccttgtgctgacgtgcgcgtcgtcgagtccaaaggcggtgttctgcattgtgacgaaccctgtgaacagcacggtcgcgatcgcggcagaggcgctgaagagccttggcgtatacgaccgaaaccggctgcttggcgtgtcgctgctggacgggctgcgcgcgacgtgcttcatcaacgaggcgcgcaagcccttagtcgtgtcgcaggtaccagttgttggcgggcacagcgacacaacgattgtgccgttgttctaccagctaccggggccgttgccggagcaggcgacgctggacaagatcgtgaagcgcgtgcaggtcgcaggcacagaagtggtgaaggcgaaggccgggcgcgggtctgcgacgctgtcgatggcggaggctggcgcgcggttcgcgttgaaggttgtggagggtctgaccggcacgggtaacccgctggtgtacgcatatgtagacacagacgggcagcacgagacgacgttcctcgcgatccctgtggtgcttggcatgaatggaatcgagaagcgcctgccgattggtccgctgcactcgacggaggaaacgctgctgaaggcggcactgccggtgatcaagaagaatatcgtgaagggcagcgagttcgcgcgctcacacctgtag

SEQ ID NO: 45231 - protein, 322 aa, Leishmania major
MVNVCVVGAAGGIGQSLSLLLVRQLPYGSTLSLFDVVGAAGVAADLSHVDNAGVQVKFAEGKIGHKRDPALAELAKGVDVFVMVAGVPRKPGMTRDDLFKINAGIILDLVLTCASSSPKAVFCIVTNPVNSTVAIAAEALKSLGVYDRNRLLGVSLLDGLRATCFINEARKPLVVSQVPVVGGHSDTTIVPLFYQLPGPLPEQATLDKIVKRVQVAGTEVVKAKAGRGSATLSMAEAGARFALKVVEGLTGTGNPLVYAYVDTDGQHETTFLAIPVVLGMNGIEKRLPIGPLHSTEETLLKAALPVIKKNIVKGSEFARSHL

SEQ ID NO: 45232 - DNA, 1239 bp, Nicotiana tabacum
  CDS (1)..(1239): transl_table=11
atggcagcaacatcagcaactactttctcagttggctcagccacatctcttggctgcaaaggaagctcagtatctcaatcaaaagcctttagtgtgaaattctactccaaaaacagccttaaaagtttcagcggtttgaaggctgccacagatgtaagctgtgaatcagaatcgtcctttttaggaaaagaaagtgttgctgtccttaaacaatcttttactccaaaggctcaaaaagaaaacaagggatatgggaactgtgttcagcctcaagcatcttacaaagtggctgttcttggagccagcggcggtataggccagccactgtctcttctggtcaagatgtcaccattagtttcagagctgaacctttatgatatagctaatgttaaaggagttgcggctgatctaagtcactgcaacactccctccaaggtttcagatttcactggagcttctgaattggccaactgtttgaaaggtgtaaatgtggtggtcatacctgctggtgttccgagaaagccaggtatgacacgtgatgatctgttcaacattaatgcaaacattgtgaagacattggtcgaggctgttgctgataattgccctgatgcgtttatccacatcattagcaatccagtcaactccacagtgccaattgcagcagaggtgttgaagcgaaagggtgtttatgatcctaaaaaactttttggtgttaccaccctagatgtagtcagggcaaacacatttgtcgcgcagaagaaaagtttgaggcttattgacgtagatgtcccagttgtgggtggccatgctggtatcaccattttgcctttgctatcaaagacaaaaccatccactactttcactgacgaagaagtacaggagctaactgtgaggattcaaaatgctggcacagaagttgtggaggcaaaggctggtgcagggtctgctacactttccatggcgtacgcagcagcaagatttgttgagtcctcactccgcgcacttgatggagatagtgatgtgtatgagtgtgcttttgtccagtctgacctaacagagcttccattctttgcttcaagggttaaactaggaaagaacggggttgaggctttgattccatctgaccttcaaggtttgactgagtatgaacagaaagctctggatgctttaaagccagaactgaaatctagcatcgagaagggtataggtttcgttcagaaggaacctgtagctgcttag

SEQ ID NO: 45233 - protein, 412 aa, Nicotiana tabacum
MAATSATTFSVGSATSLGCKGSSVSQSKAFSVKFYSKNSLKSFSGLKAATDVSCESESSFLGKESVAVLKQSFTPKAQKENKGYGNCVQPQASYKVAVLGASGGIGQPLSLLVKMSPLVSELNLYDIANVKGVAADLSHCNTPSKVSDFTGASELANCLKGVNVVVIPAGVPRKPGMTRDDLFNINANIVKTLVEAVADNCPDAFIHIISNPVNSTVPIAAEVLKRKGVYDPKKLFGVTTLDVVRANTFVAQKKSLRLIDVDVPVVGGHAGITILPLLSKTKPSTTFTDEEVQELTVRIQNAGTEVVEAKAGAGSATLSMAYAAARFVESSLRALDGDSDVYECAFVQSDLTELPFFASRVKLGKNGVEALIPSDLQGLTEYEQKALDALKPELKSSIEKGIGFVQKEPVAA

SEQ ID NO: 45234 - DNA, 1029 bp, Malassezia furfur
  CDS (1)..(1029)
atgtttgctcgtgccgccctgcgtaacagcgtccgcgccccggcttcggcccgctacttctcgcagactgcggctgcgaaccgcaaggttgccgtgctcggtgcctcgggcggtattggccagcccctctcgctcctgatgaagctcaaccccaaggttaccgagctccgcctgtacgacatccgcctcgctccgggtgttgctgcggatctctcgcacatcaacacccccgcggtgacttcgggctacgcccaggacgacctcgagggtgccgtcgacggtgcggagattgtgctgatccccgccggtatgccgcgcaagcccggcatgacccgtgacgacctgttcaactcgaacgcctcgattgtccgtgacctcgccaaggtcgtggctaaggtcgccccaaaggcttacatcggcgtcatctcgaaccccgtcaactcgacggtgccgatcgtcgctgaggtgttcaagaaggccggtgtgtacgaccccaagcgcctcttcggtgtgaccacgctcgacaccacgcgcgcggccaccttcctgtcgggcattgctggctcggacccgcagaccaccaacgtccccgtcattggtggccactcgggtgtgaccattgtgcccctgatctcgcaggccgcccagggtgacaaggtgcaggctggcgagcagtacgacaagcttgtgcaccgcatccagttcggtggtgacgaggtcgtcaaggccaaggacggtgccggctcggcgacgctctcgatggcctacgccgccgctgtcttcaccgagggcctgctcaagggtctcgacggtgaggcggtgacgcagtgcaccttcgtcgagagccccctgttcaaggaccaggtcgacttcttcgcctcgcccgtcgagttcggccccgagggtgtgaagaacatccctgctctgccgaagctcaccgccgaggagcagaagctgctcgacgcctgcctgcccgaccttgccaagaacatcaagaagggcgttgcgtgggccgccgagaacccgtaa

SEQ ID NO: 45235 - protein, 342 aa, Malassezia furfur
MFARAALRNSVRAPASARYFSQTAAANRKVAVLGASGGIGQPLSLLMKLNPKVTELRLYDIRLAPGVAADLSHINTPAVTSGYAQDDLEGAVDGAEIVLIPAGMPRKPGMTRDDLFNSNASIVRDLAKVVAKVAPKAYIGVISNPVNSTVPIVAEVFKKAGVYDPKRLFGVTTLDTTRAATFLSGIAGSDPQTTNVPVIGGHSGVTIVPLISQAAQGDKVQAGEQYDKLVHRIQFGGDEVVKAKDGAGSATLSMAYAAAVFTEGLLKGLDGEAVTQCTFVESPLFKDQVDFFASPVEFGPEGVKNIPALPKLTAEEQKLLDACLPDLAKNIKKGVAWAAENP

SEQ ID NO: 45236 - DNA, 1008 bp, Aquifex aeolicus
  CDS (1)..(1008): transl_table=11
atgagaatgaaaaaaaccgttgctgtaatcggtgcggggaacgtgggggagcacgtcgcctccctcatccttttaaaaaacctcgcaaacgttaaaatgttcgaccttcccagaaaaacggaagagaaagtttttgagccagttaaagggaaggccctcgacatgaagcagatgctcgcagctatggacatagatgcgagggtagagggctatactgtgacacctgagggcgaaggctacgaacccttagaaggttccgacatagtggtaattaccgcgggttttcccagaagaccgggaatgagcagagaggaccttcttgaggcaaacataaggataatctcggttatagcggacaggattaagaggtacgcaccagacgcaatagtaattgttgttacgaatcccgtggacgtcatgacctacgtagcctacaagctccttaactttcctaagaaccgcgtaatggggatggcgggagtgcttgattccgcgaggttcaaaacttttatttccgaagaactcatggtttctccgaaagacatccacgcttacgtgataggcgggcacggtgatgagatggttcctcttatttcaatttctaacgtgggaggaatacctttaaaggatttacttccaaaggaaaagcttgaaaagattatagaaagaacacgctttggtggcggtgagatagtaaacctcatgggaacttccgcttattacgctcctgcggcggcaattgtggacatgatagaggctctcgtccagaacagcaagaggatactcccctgcagtgtttaccttgacggagaagcaggtgagtactacggagttcagggcttttgcgtgggagttcccgtgaaacttggttctaacggggttgaagaaataataaaagtgcctatgatagaagaagaaagggaaatgtggagacgttccgtcgagtctgttaagaaaaccgttgaagttgcggagggtatactaagtgcgggaagttcacgtcaatga

SEQ ID NO: 45237 - protein, 335 aa, Aquifex aeolicus
MRMKKTVAVIGAGNVGEHVASLILLKNLANVKMFDLPRKTEEKVFEPVKGKALDMKQMLAAMDIDARVEGYTVTPEGEGYEPLEGSDIVVITAGFPRRPGMSREDLLEANIRIISVIADRIKRYAPDAIVIVVTNPVDVMTYVAYKLLNFPKNRVMGMAGVLDSARFKTFISEELMVSPKDIHAYVIGGHGDEMVPLISISNVGGIPLKDLLPKEKLEKIIERTRFGGGEIVNLMGTSAYYAPAAAIVDMIEALVQNSKRILPCSVYLDGEAGEYYGVQGFCVGVPVKLGSNGVEEIIKVPMIEEEREMWRRSVESVKKTVEVAEGILSAGSSRQ

SEQ ID NO: 45238 - DNA, 1005 bp, Aquifex aeolicus
  CDS (1)..(1005): transl_table=11
gtgaaagggaaattgataaactcatttcttatgaaaaagccaaaaattagtgtaataggtgcgggaaaggtaggggaaaatgtagcctacctcctcacgatcctcggcctcggagacgtttacctatttgcgaggtataaaaaaggtttagaacctgcgaaagctaaggctcttgatctaaaacaaatggctgttttaatggacatagatataaacgttaaagggatttcctacgacaaagagggttttgaagaactaaagggttcagacatcgtggtaattaccgcgggaatacctcgaagggaggggatgagcagggaggatttactctacgaaaacttaaaaatcttgaaaaagttcacggatgcgataaaggaatacgcgaaggattcaataattatagtggtttcaaatcctgtggatacgctcacttacgccaccataaagttgacgggatttgaaccgagaagggttatcggaatggccggagttctcgattccgcaaggtttaaaaacttcgtaaaggaaaagataggtatatcaaacgctgatataaggactctggttctgggaactcacggggatttaatggtgccagtaacctcgcacagctttataggagacaaaccgatagaggaagttttcagtgcaagcgagatagatgaactcatagaaaagaccagaaaaggtggagcgcagatagtatcccttatgggcacttctgcctactatgcacccgccgcctcggttgtgataatggttgagtctataatcaacgacaggaaaagggtaatgccttgctccgtttacgttgaaggggaagctgcaaagcactacgaaatagaaggagtgtgcataggactgcccgtagttctcggaaagaagggagttgaagactttgagcttgtaaacctgagcggttacgaaaagagagaacttctgcgttctgcaaaaactttaaaagaaatggtaagcttagcggataaactcctgaatgagctttaa

SEQ ID NO: 45239 - protein, 334 aa, Aquifex aeolicus
MKGKLINSFLMKKPKISVIGAGKVGENVAYLLTILGLGDVYLFARYKKGLEPAKAKALDLKQMAVLMDIDINVKGISYDKEGFEELKGSDIVVITAGIPRREGMSREDLLYENLKILKKFTDAIKEYAKDSIIIVVSNPVDTLTYATIKLTGFEPRRVIGMAGVLDSARFKNFVKEKIGISNADIRTLVLGTHGDLMVPVTSHSFIGDKPIEEVFSASEIDELIEKTRKGGAQIVSLMGTSAYYAPAASVVIMVESIINDRKRVMPCSVYVEGEAAKHYEIEGVCIGLPVVLGKKGVEDFELVNLSGYEKRELLRSAKTLKEMVSLADKLLNEL

SEQ ID NO: 45240 - DNA, 1065 bp, Arabidopsis thaliana
  CDS (1)..(1065)
atggagtttcgtggagatgccaaccagaggattgctaggatttcagctcatctcactcctcagatggaggccaagaactctgtaatcggacgggaaaactgcagagctaaaggtggtaatccaggattcaaagtagcaattcttggagctgcaggtggaattggacaatctttatctttgctgatgaagatgaaccctcttgtctctttacttcatctctacgatgttgtcaatgctcctggcgtcactgctgacgtcagtcatatggacactggagctgttgtccgcgggttcttgggagcgaagcagcttgaggacgcgctaacgggtatggatcttgtgatcataccagccggtataccgaggaaaccagggatgacccgcgatgatctgtttaaaatcaatgctgggattgttaaaacactatgtgaaggtgtagcaaaatgttgtcctaatgctattgtcaacttgatcagcaaccctgtgaactctactgtccccattgccgctgaggttttcaagaaagctggaacttatgatcctaagaagctccttggagttactacactcgatgttgctcgtgccaacacatttgtggcagaagttcttggccttgatccaagagaagtcgatgtgccagtagttgggggacacgccggagtcacaatcttgccactactgtcacaggttaaacctcctagcagcttcacacctcaagaaattgagtacctgacaaaccggattcaaaatggtggaactgaagttgtggaggcaaaagctggagctggttctgcaacactttcaatggcatatgctgcagccaagtttgcagatgcttgccttcgcgggttaagaggagatgcgaatgtcgtagaatgctcttttgttgcttcacaggtgacagaattagctttctttgcaacaaaagtgcgccttggccgtacaggagcagaggaagtgtatcagcttggacccttaaacgaatacgaaaggattggtctggagaaagcaaaagatgaattagccggaagtattcagaaaggtgttgaattcatcagaaaatga

SEQ ID NO: 45241 - protein, 354 aa, Arabidopsis thaliana
MEFRGDANQRIARISAHLTPQMEAKNSVIGRENCRAKGGNPGFKVAILGAAGGIGQSLSLLMKMNPLVSLLHLYDVVNAPGVTADVSHMDTGAVVRGFLGAKQLEDALTGMDLVIIPAGIPRKPGMTRDDLFKINAGIVKTLCEGVAKCCPNAIVNLISNPVNSTVPIAAEVFKKAGTYDPKKLLGVTTLDVARANTFVAEVLGLDPREVDVPVVGGHAGVTILPLLSQVKPPSSFTPQEIEYLTNRIQNGGTEVVEAKAGAGSATLSMAYAAAKFADACLRGLRGDANVVECSFVASQVTELAFFATKVRLGRTGAEEVYQLGPLNEYERIGLEKAKDELAGSIQKGVEFIRK

SEQ ID NO: 45242 - DNA, 1077 bp, Brassica napus
  CDS (1)..(1077)
atggagttccgtggagatgcctacaagaggattgctatgatatcagctcatcttcaaccttctttcactcctcagatggaggccaagaactctgtgatgggactagaaagctgcagagcgaaaggagggaatccaggattcaaagtagccattcttggagctgcaggtggaataggacaatcactatccttgttaatgaagatgaaccctctcgtctctttacttcatctctacgatgtcgtcaatgctcctggagtcactgctgacgttagccatatggacactggagccgttgttagaggattcttgggagccaagcaacttgaggacgccctaactggtatggatcttgtgatcataccagctggtgtgccgaggaaaccagggatgacacgtgatgatctttttaaaatcaacgctgggattgttaggacactatgtgaaggagtagctaaatgctgtcctaatgctattgttaacttgattagtaaccctgtgaactctactgttgctattgctgctgaggttttcaagaaagctggaacttatgatcctaagaagctccttggtgttactacactagatgttgctcgtgccaacacatttgtggctgaagttcttggccttgatccaagagaagtcgatgtaccagtcgttggaggacatgctggagtcacaatcttgccactattgtcacaggttaaacctcctagcagcttcacaccatcagagattgagtaccttacaaacaggattcaaaacggtggaactgaagttgtggaggcaaaagctggagctggatctgcaacactttcaatggcatatgctgcagccaagttcgcagatgcttgccttcgcgggttaagaggagatgcgaatgtcattgaatgctcttttgttgcttcacaggtgacagagttagctttctttgcaaccaaagtgcgtcttggacgtacaggagcagaggaagtgtttcagcttgggcccttgaacgaatacgaaagggttggtctggagaaagcaaaagaagaactagctggaagcattcagaaaggtgtcgacttcatcaggaaatga

SEQ ID NO: 45243 - protein, 358 aa, Brassica napus
MEFRGDAYKRIAMISAHLQPSFTPQMEAKNSVMGLESCRAKGGNPGFKVAILGAAGGIGQSLSLLMKMNPLVSLLHLYDVVNAPGVTADVSHMDTGAVVRGFLGAKQLEDALTGMDLVIIPAGVPRKPGMTRDDLFKINAGIVRTLCEGVAKCCPNAIVNLISNPVNSTVAIAAEVFKKAGTYDPKKLLGVTTLDVARANTFVAEVLGLDPREVDVPVVGGHAGVTILPLLSQVKPPSSFTPSEIEYLTNRIQNGGTEVVEAKAGAGSATLSMAYAAAKFADACLRGLRGDANVIECSFVASQVTELAFFATKVRLGRTGAEEVFQLGPLNEYERVGLEKAKEELAGSIQKGVDFIRK

SEQ ID NO: 45244 - DNA, 1071 bp, Citrullus lanatus
  CDS (1)..(1071)
atgcagccgattccggatgttaaccagcgcattgctcgaatctctgcgcatcttcatcctcccaagtctcagatggaggagagttcagctttgaggagggcgaattgccgggctaaaggcggagctcccgggttcaaagtcgcaatacttggcgctgccggtggcattggccagccccttgcgatgttgatgaagatgaatcctctggtttctgttctacatctatatgatgtagtcaatgcccctggtgtcaccgctgatattagccacatggacacgggtgctgtggtgcgtggattcttggggcagcagcagctggaggctgcgcttactggcatggatcttattatagtccctgcaggtgttcctcgaaaaccaggaatgacgagggatgatctgttcaaaataaacgcaggaattgtcaagactctgtgtgaagggattgcaaagtgttgtccaagagccattgtcaacctgatcagtaatcctgtgaactccaccgtgcccatcgcagctgaagttttcaagaaggctggaacttatgatccaaagcgacttctgggagttacaatgctcgacgtagtcagagccaatacctttgtggcagaagtattgggtcttgatcctcgggatgttgatgttccagttgttggcggtcatgctggtgtaaccattttgccccttctatctcaggtgaagcctccaagttctttcacacaagaagagattagttacctgactgataggattcaaaatggtggaacagaagttgtcgaggccaaagcaggagctggctcagcaactctctcaatggcttatgctgccgttaagtttgcagatgcatgcctcaggggcttaagaggagatgctggtgtcattgaatgcgcgtttgtgtcttctcaggtgactgaacttccattctttgcatcaaaagtacgacttggtcgcaatggtatcgaagaagtatactcccttggcccgctaaatgagtatgagaggattggattggagaaagcgaagaaagagttggcaggaagcattgagaagggagtttccttcatcagaagctga

SEQ ID NO: 45245 - protein, 356 aa, Citrullus lanatus
MQPIPDVNQRIARISAHLHPPKSQMEESSALRRANCRAKGGAPGFKVAILGAAGGIGQPLAMLMKMNPLVSVLHLYDVVNAPGVTADISHMDTGAVVRGFLGQQQLEAALTGMDLIIVPAGVPRKPGMTRDDLFKINAGIVKTLCEGIAKCCPRAIVNLISNPVNSTVPIAAEVFKKAGTYDPKRLLGVTMLDVVRANTFVAEVLGLDPRDVDVPVVGGHAGVTILPLLSQVKPPSSFTQEEISYLTDRIQNGGTEVVEAKAGAGSATLSMAYAAVKFADACLRGLRGDAGVIECAFVSSQVTELPFFASKVRLGRNGIEEVYSLGPLNEYERIGLEKAKKELAGSIEKGVSFIRS

SEQ ID NO: 45246 - DNA, 1071 bp, Cucumis sativus
  CDS (1)..(1071)
atgcagccgattcctgatgttaatcaacgcattgctcgaatctctgctcatcttcatcctcccaagtatcagatggaggagagttcagttttgaggagggcgaattgccgggccaaaggcggagctcccgggttcaaagtcgcaatacttggggctgccggtggcattggccagccacttgcgatgttaatgaagatgaatcctctggtttctgttctgcatctatatgatgtagtcaatgcccctggcgtcactgctgatattagccacatggacacgggtgctgtggtgcgtggattcttggggcagcagcagctagagcgtgcgcttactggcatggatcttgttgtaatccctgcgggcgttcctcggaaaccaggaatgacaagggatgatctattcaaaataaacgcaggaattgtcaagactctttgcgaagggattgcaaagtgttgtcctacagccattgtcaacctgatcagtaatcctgtgaactccaccgtgcccattgcagctgaagttttcaagaaagctggaacttatgatccaaagcgacttctaggagttacaatgcttgacgtcgtcagagccaatacctttgtggcagaagtattgggtcttgatcctcgggatgttaatgttccagttgttggcggtcatgctggtgtaaccattttaccccttctatctcaggtcaagcctccaagttctttcacacaagaagagattaattacctgactgataggattcaaaatggtggaacagaagttgttgaggccaaagcaggagctggttcagcaactctctcaatggcatatgctgccgttaagtttgcagatgcatgcctcaggggcttaagaggagatgctggtgttgttgaatgcgcgttcgtgtcttctcaggtgaccgaacttccattctttgcaacaaaagtacgacttggccgcaatggtatagatgaagtatactcccttggcccgctaaatgagtacgagaggattggattggagaaagcaaagaaagagttggcaggaagcattgagaaaggagtttccttcatcagaggctga

SEQ ID NO: 45247 - protein, 356 aa, Cucumis sativus
MQPIPDVNQRIARISAHLHPPKYQMEESSVLRRANCRAKGGAPGFKVAILGAAGGIGQPLAMLMKMNPLVSVLHLYDVVNAPGVTADISHMDTGAVVRGFLGQQQLERALTGMDLVVIPAGVPRKPGMTRDDLFKINAGIVKTLCEGIAKCCPTAIVNLISNPVNSTVPIAAEVFKKAGTYDPKRLLGVTMLDVVRANTFVAEVLGLDPRDVNVPVVGGHAGVTILPLLSQVKPPSSFTQEEINYLTDRIQNGGTEVVEAKAGAGSATLSMAYAAVKFADACLRGLRGDAGVVECAFVSSQVTELPFFATKVRLGRNGIDEVYSLGPLNEYERIGLEKAKKELAGSIEKGVSFIRG

SEQ ID NO: 45248 - DNA, 1071 bp, Oryza sativa
  CDS (1)..(1071)
atggaggacgcagcagcagcagcaaggcggatggagaggcttgcctcccacctccgcccgcccgcttctcagatggaggaatcacccctcctgaggggctccaattgccgggcaaaaggtgccgctccgggtttcaaggtcgccatcttgggagcgtctggtgggattggccagcctcttgcattgctcatgaagatgaaccctcttgtttctgtgctccatctgtacgatgttgtcaacactcccggtgtcacagctgacattagccacatgaacactggtgctgtggtgcgtggtttcttgggccagccacagttggaaaatgcccttactggaatggatcttgtgatcattcctgctggtgttcctcgtaagcctgggatgacaagggatgatttgttcaacatcaatgccggaatcgtccggactctttgtgaaggaatcgcaaaatgctgccccaatgcaattgtgaatgtgatcagcaaccctgtcaattctactgttccgattgctgctgaggtttttaagaaagctgggacatatgaccctaagcgccttttgggggtgacgacacttgatgtagtgagagccaatacttttgtggcagaagttcttgggcttgaccccagagatgtaaatgtccctgtcattggtgggcatgcaggagtaacaatattaccactcctttcacaggtgaatcctccctgctcattcacctcagaagaaattagttatcttaccactcgcatacagaatggtgggacagaagtagtcgaggctaaagctggagcggggtctgcaaccctttcaatggcgtatgcagcttctaaatttgcagatgcttgcttgagaggattgcgtggcgacgctgggatagtggagtgctcttttgtagcttctcaggtgacagagctgcctttctttgcatccaaagtgcggttaggtcgctgtggcatcgaggagatcttatcacttggtccattgaatgaattcgaaagagctggactggagaaggctaagaaggagctggccgagagtatccaaaagggggtcgctttcatcaacaagtga

SEQ ID NO: 45249 - protein, 356 aa, Oryza sativa
MEDAAAAARRMERLASHLRPPASQMEESPLLRGSNCRAKGAAPGFKVAILGASGGIGQPLALLMKMNPLVSVLHLYDVVNTPGVTADISHMNTGAVVRGFLGQPQLENALTGMDLVIIPAGVPRKPGMTRDDLFNINAGIVRTLCEGIAKCCPNAIVNVISNPVNSTVPIAAEVFKKAGTYDPKRLLGVTTLDVVRANTFVAEVLGLDPRDVNVPVIGGHAGVTILPLLSQVNPPCSFTSEEISYLTTRIQNGGTEVVEAKAGAGSATLSMAYAASKFADACLRGLRGDAGIVECSFVASQVTELPFFASKVRLGRCGIEEILSLGPLNEFERAGLEKAKKELAESIQKGVAFINK

SEQ ID NO: 45250 - DNA, 1077 bp, Brassica napus
  CDS (1)..(1077)
atggagtttcgtggagatgccaacaagaggattgctatgatatcagctcatcttcaaccttctttcactcctcagatggaggccaagaactctgtaatgggacgagaaaactgcagagcgaaaggagggaatccaggattcaaagtagctattcttggagcggcaggtggaataggacagtctctatccttgttaatgaagatgaaccctctcgtctctttacttcatctctacgatgttgtcaatgctcctggagtcactgctgatgttagccatatggacactggagctgttgttagaggattcttgggagccaagcaactcgaggacgccctaaccggtatggatcttgtgatcataccagctggtgtgccgaggaaaccagggatgacacgtgatgatctctttaaaatcaatgctgggattgttaagacactatgtgaaggagtagcgaaatgctgtcctaatgctatagttaacttgattagcaaccctgtgaactctactgtcgctattgctgctgaggttttcaagaaagctggaacttatgatcctaagaaactccttggagttactacacttgatgttgctcgtgccaacacatttgtggctgaagttcttggccttgatccaagagaagtcgatgtaccagtggttggaggacatgctggagtcacaatattgccactgttgtcacaggttaaacctccaagcagcttcacaccttcagagattgagtacctcacaaacaggattcaaaacggtggaactgaagttgtggaggcaaaagctggagctggatctgcaacactttcaatggcatatgctgcagccaagtttgcagatgcttgccttcgcgggttaagaggagatgcgaatgtcattgaatgctcttttgttgcttcacaggtgacagagttagcattctttgcaaccaaagtgcgtcttggacgtacaggagcagaggaagtgttccagcttgggcccttgaacgaatatgaaagggttggtctggagaaagcaaaagaagaactagctggaagtattcagaaaggtgtcgacttcatcaggaaatga

SEQ ID NO: 45251 - protein, 358 aa, Brassica napus
MEFRGDANKRIAMISAHLQPSFTPQMEAKNSVMGRENCRAKGGNPGFKVAILGAAGGIGQSLSLLMKMNPLVSLLHLYDVVNAPGVTADVSHMDTGAVVRGFLGAKQLEDALTGMDLVIIPAGVPRKPGMTRDDLFKINAGIVKTLCEGVAKCCPNAIVNLISNPVNSTVAIAAEVFKKAGTYDPKKLLGVTTLDVARANTFVAEVLGLDPREVDVPVVGGHAGVTILPLLSQVKPPSSFTPSEIEYLTNRIQNGGTEVVEAKAGAGSATLSMAYAAAKFADACLRGLRGDANVIECSFVASQVTELAFFATKVRLGRTGAEEVFQLGPLNEYERVGLEKAKEELAGSIQKGVDFIRK

SEQ ID NO: 45252 - DNA, 1026 bp, Brassica napus
  CDS (1)..(1026)
atgttcagatccgcgcttgtccgatcctccgcctcggcgaagcagtcgcttctccgccgcagcttctcttccggatccgtccccgagcgtaaagtcgccatcttgggagccgccggtggaatcggtcagcctctggctctcctcatgaaactcaatcccctcgtctcaagcctctccctttacgatatcgccaacacacccggagtcgccgctgacgtcggtcacatcaacaccagatctcaggtggttgggtacatgggagatgataacttggcgaaagctcttgaaggagctgacctcgttatcattccagctggtgtccccaggaagcctggtatgacccgtgatgatcttttcaacatcaatgctggcattgtcaagaacctttggtctgccatcgccaagtactgccctcatgcacttgttaatatgattagcaacccggtcaactctactgttccgattgcagcagagattttcaagaaggctggtatgtacgatgaaaagaagctgtttggtgttaccactcttgacgttgttagggtcaagacttcctatgctggaaaggctaatgtccctgttgcagaagttaatgttccggcgattgttggtcatgctggggttacaatcctcccactcttctctcaggccactccccaagctatcttgtcaggtgacgcgctcactgtcaccaccaagcgtactcaagatggaggtacagaagttgaagaggctaaggcagggaaaggttcagctacattgtcaatggcgtatgctggagcactattcgctgacgcatgcttgaagggactcaatggtgtcccagatgtagtcgaatgctcatacgtgcagtccacaatcactgagcttcctttctttgcctcaaaggtgaggttggggaagaacggtgttgaggaggttcttgatttggggccactctctgacttcgagaaggaaggcttggaagcattgagaccgggaatcaagtctaccattgagaagggagttaagtttgccaaccaatga

SEQ ID NO: 45253 - protein, 341 aa, Brassica napus
MFRSALVRSSASAKQSLLRRSFSSGSVPERKVAILGAAGGIGQPLALLMKLNPLVSSLSLYDIANTPGVAADVGHINTRSQVVGYMGDDNLAKALEGADLVIIPAGVPRKPGMTRDDLFNINAGIVKNLWSAIAKYCPHALVNMISNPVNSTVPIAAEIFKKAGMYDEKKLFGVTTLDVVRVKTSYAGKANVPVAEVNVPAIVGHAGVTILPLFSQATPQAILSGDALTVTTKRTQDGGTEVEEAKAGKGSATLSMAYAGALFADACLKGLNGVPDVVECSYVQSTITELPFFASKVRLGKNGVEEVLDLGPLSDFEKEGLEALRPGIKSTIEKGVKFANQ

SEQ ID NO: 45254 - DNA, 1026 bp, Caenorhabditis elegans
  CDS (1)..(1026)
atgtctcttccagcaaagaccctcgtccaggctgccgccaactctggactccgtgctgtctccgtccgtcattccagccaagctccaaaggtcgctcttcttggagctgccggaggaattggacagccattgggtctccttctcaagcaggatccacttgttgctcacctcgccctctacgacgtcgtcaatactccaggagttgccgccgatctttcgcacattgattctaatgccaaggttaccgctcacactggcccaaaggaactttacgccgccgttgagaacgctgatgttatcgttattccagccggagttccacgtaaaccaggaatgactcgtgacgatctcttcaacaccaacgcaggaatcgttcgcgatttagctgccgttatcgccaaagcttcaccaaaggctctcatcgcaattatcaccaacccagtcaattctactgtcccaatcgcttccgaagttctcaagaaggctggtgtctatgacccaaaacgtgtcttcggagtgacaaccctcgacgtcgtcagatctcaagcattcgtttccgagcttaagggacatgacgcctccaagaccgttgttccagttgtcggaggacatgctggaatcaccatcattccacttctctcccaagtcaaaccatccaccaaattctcggaggaagaaatctccaagttgaccccaagaatccaggacgccggaactgaagtcgtcaacgccaaggctggagccggatccgctactctttcaatggctcttgctggagcccgtttcgccaatgctcttgttcgtggaattaagggagaaaagaacgtccaatgcgcatatgttgcttccgatgccgtcaagggagtcgaatacttctctaccccagttgagctcggaccaaatggagttgagaagattcttggagttggaaaggtttctgcttatgagcagaagcttatcgacgcatccgttccagaacttaacaagaacattgccaagggagtcgctttcgttaagggaaactaa

SEQ ID NO: 45255 - protein, 341 aa, Caenorhabditis elegans
MSLPAKTLVQAAANSGLRAVSVRHSSQAPKVALLGAAGGIGQPLGLLLKQDPLVAHLALYDVVNTPGVAADLSHIDSNAKVTAHTGPKELYAAVENADVIVIPAGVPRKPGMTRDDLFNTNAGIVRDLAAVIAKASPKALIAIITNPVNSTVPIASEVLKKAGVYDPKRVFGVTTLDVVRSQAFVSELKGHDASKTVVPVVGGHAGITIIPLLSQVKPSTKFSEEEISKLTPRIQDAGTEVVNAKAGAGSATLSMALAGARFANALVRGIKGEKNVQCAYVASDAVKGVEYFSTPVELGPNGVEKILGVGKVSAYEQKLIDASVPELNKNIAKGVAFVKGN

SEQ ID NO: 45256 - DNA, 1122 bp, Chlamydomonas reinhardtii
  CDS (1)..(1122)
atgtctttgcaatcgtcaatccgtgccgactcaaactgcacgctgccaaacaaccctgtctgtgtacttttacctgttgactttattgtagcagccatggcctcgtctacttcctctgctatggccaagtgggccgcgcaagccgcgcggggctttgctgctgctgctccgagctcgggcaagggccgcaaggtcgccgtgctgggtgctgctggcggtattggccagcccctgtccatgctcatgaagatgaacagccaggtgtcgtctctgtcgctctacgatattgctggcacccccggtgtggccgctgatgtcagccacatcaacaccaaggcgcaggtcaagggcttcgacaaggacggcctggctgaggccctgcgtgggtgcgacctggtcatcatccccgccggtgtgccccgcaagcccggcatgacccgcgacgacctgttcaagatcaacgccggcatcgtgcgtgacctggtcaccgccgtgggccagcactgccccggggccgtgctgaacatcatctccaaccccgtcaacagcactgtgcccatcgcggccgagcagctgaagaagatgggcgtgtacgacaagcggaaggtgatgggcgtgaccaccctggacgtggtgcgtgccaagaccttctacgccgagaagaacggcctggacgtggccagcgtggacgtgcccgtggtgggcggccacgccggcgtgaccatcctgccgctgttctcccaggccacccccaaggccaccatgtcggctgaggtgctggacgcgctcaccaagcgtacccaggacggcggcactgaggtggtgcaggccaaggccggcaagggctcggccaccctgtccatggcctacgccgccgccctgttcgcggactcgtgcctgcgcggcctgaacggcgcccccgtggtggagtgcacctacgtggagtccaccgtcacggacgcgccctacttcgcctccaaggtcaagctcagcaccgagggtgtggacaagatccacgacctgggcccgctgtcggactacgagaaggccggcctcaaggccatgatgcccgagctgctggcgtcgatcgagaagggtgtgcagttcgtcaagggcgcctaa

SEQ ID NO: 45257 - protein, 373 aa, Chlamydomonas reinhardtii
MSLQSSIRADSNCTLPNNPVCVLLPVDFIVAAMASSTSSAMAKWAAQAARGFAAAAPSSGKGRKVAVLGAAGGIGQPLSMLMKMNSQVSSLSLYDIAGTPGVAADVSHINTKAQVKGFDKDGLAEALRGCDLVIIPAGVPRKPGMTRDDLFKINAGIVRDLVTAVGQHCPGAVLNIISNPVNSTVPIAAEQLKKMGVYDKRKVMGVTTLDVVRAKTFYAEKNGLDVASVDVPVVGGHAGVTILPLFSQATPKATMSAEVLDALTKRTQDGGTEVVQAKAGKGSATLSMAYAAALFADSCLRGLNGAPVVECTYVESTVTDAPYFASKVKLSTEGVDKIHDLGPLSDYEKAGLKAMMPELLASIEKGVQFVKGA

SEQ ID NO: 45258 - DNA, 1044 bp, Citrullus lanatus
  CDS (1)..(1044)
atgaaggcctcaattctcagatccgttcgttccgccgtttccagatcctcatcgtcgaatcgcctcttgagccgtagctttgcgaccgaatcggtgccggaaaggaaagtggccgttctcggtgccgccggtgggattggacagccattggcgcttctcatgaagcttaacccacttgtctctaagcttgccctctacgatattgccggtacccctggtgttgctgctgatgtcggccatgttaacactagatccgaggttactggctacgtgggtgaggagcaactcggcaaagctttggagggatccgatgttgtcatcattcctgctggcgttccaagaaagccgggcatgactcgtgatgatctcttcaacattaatgctggcattgttaaatcactttgcaccgccattgctaagtactgccccaatgcactcattaacatgatcagtaaccccgtcaactcaactgtcccaattgctgctgaggttttcaagaaagctggtacttacgatgagaagaaattgtttggtgttactactctagatgttgtcagagctaagaccttctacgctgggaaagcaaatgttccagtagccgaggttaatgtgcctgttattggtggccatgctggcattaccattcttccactattttctcaggctacccccagagctaatttgtcagatgatactattgtggctctcaccaagcgaacacaagatggaggaacagaagttgtggaagcaaaggcaggaaagggttctgctacattatcaatggcctatgctggagccctttttgccgatgcttgtcttaagggactaaatggagttccagatgttgtggaatgttcatttgtgcaatcaactgtcaccgaacttccattctttgcttcaaaggtgaagcttggaaagaatggggtagagtctgttttggatttgggtcctctctcagacttcgagaaagaaggtttggaaaagctcaagcccgagctcaaagcttctattgagaagggaatccagtttgcaaatgcaaattag

SEQ ID NO: 45259 - protein, 347 aa, Citrullus lanatus
MKASILRSVRSAVSRSSSSNRLLSRSFATESVPERKVAVLGAAGGIGQPLALLMKLNPLVSKLALYDIAGTPGVAADVGHVNTRSEVTGYVGEEQLGKALEGSDVVIIPAGVPRKPGMTRDDLFNINAGIVKSLCTAIAKYCPNALINMISNPVNSTVPIAAEVFKKAGTYDEKKLFGVTTLDVVRAKTFYAGKANVPVAEVNVPVIGGHAGITILPLFSQATPRANLSDDTIVALTKRTQDGGTEVVEAKAGKGSATLSMAYAGALFADACLKGLNGVPDVVECSFVQSTVTELPFFASKVKLGKNGVESVLDLGPLSDFEKEGLEKLKPELKASIEKGIQFANAN

SEQ ID NO: 45260 - DNA, 1044 bp, Eucalyptus gunnii
  CDS (1)..(1044)
atgagggcttcaatgttgaggttgatccgatcgcggtcgtcctccgccgccccgcggccgcacctcctccgccgggcatacggctcggagtcggtgccggagcggaaggtggccgtgctcggcgccgcgggcgggatcggccagcccctcgctcttctcatgaagctcaaccctctcgtctcccagctcgccctctacgatatcgccggcactcccggcgtcgccgccgacgtcggccacatcaacaccagatctgaggttgctggatacgtgggtgaggagcagcttgggcaagctttggagggatcggatgttgtcatcattccggctggtgtgccaaggaagcctgggatgacccgcgatgatctcttcaacattaatgctggcattgtcaagtccttgtgtactgcaattgccaagtactgcccgaatgcagttgtgaacatgattagcaaccctgtgaactcaacagtgccaattgctgctgagatctttaagaaggcagggacctataatgagaagaagcttttgggagtgacaacccttgatgttgttagggccaaaactttctatgctgggaaggctaaagtccctgttgaagaggtaaatgtgcctgttgttggcggtcatgcgggcattacaatcctccctctgttttctcaagccgtgcccaaggccaatttggccgatgaagacatcaaggcgcttaccaagcgtacacaagatggagggacggaagtcgtggaagcaaaggctggaaagggatctgcaacattgtccatggcgtatgctggagcattatttgcagatgcttgcctgaagggcctaaatggtgtccccgatgtggtggaatgttcctttgtgcagtctagcatcatcactgaacttcctttctttgcttcaaaggtgaaactcggaaagaatggcgtggaggaagttttggagttgggtcccatgtctgactatgagaagcaagggctggaaatcctgattcctgagctcaaagcatctattgagaaggggatcaagtttgccaatcagtaa

SEQ ID NO: 45261 - protein, 347 aa, Eucalyptus gunnii
MRASMLRLIRSRSSSAAPRPHLLRRAYGSESVPERKVAVLGAAGGIGQPLALLMKLNPLVSQLALYDIAGTPGVAADVGHINTRSEVAGYVGEEQLGQALEGSDVVIIPAGVPRKPGMTRDDLFNINAGIVKSLCTAIAKYCPNAVVNMISNPVNSTVPIAAEIFKKAGTYNEKKLLGVTTLDVVRAKTFYAGKAKVPVEEVNVPVVGGHAGITILPLFSQAVPKANLADEDIKALTKRTQDGGTEVVEAKAGKGSATLSMAYAGALFADACLKGLNGVPDVVECSFVQSSIITELPFFASKVKLGKNGVEEVLELGPMSDYEKQGLEILIPELKASIEKGIKFANQ

SEQ ID NO: 45262 - DNA, 1005 bp, Saccharomyces cerevisiae
  CDS (1)..(1005)
atgttgtcaagagtagctaaacgtgcgttttcctctacagttgccaacccttataaagtgactgttttgggtgcaggcggtggtattggacaaccattgtctttgcttctaaagcttaaccataaagtcacggacttaagactgtacgacctaaagggcgcaaaaggtgttgccaccgatttgtctcatattccaacaaactccgtggtcaaggggtttactccagaagagccagacggattgaacaacgctttaaaggacacagacatggttttaattcctgctggtgtgcccagaaagcctggtatgacacgtgatgacttgttcgccatcaacgcaagcatcgttcgcgatttggcagcagcaaccgccgaatccgctcccaatgctgccattctggtcatttccaacccagtcaattctaccgttccaattgtcgcccaagtcttgaaaaacaagggtgtttacaacccaaagaaattgttcggtgtgactaccttggactctattagagccgccagattcatctcagaagtcgagaacaccgatccaactcaggaaagggttaacgtcatcggtggacattctggtattaccatcatcccattgatttcgcaaacaaaccataagttgatgtctgatgacaagagacacgaattgattcacagaatacagtttggtggtgacgaagtcgtcaaagcaaagaatggtgctggctctgctacgttgtcaatggcccatgctggtgctaaattcgctaacgctgttttgtccggtttcaaaggcgaaagagacgtcatcgagccttccttcgtggactctcccttgttcaaatccgaaggcatcgaattctttgcatctccggtcactttgggcccagatggtattgaaaagatccatccaataggtgagttatcttcagaagaagaagaaatgctacaaaaatgtaaagaaaccttgaagaagaatatcgaaaagggtgtcaactttgttgctagtaaatag

SEQ ID NO: 45263 - protein, 334 aa, Saccharomyces cerevisiae
MLSRVAKRAFSSTVANPYKVTVLGAGGGIGQPLSLLLKLNHKVTDLRLYDLKGAKGVATDLSHIPTNSVVKGFTPEEPDGLNNALKDTDMVLIPAGVPRKPGMTRDDLFAINASIVRDLAAATAESAPNAAILVISNPVNSTVPIVAQVLKNKGVYNPKKLFGVTTLDSIRAARFISEVENTDPTQERVNVIGGHSGITIIPLISQTNHKLMSDDKRHELIHRIQFGGDEVVKAKNGAGSATLSMAHAGAKFANAVLSGFKGERDVIEPSFVDSPLFKSEGIEFFASPVTLGPDGIEKIHPIGELSSEEEEMLQKCKETLKKNIEKGVNFVASK

SEQ ID NO: 45264 - DNA, 972 bp, Anabaena sp
  CDS (1)..(972)
atgttttcttctccagactccccaattttgcattgtctacctcgtgtcgccattattggtgctggtagggttggtagcactttagctcaacgtattgctgagaaaaatttagcagatgtggtgctattagatattgttgagggtatacctcaaggattagcactagatttattagaagctaggggtattgaattgcataatcgtcagattatcggcacaaataattatgctgatacctctggttcgcaaatcgttgtcataacagccggatttccccgcaagccagggatgagtcgggatgatttgttgagaactaacgccaagattgttattgaggcagcaaagcaagcgatcgcctactctccctatgctatttttatcgtagtcaccaatcctttggatgtgatgacttatttagcttgggaagccacaggtttaccccgtaaccgcatcatgggtatggctggggtgttagactcggcaagatttgaaacttttattgctttagaattaggggtattacctgcggatgtcaaagcaatggtattgggtagccacggggatttgatggttcccctgtctcgttacgccacagttaatggtatccccattacacaattgttggatgcagtcacaatagaaaggttagtggaaagaacccgtaatggtggtgcggaaattgtggaattgatgcagactggtggcgcgttttttgcacctgcatcagctacaagtttgatggtggaatcaattttattgaatcagtcccggctgttacctgtgtctatatatctgcaaggcgaatacgatttaaaagatgtagtgattggtgttccttgtcggttgggattaaatggaattgagagtgtaatagaattaaatctcagtgatagtgaaagagaagctttacatatctcggctaaatcagtgcagaaaaatattgagcgatggcgttctctccagaatagctga

SEQ ID NO: 45265 - protein, 323 aa, Anabaena sp
MFSSPDSPILHCLPRVAIIGAGRVGSTLAQRIAEKNLADVVLLDIVEGIPQGLALDLLEARGIELHNRQIIGTNNYADTSGSQIVVITAGFPRKPGMSRDDLLRTNAKIVIEAAKQAIAYSPYAIFIVVTNPLDVMTYLAWEATGLPRNRIMGMAGVLDSARFETFIALELGVLPADVKAMVLGSHGDLMVPLSRYATVNGIPITQLLDAVTIERLVERTRNGGAEIVELMQTGGAFFAPASATSLMVESILLNQSRLLPVSIYLQGEYDLKDVVIGVPCRLGLNGIESVIELNLSDSEREALHISAKSVQKNIERWRSLQNS

SEQ ID NO: 45266 - DNA, 939 bp, Bacillus cereus
  CDS (1)..(939): transl_table=11
atgacaatcaaacgcaagaaggtttcagtcatcggtgcaggatttacaggagcaacaacggcattcttattagcacaaaaagaacttgcagatgttgtattagtggacattccacaactggaaaatccaacaaaagggaaagcgttagatatgttagaagcgagcccagtacaaggttttgatgctaacattattggaacatctgattacgcagatactgctgattctgacgttgtcgttattacagcaggtattgcacgtaagcctggtatgagccgtgatgacttagtagcaacaaactctaaaattatgaaaagtattacgcgcgacattgcaaaacattcaccaaatgcaattattgttgtgttaacaaatccagttgatgcaatgacatattctgtatttaaagaagcaggattcccgaaagagcgtgtaatcggccaatcgggtgtattagatacagctcgtttccgtacattcatcgcacaagaattaaatctttctgtaaaagacattacaggatttgttcttggcggacacggtgacgacatggtacctcttgtgcgttattcttatgcaggcggtattccgttagaaacgttaattccgaaagagcgtttagaagcaatcgtagaacgtacacgtaaaggtggcggtgagattgtaggcttattaggaaacggtagtgcatattacgcaccagcagcttctttagttgaaatgacagaagcaatcttaaaagatcaacgccgtatattaccagctattgcgtaccttgaaggtgagtatggttatagtgacctttacttaggggtaccagtaattctaggtggtaacggaattgaaaaaattattgaattagaacttcttgcagatgaaaaagaagcgttagatcgctctgtagaatctgtacgtaatgtaatgaaagttcttgtttaa

SEQ ID NO: 45267 - protein, 312 aa, Bacillus cereus
MTIKRKKVSVIGAGFTGATTAFLLAQKELADVVLVDIPQLENPTKGKALDMLEASPVQGFDANIIGTSDYADTADSDVVVITAGIARKPGMSRDDLVATNSKIMKSITRDIAKHSPNAIIVVLTNPVDAMTYSVFKEAGFPKERVIGQSGVLDTARFRTFIAQELNLSVKDITGFVLGGHGDDMVPLVRYSYAGGIPLETLIPKERLEAIVERTRKGGGEIVGLLGNGSAYYAPAASLVEMTEAILKDQRRILPAIAYLEGEYGYSDLYLGVPVILGGNGIEKIIELELLADEKEALDRSVESVRNVMKVLV

SEQ ID NO: 45268 - DNA, 945 bp, Bacillus halodurans
  CDS (1)..(945)
atggcaattaaacgcagaaaggtctccgttattggggcgggtttcacaggtgctacgacagcgctaatggttgctcaaaaggaattaggtgatgtcgttcttgtggatattccgcaaatggaaggtccgactaaaggaaaagcgttagatatgctcgagtcaacgccggttcaaggggttgatgtgaacatcacaggtacgtctagctatgaatatacgaaggattctgatgtggttgtcattacggctggaattgctcgtaagcctggtatgagccgcgatgatctcgtatcaacaaatgcgggaattatgaaggctgttacgaaagaagtggtgaaacattcaccaaacgcctacattattgttttaacgaacccagcagatgcgatgacctataccgtttataaagaatctggtttcccgaaaaaccgcgtcatcggtcaatcgggcgttctagatacggcacgcttccgtacgttcgtcgcccaagagcttaacctatctgttgaagatattacaggttttgttcttggggggcacggggatgacatggtgccattgattcgttactcctatgcaggtgggattccgcttgaaaagctccttccacaagagcgcatcgatgcgattgtggaacgtacgcgcaaaggcggcggtgaaattgtcggcttgcttggaaatggcagtgcttattatgcaccagccgcttcacttgcagagatggtcgaagccattctgaaagataagaaacgcgtccttccaacgattgcttaccttgaaggtgagtatggatatgaagatatctatgttggagttccgacgattcttggcggagacggcattgaaaaggttattgagcttgatctaaccgatgaagagaaagcgacctttgctaagtccattgaatctgttcgcaacgtcatgtcggcactaccaaaagaataa

SEQ ID NO: 45269 - protein, 314 aa, Bacillus halodurans
MAIKRRKVSVIGAGFTGATTALMVAQKELGDVVLVDIPQMEGPTKGKALDMLESTPVQGVDVNITGTSSYEYTKDSDVVVITAGIARKPGMSRDDLVSTNAGIMKAVTKEVVKHSPNAYIIVLTNPADAMTYTVYKESGFPKNRVIGQSGVLDTARFRTFVAQELNLSVEDITGFVLGGHGDDMVPLIRYSYAGGIPLEKLLPQERIDAIVERTRKGGGEIVGLLGNGSAYYAPAASLAEMVEAILKDKKRVLPTIAYLEGEYGYEDIYVGVPTILGGDGIEKVIELDLTDEEKATFAKSIESVRNVMSALPKE

SEQ ID NO: 45270 - DNA, 939 bp, Bacillus israeli
  CDS (1)..(939): transl_table=11
atggcgattaaaagaaagaaaatttctgtcattggtgctggatttactggtgcgacaacagcttttttgctggcaaaaaaagagctgggagatgttgtgctcgttgacattccgcaagcagagaatccgacaaaagggaaagcgttggacatgcttgaatcaagccctgttcttggatttgatgcgaacattatcggaacatcaaactatgaggaaacggctgattccgatattgttgtgatcacggcaggaattgcaagaaaacctggaatgagtcgagacgatttagtgcagaccaaccaaaaagtaatgaaaagcgtcacaaaagaagttgtaaaatattccccaaattccattatcattgtgctgacaaatccggttgatgcaatgacttacactgtttataaagaatccggatttccaaaacaccgcgtcatcggtcaatctggagttttagataccgcaagattccgcacatttgttgctcaagaattgaatttatcagtcaaagacattacaggatttgtgttaggcggccacggagatgatatggtgccattagttcgctattcatacgcagggggcattccgttagaaaaattaatcccgaaagagcgcttggaagcgattgttgaaagaactagaaaaggcgggggagaaattgttaacctgcttggaaacggaagcgcatactacgcaccagccgcatctcttgtagagatggtggaagcgattgttaaagatcagcgccgcgtattgcctgccattgcatatttagaaggagaatacggttttgaaggtatttatttaggcgttccaacaattcttggaggcaatggcttagagcaaattattgagcttgaactgacggatgaagaaaaagcagctttggaaaaatctgcggaatctgtaagaaatgttatgaaagcattaatatag

SEQ ID NO: 45271 - protein, 312 aa, Bacillus israeli
MAIKRKKISVIGAGFTGATTAFLLAKKELGDVVLVDIPQAENPTKGKALDMLESSPVLGFDANIIGTSNYEETADSDIVVITAGIARKPGMSRDDLVQTNQKVMKSVTKEVVKYSPNSIIIVLTNPVDAMTYTVYKESGFPKHRVIGQSGVLDTARFRTFVAQELNLSVKDITGFVLGGHGDDMVPLVRYSYAGGIPLEKLIPKERLEAIVERTRKGGGEIVNLLGNGSAYYAPAASLVEMVEAIVKDQRRVLPAIAYLEGEYGFEGIYLGVPTILGGNGLEQIIELELTDEEKAALEKSAESVRNVMKALI

SEQ ID NO: 45272 - DNA, 942 bp, Bacteroides thetaiotaomicron
  CDS (1)..(942): transl_table=11
atgtcaaaagtaaccgtagtaggcgcaggtaacgtaggtgctacatgtgcaaatgtacttgctttcaatgaagtagcagacgaagtagtaatgctggacgttaaagaaggcgtttcagaaggtaaagcaatggatatgatgcagacagctcaactgttgggtttcgacacaactgtagtaggctgcactaacgactatgctcagactgctaactctgacgttgttgtaattacttcaggtattcctcgtaaaccgggtatgactcgcgaagaactgatcggtgtaaacgctggtatcgttaaatcagtggcagaaaacatcttgaaatattctcccaatgcaatccttgttgttatctctaacccgatggatacaatgacttacctgtcattgaaagctctgggcttgccgaagaaccgcatcatcggtatgggtggcgcactggacagctctcgtttcaaatatttcttgtctcaggctttgggctgcaacgccaacgaagtagaaggtatggttatcggtggtcacggtgatactactatgattcctttgactcgcttcgctacttacaaaggtatgcctgtaactaacttcatctctgaagaaaaactgaacgaagtggctgctgctactatggtaggtggtgctactctgactaagttactgggcacttctgcatggtatgcaccgggtgcagcaggagcattcgtagttgaatctatccttcacgaccaaaagaagatgatcccttgttcagtatatctggaaggagaatacggtgaatcagacatttgcatcggtgttcctgtaatccttggcaagaacggtatcgaaaagatcgtcgaactggatctgaacgctgacgaaaaagctaagttcgctgccagcgcaaaagctgttcacggaacaaacgctgctttgaaagaagtaggtgctctgtaa

SEQ ID NO: 45273 - protein, 313 aa, Bacteroides thetaiotaomicron
MSKVTVVGAGNVGATCANVLAFNEVADEVVMLDVKEGVSEGKAMDMMQTAQLLGFDTTVVGCTNDYAQTANSDVVVITSGIPRKPGMTREELIGVNAGIVKSVAENILKYSPNAILVVISNPMDTMTYLSLKALGLPKNRIIGMGGALDSSRFKYFLSQALGCNANEVEGMVIGGHGDTTMIPLTRFATYKGMPVTNFISEEKLNEVAAATMVGGATLTKLLGTSAWYAPGAAGAFVVESILHDQKKMIPCSVYLEGEYGESDICIGVPVILGKNGIEKIVELDLNADEKAKFAASAKAVHGTNAALKEVGAL

SEQ ID NO: 45274 - DNA, 963 bp, Bartonella henselae
  CDS (1)..(963): transl_table=11
atggcacgaaagaaaatagctcttattggttcgggtatgattgggggtactttagcacatataattggacttaaagaacttggtgatgtcgtcttatttgatattgcagaaggtataccacaaggtaaagctcttgatatcgccgaatcttcaccagttgacggttttgatgtcagtttaaccggtgctaattcctatgatgtgattgaaggtgccgatgttgttattgtaacagcaggtgttgcaagaaaacccggtatgagccgtgatgaccttttgggcattaatttaaaggtaatggaacaagttggtgcggggattaaaaaatatgcatcttcagcattcgttatttgtattacaaatcctcttgatgcaatggtctgggctttgcaaaaattttcaggtcttccaacacaaaaagtggttggtatggctggtattctcgattcagcacgttttcgtcatttcttatcagaggaatttaagatctctgttaaagatgtgactgcattcgttttaggaggacacggtgattcaatggtgcctttggtgcgttattcaacagttggtggtatttctctacccgatcttgtgaaaatgggctggacgacgcaagaaaagattgatcaaattattcaacgtacccgtgatggtggtgcagaaattgttagtttgttaaaaacaggttctgctttttatgcaccagcagcttctgctgtctctatggctgaagcctatttgaaagacaccaagcgtgttgttcctgtcgcagcttatctttcagggcaatatggggtcaaagatacctatgttggtgttccggttgtcattggtgctgggggcgttgagcgcgtgattgaaatcgatcttgataaagaggagaaagctgcttttgaaaaatcagtgagtgcagtgcaaaaactttgtgaagcttgtattgctgttgcaccaggactcaaataa

SEQ ID NO: 45275 - protein, 320 aa, Bartonella henselae
MARKKIALIGSGMIGGTLAHIIGLKELGDVVLFDIAEGIPQGKALDIAESSPVDGFDVSLTGANSYDVIEGADVVIVTAGVARKPGMSRDDLLGINLKVMEQVGAGIKKYASSAFVICITNPLDAMVWALQKFSGLPTQKVVGMAGILDSARFRHFLSEEFKISVKDVTAFVLGGHGDSMVPLVRYSTVGGISLPDLVKMGWTTQEKIDQIIQRTRDGGAEIVSLLKTGSAFYAPAASAVSMAEAYLKDTKRVVPVAAYLSGQYGVKDTYVGVPVVIGAGGVERVIEIDLDKEEKAAFEKSVSAVQKLCEACIAVAPGLK

SEQ ID NO: 45276 - DNA, 963 bp, Bartonella quintana
  CDS (1)..(963): transl_table=11
atggcacgaaagaaaatagctctcattggttcgggtatgattgggggtacgttagcacatatgatagggcttaaagaacttggtgatgttgtcttatttgatattgaagaaggcatgccacaaggtaaggctcttgatattgccgaatcttcaccagttgatggttttgatgtgagtttaacaggtgctaatgtttatgaggcaattgaaggtgctgatgttgtgattgtaacggcaggcgttgcacgaaaacctggtatgagccgtgatgatcttctgggcattaatttgaaagtgatggaacaagttggtgctgggattaaaaaatacgcatcttcagcattcgttatttgtattacgaaccctcttgatgcaatggtatgggcattgcaaaaattttcaggtcttcccaaacaaaaagtagttggtatggctggtgttcttgattcggcacgttttcgttatttcttatctaaggaatttaaggtctctgttaaagacgtgacagcgtttgttttaggaggacacggcgattcaatggtgcctttggtgcgttattcaacagttggtggtatttctttgcccgatcttgtgaaaatgggctggacgacacaagaaaagattgatcaaattatccaacgtgtccgtaatggtggtgcggaaattgtcggtttgttaaaaactggttctgctttttatgcacctgcagcctctgctatttctatggctgaagcttatttgaaggatattaagcgtgttgttcctgttgcaacctatctttcaggtgaatatggggtcaaagacacatatgttggtgttcctgttgttcttggtgcgggcggcgttgagcgggtcattgaaatcgatcttgataaaaaggaaagaagtgcttttgagcaatcagtaaatgcggtaaaaaaactttgtgaagcttgtatcgctattgcaccttgtctcaaataa

SEQ ID NO: 45277 - protein, 320 aa, Bartonella quintana
MARKKIALIGSGMIGGTLAHMIGLKELGDVVLFDIEEGMPQGKALDIAESSPVDGFDVSLTGANVYEAIEGADVVIVTAGVARKPGMSRDDLLGINLKVMEQVGAGIKKYASSAFVICITNPLDAMVWALQKFSGLPKQKVVGMAGVLDSARFRYFLSKEFKVSVKDVTAFVLGGHGDSMVPLVRYSTVGGISLPDLVKMGWTTQEKIDQIIQRVRNGGAEIVGLLKTGSAFYAPAASAISMAEAYLKDIKRVVPVATYLSGEYGVKDTYVGVPVVLGAGGVERVIEIDLDKKERSAFEQSVNAVKKLCEACIAIAPCLK

SEQ ID NO: 45278 - DNA, 969 bp, Bradyrhizobium japonicum
  CDS (1)..(969)
atggcgcgcgacaagattgctttgattggctccggtcagatcggcggaacgctggctcacctcatcggcctgaaagaactgggcgacgtcgtgatgttcgacatcgccgagggcgtgccgcagggcaaggcgctcgacattgcgcagtcctcgccggtcgacggcttcgacgcccactacaccggcgcgaactcctacgaggcgctcgacaacgccaaggtctgcatcgtcaccgccggcgtgccgcgcaagcccggcatgagccgcgacgatctcctctccatcaacctcaaggtcatggagcaggtcggcgccggcatcaagaagtatgcccccgacgccttcgtcatctgcatcaccaacccgctcgacgccatggtgtgggcgctccagaaggcctcgggcctgccgcacaagaaggtcgtcggcatggccggcgtgctggactcggcgcgcttccgctacttcctggccgacgaattcaacgtctccgttgaagacgtcaccgccttcgtgctcggcggccacggcgacaccatggtgccgctggtgaagtactccaccgtcgccggcatcccgctgcccgacctcgtcaagatgggctggacctcgcaggcgcgcctcgacgagatcgtcgaccgcacccgcaacggcggcgctgagatcgtcaacctgctcaagaccggctcggccttctacgccccggccgcttccgcgatcgcgatggccgagagctatctgcgtgacaagaagcgcgtgctgcccagcgccgcctacctcaacggcgaatacggcgtgaaggacatgtatgtcggcgtgcccgtcgtgatcggctccaagggtgtcgagcgcgtcgtcgagatcgagctcgccggcaaggaccgcgaggccttcgacaagtcggtcggcgcggtgcagggcttggtcgacgcctgcaagaagattgcccccgatcttctcggccgctaa

SEQ ID NO: 45279 - protein, 322 aa, Bradyrhizobium japonicum
MARDKIALIGSGQIGGTLAHLIGLKELGDVVMFDIAEGVPQGKALDIAQSSPVDGFDAHYTGANSYEALDNAKVCIVTAGVPRKPGMSRDDLLSINLKVMEQVGAGIKKYAPDAFVICITNPLDAMVWALQKASGLPHKKVVGMAGVLDSARFRYFLADEFNVSVEDVTAFVLGGHGDTMVPLVKYSTVAGIPLPDLVKMGWTSQARLDEIVDRTRNGGAEIVNLLKTGSAFYAPAASAIAMAESYLRDKKRVLPSAAYLNGEYGVKDMYVGVPVVIGSKGVERVVEIELAGKDREAFDKSVGAVQGLVDACKKIAPDLLGR

SEQ ID NO: 45280 - DNA, 963 bp, Brucella suis
  CDS (1)..(963)
atggcacgcaacaagattgccctcatcggctccggcatgatcggcggtacgctcgctcacctggccggtctgaaggaactcggtgacgtcgtccttttcgacattgcggaaggcaccccgcagggcaaggggctggatatcgccgaatcttctccggtcgatggtttcgatgcgaagttcactggcgcgaacgattacgccgccattgaaggcgcagacgtcgtcatcgtcaccgcaggcgtgccgcgcaagccgggcatgagccgcgacgatctcctgggcatcaacctgaaggtgatggaacaggtgggcgcgggcatcaagaaatatgcgccggaagctttcgtcatctgcatcaccaacccgctcgacgccatggtctgggcgctgcagaagttctccggccttccggcccacaaggttgtcggcatggctggcgttctcgacagcgcccgcttccgttatttcctctcggaagaattcaacgtttcggtcgaggacgtcacggcattcgtgctgggtggccacggcgattcgatggttccgctggcgcgctactcgaccgttgccggcattccgctgcctgatctcgtcaagatgggctggaccagccgggacaagctcgacaagatcatccagcgcacccgtgacggcggcgcggaaatcgtgggccttctcaagaccggctcggctttctacgctccggcggcatcggccatccaggtggctgaatcctacctcaaggacaagaagcgcgtcctgccggtcgcagcccagctttcgggccagtatggcgtgaaggacatgtatgtgggcgttccgaccgtgatcggcgccaatggcgtggagcgcatcatcgagatcgatctcgacaaggacgagaaggcgcagttcgacaagtcggtggcctccgtcgccggtctgtgcgaagcctgcatcggtattgctccgtcgctgaaataa

SEQ ID NO: 45281 - protein, 320 aa, Brucella suis
MARNKIALIGSGMIGGTLAHLAGLKELGDVVLFDIAEGTPQGKGLDIAESSPVDGFDAKFTGANDYAAIEGADVVIVTAGVPRKPGMSRDDLLGINLKVMEQVGAGIKKYAPEAFVICITNPLDAMVWALQKFSGLPAHKVVGMAGVLDSARFRYFLSEEFNVSVEDVTAFVLGGHGDSMVPLARYSTVAGIPLPDLVKMGWTSRDKLDKIIQRTRDGGAEIVGLLKTGSAFYAPAASAIQVAESYLKDKKRVLPVAAQLSGQYGVKDMYVGVPTVIGANGVERIIEIDLDKDEKAQFDKSVASVAGLCEACIGIAPSLK

SEQ ID NO: 45282 - DNA, 930 bp, Chloroflexus aurantiacus
  CDS (1)..(930): transl_table=11
atgcgcaagaagattagtattatcggggcaggatttgtcggttcgacgacagctcactggctggccgctaaagaattaggtgacattgttctgcttgatattgtcgagggtgtgcctcaaggcaaggctctcgatctctacgaggcatcaccaattgaagggtttgatgttcgggtgaccggcacgaacaactacgccgatactgccaactcggatgtcatcgttgttacgtcaggtgctccgcgcaagccgggcatgagccgtgaggatttgatcaaggtcaacgccgacatcacccgtgcctgtatcagtcaggctgccccgctctcgccgaatgccgtgattatcatggtcaataatcctctggatgcgatgacctatctggcggcggaggttagtggcttccccaaagagcgtgtcattggtcaggccggcgtcctcgatgcggcccgctatcgcaccttcattgccatggaggcgggtgtttcggttgaagatgttcaggcgatgctgatgggtggtcacggcgatgagatggtaccgctgccccggttttcaaccattagcggtattccggtgagcgagttcattgcgcctgatcgtctggctcagattgttgagcgcacccggaagggtggtggcgagattgtgaatctgctgaagaccggcagtgcgtattatgctcccgccgccgccacagcgcagatggtcgaagcggtgctcaaagacaagaagcgggtcatgccggtggcagcctacctgaccggtcagtacggcctgaatgatatttactttggtgtaccggtgatcctcggtgccggtggagtagagaaaattctcgaattgccgctcaacgaagaggagatggcactgctgaacgcatcggcgaaagcggtacgtgccaccctcgacacgctgaagtctctctaa

SEQ ID NO: 45283 - protein, 309 aa, Chloroflexus aurantiacus
MRKKISIIGAGFVGSTTAHWLAAKELGDIVLLDIVEGVPQGKALDLYEASPIEGFDVRVTGTNNYADTANSDVIVVTSGAPRKPGMSREDLIKVNADITRACISQAAPLSPNAVIIMVNNPLDAMTYLAAEVSGFPKERVIGQAGVLDAARYRTFIAMEAGVSVEDVQAMLMGGHGDEMVPLPRFSTISGIPVSEFIAPDRLAQIVERTRKGGGEIVNLLKTGSAYYAPAAATAQMVEAVLKDKKRVMPVAAYLTGQYGLNDIYFGVPVILGAGGVEKILELPLNEEEMALLNASAKAVRATLDTLKSL

SEQ ID NO: 45284 - DNA, 960 bp, Francisella novicida
  CDS (1)..(960): transl_table=11
atggctagaaaaaaaatagcacttgttggtgctggtaatattggtggtacactagctcacttagcacttttaaaacaattaggtgatgtagtcctttttgatatagctcagggcatgcctaatggcaaagcacttgatttactacaaacttgtcctatcgagggagttgattttaaagtcaggggtacaaatgattacaaagatttagaaaattctgatgttgttattgtaactgctggtgttccgagaaagcctggcatgtctcgtgatgacttacttggtattaatatcaaagtaatgcaaacagttggagaaggtatcaaacataactgtcctaatgcttttgtaatatgtatcacaaatccactagatattatggtaaatatgttacaaaaattctcaggcgtaccagataacaaaatcgttggtatggctggtgttttagattctgctagatttagaacatttttagcagatgaactaaatgtatcagtacaacaagtacaagcatatgtaatgggtggtcatggcgatactatggtccctttaactaaaatgtcaaatgttgcaggtgtgtcgttagagcagctagttaaagaaggtaaacttaaacaagagcgtttagatgctatagtatcgagaactagaagtggtggtggcgaaattgttgctttacttaaaacaggttcagcatattatgcaccagctgctgcaggtattcaaatggctgaaagcttcttaaaagataaaaagatgattttaccttgtgctgcaaaagtaaaagctggtatgtatggtcttgatgaagatctatttgttggtgtaccaactgagatttctgcaaatggtgtcagacctattgaagtagagatttctgataaagaaagagaacaattacaagtatctataaacgctgtaaaagatcttaataaagcagctgctgaaattttagcaaaataa

SEQ ID NO: 45285 - protein, 319 aa, Francisella novicida
MARKKIALVGAGNIGGTLAHLALLKQLGDVVLFDIAQGMPNGKALDLLQTCPIEGVDFKVRGTNDYKDLENSDVVIVTAGVPRKPGMSRDDLLGINIKVMQTVGEGIKHNCPNAFVICITNPLDIMVNMLQKFSGVPDNKIVGMAGVLDSARFRTFLADELNVSVQQVQAYVMGGHGDTMVPLTKMSNVAGVSLEQLVKEGKLKQERLDAIVSRTRSGGGEIVALLKTGSAYYAPAAAGIQMAESFLKDKKMILPCAAKVKAGMYGLDEDLFVGVPTEISANGVRPIEVEISDKEREQLQVSINAVKDLNKAAAEILAK

SEQ ID NO: 45286 - DNA, 954 bp, Geobacter sulfurreducens
  CDS (1)..(954): transl_table=11
atggcacgtaagaagattgctctcattggtggtggccagatcggtggtgtgcttgctcaactctgcgctctccgtgaacttggcgacgtcgtcctgttcgatatcgtagaaggccttccccaggggaaatgcctggatatcgccgaagcttctcctgttgacggctttgacgtctgcctgaagggtaccaacagctacgaggatatcgctggcgccgacgttgtcatcgtgactgcgggccttccccgtaagcccggcatgagccgtgacgacctcatcgaggtcaactccaagatcatgacgtcggttgccgaggggatcaagcagtacgcacccaattccttcgtgattgtaatttccaaccctctggacgccatggttaccctctgccagaaggtcaccggtttcccctacaaccgcgtcatcggtcaggccggagttctcgactccgcccgttttgccaccttcatcgcctgggaacttggcgtgtccgtaaaggacgtcaccgccatgactcttggcggccacggcgacgacatggtgccgctggttcgctacgccagcgtcaaaggtatcccggtcatggaactccttgagcgcaagtacggcagtaaggagaaggcgaaggaagtcatggacgccatggtcaaccgtacccgtctggcgggcggcgaagtcgttgccctcctcaagaccggttccgccttctacagccctgcgtccagcgccattgccatggccgagtctatcctcaaggatcagaagcgggttcttccgacctgtgcctacctccagggagagttcggtgtcaacggctactatgtgggcgtaccctgcgtgctcggcgagaagggtatcgagaatatcattgagttctctctcgacgcagaagaacaagcgatgatggacaagtcggtcgcagcggtaaagagcctcgtcgacagcctcaagtaa

SEQ ID NO: 45287 - protein, 317 aa, Geobacter sulfurreducens
MARKKIALIGGGQIGGVLAQLCALRELGDVVLFDIVEGLPQGKCLDIAEASPVDGFDVCLKGTNSYEDIAGADVVIVTAGLPRKPGMSRDDLIEVNSKIMTSVAEGIKQYAPNSFVIVISNPLDAMVTLCQKVTGFPYNRVIGQAGVLDSARFATFIAWELGVSVKDVTAMTLGGHGDDMVPLVRYASVKGIPVMELLERKYGSKEKAKEVMDAMVNRTRLAGGEVVALLKTGSAFYSPASSAIAMAESILKDQKRVLPTCAYLQGEFGVNGYYVGVPCVLGEKGIENIIEFSLDAEEQAMMDKSVAAVKSLVDSLK

SEQ ID NO: 45288 - DNA, 975 bp, Haemophilus ducreyi
  CDS (1)..(975): transl_table=11
atgaaagttactgtattaggcgctgcaggtgggataggacaaacgttatctctgttattaaagcttcgtttaccggcgggggcagatttagcactatatgatatttcgccggttacgccgggcattgcagttgatattagccatattccaacctcggtcaatgcgatagggtatgcgggtgaagatccgtccgtcgcactaaaagatccgtccgtcgcactaaaagatactaatttagtgatcattaccgcaggtattgcacgtaaaccgggtatgactcgtgctgacttatttaatattaatgccggtattgtgaaagatttagttgagaaagttgctgaggtttgcccaatggcttgcattggcattgtgactaatccggttaatacattggtgccgattgctgctgaagtattacgtaaagcgggggtatatgataaaagtaaattattcggtgtaacaacgttagacgttgtgcgtgctaaaacatttgtatcagaattaaaacacaaaaatgttgaaacagtcactgtgccagtcgtgggagggcattcagggacaactattttaccgcttctttcgcaagccttagcggaaggtcggttattagatttttcacaaacagaaattgagtcgcttactcagcggatcaaaaatgcagggacggaagtggtggaggctaaagcgggtggcggttcggcaacgctgtcaatggcagagtcaggtgcacgttttgcgctagctgtctttaaagcactattaggagaagattgcgtgcgttatgcttatgtccagagtaaagaaggctcaggatatccggagttttttgcacatcctgtccgctttggtttaaaaggtattgaagaaattctgccgattgcgccattaaatgaatatgaacaaacgcagtttgaagaacttaagcctatattagaggcggatattgaattgggtaagaaattcgttaatccataa

SEQ ID NO: 45289 - protein, 324 aa, Haemophilus ducreyi
MKVTVLGAAGGIGQTLSLLLKLRLPAGADLALYDISPVTPGIAVDISHIPTSVNAIGYAGEDPSVALKDPSVALKDTNLVIITAGIARKPGMTRADLFNINAGIVKDLVEKVAEVCPMACIGIVTNPVNTLVPIAAEVLRKAGVYDKSKLFGVTTLDVVRAKTFVSELKHKNVETVTVPVVGGHSGTTILPLLSQALAEGRLLDFSQTEIESLTQRIKNAGTEVVEAKAGGGSATLSMAESGARFALAVFKALLGEDCVRYAYVQSKEGSGYPEFFAHPVRFGLKGIEEILPIAPLNEYEQTQFEELKPILEADIELGKKFVNP

SEQ ID NO: 45290 - DNA, 936 bp, Haemophilus influenzae
  CDS (1)..(936): transl_table=11
atgaaagttgctgtattaggtgccgcaggtggtattggtcaagcattagcgttattactaaaacttcagttgccagcaggtaccgacttatcattgtatgatattgcccctgttaccccaggtgttgcagtggatgtgagccatattccaacggcagtgaatgtgaaaggtttttctggtgaagatccaactccagcacttgaaggtgcggatgttgtattaatttctgctggtgttgcacgtaaacctggtatggatcgttcagatttattcaatattaatgcaggtatcgtgcgtggtttaattgaaaaagtcgcggttacttgtccgaaagcatgcgttggtatcatcactaacccagtaaatactaccgttgcgattgcggctgaagtgctgaaaaaagcaggcgtttacgacaaacgtaaattatttggtgtgacaactttagacgtgttgcgttctgaaacctttgtggctgaattaaaaggtttaaatgtttctcgtacaagcgttcctgttattggtggtcactctggtgtgactattcttccattactttctcaagttcaatatgcaaaatggaatgaagatgaaatcgaaccattaacaaaacgtatccaaaatgcaggtacagaagtgctcaatgcaaaagcgggtggcggttctgcaaccctttcaatggcgcaagctgcagcacgttttgcgcgttctttagtgaaaggattaagtggcgagacagtggttgaatgtacttatgttgaaggtgatggaaaatatgctcgtttcttctctcagccagttcgtttaggtaaagaaggtgtagaagaaattttaccaattggtccattaagcaattttgaacaacaagccttagaaaatatgttgccaactttacgtgcagatattgaattaggcgaaaaatttattaatggttaa

SEQ ID NO: 45291 - protein, 311 aa, Haemophilus influenzae
MKVAVLGAAGGIGQALALLLKLQLPAGTDLSLYDIAPVTPGVAVDVSHIPTAVNVKGFSGEDPTPALEGADVVLISAGVARKPGMDRSDLFNINAGIVRGLIEKVAVTCPKACVGIITNPVNTTVAIAAEVLKKAGVYDKRKLFGVTTLDVLRSETFVAELKGLNVSRTSVPVIGGHSGVTILPLLSQVQYAKWNEDEIEPLTKRIQNAGTEVLNAKAGGGSATLSMAQAAARFARSLVKGLSGETVVECTYVEGDGKYARFFSQPVRLGKEGVEEILPIGPLSNFEQQALENMLPTLRADIELGEKFING

SEQ ID NO: 45292 - DNA, 948 bp, Helicobacter hepaticus
  CDS (1)..(948): transl_table=11
atgtttgagaaaattgctatcataggcggctctggcaatgtcggttctcatattgcattcttaggtgctatgcgacatattgcaaaagagattctcctttttagcaatgatattcctcgttgcaaaggtgtagggcttgatatttcccaagctgcagctatttttgatattcctattcttattaagggttgtaatagctatgaagaaatagctgaaagtgaagtggttattatcaccgctggatttccacgcacaccaaatatgacgcgtaatgatttgcttcttaaaaatgcaagtattatacaagaaatcagctcaaatgtcgctagaatcgctcctcaatccttactaattgttgtttcaaatccacttgatgcaatgtgtcttgtagcaaagcagtggagtaagtttgaaaaagaacgtgtcatcggtatggcagggattcttgatagtgcacgacttacctatgaaagcaaagtaatgcttggagattttaacaaacatatacaatcgtatgtaataggctctcatagcgatgatatgttacccttgctacgtcattgcctatgtgagggcaaagtttttactgatattttcactcctaaaatgcaagaggagctcatcaaggaaacaaaggggggtggagctaaaattgtaaattattatcagaaaggctcagcgtattttgctcctgcaagcggggtgataaaaatacttgaagctattagcactctaaatgaggaaatactcgtatgtagcgtatttacagagggtgaatatggaataaaagatatttatcttggacttccaattaaacttggcaaaaaaggagtagaacacattgtagaattaccactaaatcagcaagagcaggaaatgttaaatatttccacacaaggtatcaaagaacaagttgagattcttaaagataacaagttgttgtattaa

SEQ ID NO: 45293 - protein, 315 aa, Helicobacter hepaticus
MFEKIAIIGGSGNVGSHIAFLGAMRHIAKEILLFSNDIPRCKGVGLDISQAAAIFDIPILIKGCNSYEEIAESEVVIITAGFPRTPNMTRNDLLLKNASIIQEISSNVARIAPQSLLIVVSNPLDAMCLVAKQWSKFEKERVIGMAGILDSARLTYESKVMLGDFNKHIQSYVIGSHSDDMLPLLRHCLCEGKVFTDIFTPKMQEELIKETKGGGAKIVNYYQKGSAYFAPASGVIKILEAISTLNEEILVCSVFTEGEYGIKDIYLGLPIKLGKKGVEHIVELPLNQQEQEMLNISTQGIKEQVEILKDNKLLY

SEQ ID NO: 45294 - DNA, 924 bp, Methanosarcina acetivorans
  CDS (1)..(924): transl_table=11
atggctaaaatctctgtaattggtgcaggaaatgtaggtgcgaccacagttcagcggctggccgaactggaacctggcgaaattgtcatgacagatattgtggaagggttaccgcagggaaaagcccttgacctcatgcaggcaggggcaataaatggttatgatacgcaggtaacgggtactaacgattatgcagacattacagattctgacctggtgatcattacagccggaattgccagaaaacccggaatgaccagggaagatctgatgaaaaccaattcaaaaataataggggaggtctcccgaaacattgcagagtatgctccgaactctattgttataaatgtcacaaacccgcttgatgttataacttatgtggctatgaaaacaacaggctttgagacaaaaaaagtcttcggaatgagtggagtgcttgatgcagggcgttttgcaagctttatagcagaagaactgaattgttcgaaaaaagacatcgaggcaatggtaataggagggcacggagaccttatggtccccctcccccagtataccaccgtatcgggaattccgcttccggaactgctcccggaggagacaattgccaggcttgtagaaaggacggtgaacggaggagccgaaatagtagggcttctcaaacaggggagtgctttttatgccccgtctgcggccattgtgagcgttgcagaagccgtgcttaaggattcaaagcgcatccttccgacgtctgcatatcttgaagggcagtacgggcaagaaggaatttatttcggagtgctggcgaaactgggagcaaacggggtagaagaagtcctcgagctcaaacttgaggaaaaccagtacgagatcctcaggaagtcttcagaaacgatcaaaaggggaatctcaaaactgggaatatga

SEQ ID NO: 45295 - protein, 307 aa, Methanosarcina acetivorans
MAKISVIGAGNVGATTVQRLAELEPGEIVMTDIVEGLPQGKALDLMQAGAINGYDTQVTGTNDYADITDSDLVIITAGIARKPGMTREDLMKTNSKIIGEVSRNIAEYAPNSIVINVTNPLDVITYVAMKTTGFETKKVFGMSGVLDAGRFASFIAEELNCSKKDIEAMVIGGHGDLMVPLPQYTTVSGIPLPELLPEETIARLVERTVNGGAEIVGLLKQGSAFYAPSAAIVSVAEAVLKDSKRILPTSAYLEGQYGQEGIYFGVLAKLGANGVEEVLELKLEENQYEILRKSSETIKRGISKLGI

SEQ ID NO: 45296 - DNA, 963 bp, Methylobacterium extorquens
  CDS (1)..(963): transl_table=11
atggcacgcagcaagatcgcgctcatcggcgccggacagatcggcggcacgctggcccatctcgccggcctcaaggaactcggtgacgtggtgttgttcgacatcgtcgacggcgtgccgcagggcaaggcgctcgacatcgccgaatccgctcccgtcgacggcttcgatgccaagtattcgggcgccagcgactattccgcgatcgccggggccgacgtggtgatcgtgaccgcgggcgtgccgcgcaagcccggcatgagccgtgacgacctcatcggcatcaacctgaaggtgatggaggcggtcggcgccggcatcaagaagcacgcgcccgacgccttcgtgatctgcatcgccaacccgctcgatgcgatggtgtgggcgctgcagaagttctcggggctgcccaccaacaaggtcgtcggcatggccggcgtgctcgactccgcccgcttccgccacttcctggccgaagagttcggcgtctcggtcgaggacgtgaccgccttcgtgctcggcggccacggcgacgacatggtgccgctgacccgctactcgacggtggccggcgtgccgctgaccgatctggtcaagctcggctggaccacccaggagaagctcgacgccatggtcgagcgcacccgcaagggtggcggcgagatcgtcaacctcctgaagaccggctcggccttctacgcgcccgccgcctccgccatcgccatggccgagagctacctgcgcgacaagaagcgggttctgccctgcgccgcctacctcgacggccagtacggcatcgacggcctctatgtcggcgtgccggtggtgatcggcgagaacggcgtcgagcgtgtgctcgaagtgaccttcaacgacgacgagaaggcgatgttcgagaagtcggtcaattcggtgaagggcttgatcgaggcctgcaagagcgtcaacgacaagctcgcgtaa

SEQ ID NO: 45297 - protein, 320 aa, Methylobacterium extorquens
MARSKIALIGAGQIGGTLAHLAGLKELGDVVLFDIVDGVPQGKALDIAESAPVDGFDAKYSGASDYSAIAGADVVIVTAGVPRKPGMSRDDLIGINLKVMEAVGAGIKKHAPDAFVICIANPLDAMVWALQKFSGLPTNKVVGMAGVLDSARFRHFLAEEFGVSVEDVTAFVLGGHGDDMVPLTRYSTVAGVPLTDLVKLGWTTQEKLDAMVERTRKGGGEIVNLLKTGSAFYAPAASAIAMAESYLRDKKRVLPCAAYLDGQYGIDGLYVGVPVVIGENGVERVLEVTFNDDEKAMFEKSVNSVKGLIEACKSVNDKLA

SEQ ID NO: 45298 - DNA, 942 bp, Methanococcus jannaschii
  CDS (1)..(942): transl_table=11
atgaaagttacaattataggagcttctggtagagttgggagtgcaacagccttattattagctaaagaaccttttatgaaggatttggtgttaattggaagagaacattcaataaataaattggaaggattgagagaagacatctacgatgccttagctgggacaagaagtgatgcaaatatatacgttgagagtgatgaaaatctaaggataattgatgaaagtgatgttgttataataacaagcggtgttccaagaaaagagggaatgagtaggatggatttggcaaaaacaaatgcaaaaattgttgggaagtatgctaaaaaaatagctgaaatctgcgatacaaaaatatttgttataacaaaccctgtggatgtgatgacttataaagctctggtagattcaaaatttgaaagaaatcaagtttttggattagggactcatttagattctttgaggtttaaggttgctattgctaagtttttcggtgttcatattgatgaagttaggacgagaattattggagagcatggggacagcatggttccattgttaagtgctacctctatcggaggaattcctattcaaaaatttgaaagatttaaggaactgccaatagatgagattatagaggatgttaaaacaaaaggagagcagattattagattgaaaggaggttctgagtttggtccagcagcagccattttaaatgttgttaggtgtattgtgaataatgagaaaagattgctaactttatccgcttacgtagatggagagtttgatggaattagagatgtgtgtattggagttccagtaaagattggaagagatgggatagaagaggttgtatcaattgaattggataaagatgagataattgcatttagaaaatctgctgaaatcattaaaaaatactgtgaagaagttaaaaacttataa

SEQ ID NO: 45299 - protein, 313 aa, Methanococcus jannaschii
MKVTIIGASGRVGSATALLLAKEPFMKDLVLIGREHSINKLEGLREDIYDALAGTRSDANIYVESDENLRIIDESDVVIITSGVPRKEGMSRMDLAKTNAKIVGKYAKKIAEICDTKIFVITNPVDVMTYKALVDSKFERNQVFGLGTHLDSLRFKVAIAKFFGVHIDEVRTRIIGEHGDSMVPLLSATSIGGIPIQKFERFKELPIDEIIEDVKTKGEQIIRLKGGSEFGPAAAILNVVRCIVNNEKRLLTLSAYVDGEFDGIRDVCIGVPVKIGRDGIEEVVSIELDKDEIIAFRKSAEIIKKYCEEVKNL

SEQ ID NO: 45300 - DNA, 954 bp, Methanopyrus kandleri
  CDS (1)..(954): transl_table=11
gtgtccaaagtggccgtgatcggtgcgaccggacgtgtcggttcgaccgcggccgcccgcctcgcgttactggactgcgtgaacgaggtcaccctcatcgccaggcctaaaagcgtggataagctgcgcgggctccgccgtgatatcctggactcgttagcggccgcacaaaaagacgccgagatcacgatcgggtgcgagcgagacgactacgtcgatgcggacgtcatcgtgatgacggcggggatcccgaggaagcccggccagacccgtctcgacctcaccaaggataacgccgcgatcatcaagaagtacctggaaggtgttgcggaggagaaccccgaggcaatagtgctcgtggttacgaaccccgtcgacgtgcttacttacgtggctctgaaggtctccgggttacctaagaatcgcgtgatcggcctcggtactcaccttgactctatgcggttcaaagttctaattgccaaacatttcaacgtgcacatgagtgaagtgcacactcgcataatcggcgagcacggcgacaccatggtaccggtgatcagttccacgagcgtcggaggtatcccggtcaccaggatgccggggtgggaggatttcgacgtggaagaagccgtgagggaagtgaaggaagccggtcagcgcatcatcgagacctggggaggatcacagttcggaccggcgcaggcgatcaccaacctcgtccggacgatactgcaggacgaacgccgcgtgctgacggtctccgcgtacctggacggggagatcgacggtatccgcgacgtctgcatcggggtcccagccagactgggccgggagggtgtcctagagatagtaccgatagagctcgaagaagacgagatgagagcgttcagacggtcggttaaagtcgttaaggaggctacgagagaggcgatggaagcgatttctgaaagatga

SEQ ID NO: 45301 - protein, 317 aa, Methanopyrus kandleri
MSKVAVIGATGRVGSTAAARLALLDCVNEVTLIARPKSVDKLRGLRRDILDSLAAAQKDAEITIGCERDDYVDADVIVMTAGIPRKPGQTRLDLTKDNAAIIKKYLEGVAEENPEAIVLVVTNPVDVLTYVALKVSGLPKNRVIGLGTHLDSMRFKVLIAKHFNVHMSEVHTRIIGEHGDTMVPVISSTSVGGIPVTRMPGWEDFDVEEAVREVKEAGQRIIETWGGSQFGPAQAITNLVRTILQDERRVLTVSAYLDGEIDGIRDVCIGVPARLGREGVLEIVPIELEEDEMRAFRRSVKVVKEATREAMEAISER

SEQ ID NO: 45302 - DNA, 924 bp, Methanosarcina mazei
  CDS (1)..(924): transl_table=11
atggttaaaatttccgtaattggtgcaggaaatgtaggttcgacaacagtccagcggctggcagaactggagcctggcgaaattgtcatgacagatattgtggaagggatgccgcagggaaaagctcttgaccttatgcaggccggggcaattaacggttatgacactaggataacaggtactaacgattatgcagatatcgcaaattccgacctggtaattattacggcaggaatcgccagaaagcccggaatgagcagggaagacctgattaaaacgaattcaaaaataataggggatgtagcaggaaacattgcgaaatacgctccgaactctattgttataaacgtcacaaatccgcttgatatcataacatatgtagctatgaaggcaacgggctttgatccagaaaaagtcttcgggatgagtggagttcttgatgcaggacgttttgcaagctttatagcagaggaacttaagtgttcaaaaagggacgttgaggcaatggtcataggagggcatggagaccttatggttccgctcccgcagtacaccacagtatcgggaatcccgcttccggaactgcttccggaaaaaacaattgacaggcttgtggaaaggacagtaaatggaggagcagaaatagtagagcttctcaaacagggaagtgctttttatgctccctcagcagctatcgtacgcatggcagaagctgtaattaaggactccaggcgcgtacttccggcgtctgcatatcttgaaggacagtacgggcagaaaggaatttactttggagtgccagtaaaactgggagcaaatggcatagaagaaattcttgaactcaaacttgaagacagccagtgcgagatactcaaaaaatcctcagagactatccggaaagggatttcaaagctggaaatctaa

SEQ ID NO: 45303 - protein, 307 aa, Methanosarcina mazei
MVKISVIGAGNVGSTTVQRLAELEPGEIVMTDIVEGMPQGKALDLMQAGAINGYDTRITGTNDYADIANSDLVIITAGIARKPGMSREDLIKTNSKIIGDVAGNIAKYAPNSIVINVTNPLDIITYVAMKATGFDPEKVFGMSGVLDAGRFASFIAEELKCSKRDVEAMVIGGHGDLMVPLPQYTTVSGIPLPELLPEKTIDRLVERTVNGGAEIVELLKQGSAFYAPSAAIVRMAEAVIKDSRRVLPASAYLEGQYGQKGIYFGVPVKLGANGIEEILELKLEDSQCEILKKSSETIRKGISKLEI

SEQ ID NO: 45304 - DNA, 945 bp, Methanococcus maripaludis
  CDS (1)..(945): transl_table=11
atggacgtatcaattattggggcatcgggcaaaattgggagtgttttatcattgcttttagcaaaggaaagccatataaaaaatattaatttaattgcccgaagtagttccatcaataaattaaaaggacttaaaatggacctctatgatgcaatggccgccgcaggtcaggataccgacattgacatatgctgtgacgatgatttatcctgtactgctaactcagatattaccataattacagcaggtatggcaagaaccggagagatgtcgagaatcgaccttatgaagggaaatgcaaaaattgtaaaaaattatgtaaaaaatattgctaattttggggatacaaaaatattcatgatttcaaatcctgttgacctaatgacttacaaagcacttatcgaaagtggctatgaaaaaaatcaggtctttggacttggaacgcaccttgattcaatgcgatttaaagtagcagttgcaaaacatttcgaagtccaccttgatgatgttagaacaaggattgttggagaacatggcgacagcatggttccagtaatcagtgcgactgcagtaggcggtattccaatcaaaagattgccaaaatatgaagatttcccgtatgaaaagatacttgaaagaattaagggttatgggcaagaaatcataaatttaaaaaacggctctgaatacggccctgcatccgcaattgtaaacattgtaagatgtattgcacatgatgaaaaacgacttttaaccctttctacatacatcgaagacgaaatcgagggtattgaaggaggttgctgtataggggttcctgtaaaagttggcaaaaatggaattgaagaagtaatccatataaaaatggaagatgatgaaattgaaggatttaaaaaatcttttgaattagttaaaggatactgcagacagattgaatctatttaa

SEQ ID NO: 45305 - protein, 314 aa, Methanococcus maripaludis
MDVSIIGASGKIGSVLSLLLAKESHIKNINLIARSSSINKLKGLKMDLYDAMAAAGQDTDIDICCDDDLSCTANSDITIITAGMARTGEMSRIDLMKGNAKIVKNYVKNIANFGDTKIFMISNPVDLMTYKALIESGYEKNQVFGLGTHLDSMRFKVAVAKHFEVHLDDVRTRIVGEHGDSMVPVISATAVGGIPIKRLPKYEDFPYEKILERIKGYGQEIINLKNGSEYGPASAIVNIVRCIAHDEKRLLTLSTYIEDEIEGIEGGCCIGVPVKVGKNGIEEVIHIKMEDDEIEGFKKSFELVKGYCRQIESI

SEQ ID NO: 45306 - DNA, 939 bp, Moritella sp
  CDS (1)..(939): transl_table=11
atgaaagtcgctgtattaggtgctgctggtggtatcggtcaagctttagcccttcttttgaaaactcaattacctgcgggttctgaactgtcgctatatgatatcgcgccagttacaccgggtgttgctgttgatttaagtcatatccctacagacgttactattactggtttttcgggtatagatccaacggctgcactggttggtgctgacgtggtacttatctcggcgggtgttgctcgtaaaccaggtatggaccgttcagatctattcaatatcaatgctggcattatcaaaaatctagcgagtaaatgtgcggaagtatgcccaacggcatgtatcggtattattactaatccagttaacacgacggtgccaattgcggccgaagtacttaagcaagcgggcgtgtacgacaaacgtaaactattcggtatcactactctggatgttattcgttctgagactttcgtcagtgcgcttaaaggcatttcacttgctgacgttgcagtacccgttatcggtggtcactccggtgcaacaattctgccgctactttctcaagttaaaggtgttgaatttacggctgaagaaattgcgacactcacgacccgcattcaaaacgccggtactgaagtggttgaagctaaagcgggtggcggttctgcgacactttctatgggtcatgccgctgcacgtttcggtctctctctggtgcgcgcactacaaggagaaaaaggtattgttgagtgtacttatgttgacggtggctctgagcacgcgacattcttcgcccaaccggtattactcggtaaaaacggcgttgaagaagtactcgcatacggtgacttaagcgactttgaaaccaacgcacgcgatgctatgttagaagaactaaaagcgaatatcaccttaggtgaagaattcgttgctggttaa

SEQ ID NO: 45307 - protein, 312 aa, Moritella sp
MKVAVLGAAGGIGQALALLLKTQLPAGSELSLYDIAPVTPGVAVDLSHIPTDVTITGFSGIDPTAALVGADVVLISAGVARKPGMDRSDLFNINAGIIKNLASKCAEVCPTACIGIITNPVNTTVPIAAEVLKQAGVYDKRKLFGITTLDVIRSETFVSALKGISLADVAVPVIGGHSGATILPLLSQVKGVEFTAEEIATLTTRIQNAGTEVVEAKAGGGSATLSMGHAAARFGLSLVRALQGEKGIVECTYVDGGSEHATFFAQPVLLGKNGVEEVLAYGDLSDFETNARDAMLEELKANITLGEEFVAG

SEQ ID NO: 45308 - DNA, 945 bp, Myxococcus xanthus
  CDS (1)..(945): transl_table=11
atggctcagaatggcaagaagaagatcggcctcatcggcggcggtcagatcggcggcaacctggcgctgctcgccgtgcagaagtcgctcggtgacgtggtgctgtacgacatcccggcggccgagggtctggtcaagggcaaggcgctggacatcaaccagctggccgcggtcgacggttacgactgccgcgtgaagggcaccacggactggaaggacgtggctggctcggacgtgatcatcatcacggccggcatgccccgcaagccgggcatgtcccgcgaggacctgctcgagatcaacctgaagatcatgacggacgtggcgggcaacatcaagcagcacgcccccaacgccttcgtcatcaacgtggccaacccgctggacgcgatggtgttcgcgctccacaagatcgccggtctgcccaagcacatggtcgcgggcatggcgggcgtgctggacaccagccgcttcaagtgcttcgtcgccgaggcgctgggctgctccatccgcgacgtggaggccctggtgctgggcggccacggcgacgacatggtcccgctcgtccgccacagcacggtgggcggcgtgcccctgacggagctgatcgccaaggacaagctggacgccatcatcaagcgcacccgtgagggcggcgcggagctggtcggtctgtacaagacgggcagcgcctacttcggccccgcggcgtccgccatcgccatggcggagagcttcctgcaggaccgcaagcgcgtgctgccggccgccgccctcctggagggccagtacggcatcaacggctacttcttcggcgtccccgtgcagatcggcgcgggcggcgtggagaagatccacaccgtcgagctgaacgatggtgagaaggccgagctggagaagtccttccagtcggtgaagaagacggtcgactccgtcaagctgtag

SEQ ID NO: 45309 - protein, 314 aa, Myxococcus xanthus
MAQNGKKKIGLIGGGQIGGNLALLAVQKSLGDVVLYDIPAAEGLVKGKALDINQLAAVDGYDCRVKGTTDWKDVAGSDVIIITAGMPRKPGMSREDLLEINLKIMTDVAGNIKQHAPNAFVINVANPLDAMVFALHKIAGLPKHMVAGMAGVLDTSRFKCFVAEALGCSIRDVEALVLGGHGDDMVPLVRHSTVGGVPLTELIAKDKLDAIIKRTREGGAELVGLYKTGSAYFGPAASAIAMAESFLQDRKRVLPAAALLEGQYGINGYFFGVPVQIGAGGVEKIHTVELNDGEKAELEKSFQSVKKTVDSVKL

SEQ ID NO: 45310 - DNA, 939 bp, Oceanobacillus iheyensis
  CDS (1)..(939)
atgggtttaaaacgtaaaaaaatatcagtaattggttcaggtttcactggtgcaactactgctttaatggtggcgcaaaaagaattaggcgatgttgtattagttgatatacctgacatggaagaccctacaaaaggtaaagctctggatatggcagaagcagctcctgttcaagggtttgatgcaaaaattactggtacatctaattatgctgatacagaaggttctgatctcgttatcattacggctggaatcgctcgtaagccaggaatgagtcgtgatgatttagttaatacgaatgctaatataatgaaatccgttaccaaagaaattgtacattactcaccaaatacaacaattgttgtattaactaatccagtggatgcgatgacatatacagtatttaaagagtctgggttaccaaaagagcgtgtgattggacaatctggaattttagatactgcacgtttccgtacatttgtagcagaggagcttaatctttctgtcaaagatgtaactggctttgttttaggtggtcatggagacgatatggttccacttattcgttattcttatgctggtggaattccattagaaaaattaattcctcaagaacgtttagatgcaattgtccaacgtactcgtactggtggaggagaaattgttaatctattaggtaatggtagtgcctattatgcacctgcagcttctttaactgttatggctgaagcaattctaaaagatcaacgccgcgtgttacctactattgcatatcttgaaggtgaatatggatatcaagatatctatttaggcgttccaactatcttaggcggagaaggaattgaagaaattattgagttagacttaacgaaagaagaaaaggcacaacttgataagtctgctgactctgttaaaaatgtactaaatgtacttcaataa

SEQ ID NO: 45311 - protein, 312 aa, Oceanobacillus iheyensis
MGLKRKKISVIGSGFTGATTALMVAQKELGDVVLVDIPDMEDPTKGKALDMAEAAPVQGFDAKITGTSNYADTEGSDLVIITAGIARKPGMSRDDLVNTNANIMKSVTKEIVHYSPNTTIVVLTNPVDAMTYTVFKESGLPKERVIGQSGILDTARFRTFVAEELNLSVKDVTGFVLGGHGDDMVPLIRYSYAGGIPLEKLIPQERLDAIVQRTRTGGGEIVNLLGNGSAYYAPAASLTVMAEAILKDQRRVLPTIAYLEGEYGYQDIYLGVPTILGGEGIEEIIELDLTKEEKAQLDKSADSVKNVLNVLQ

SEQ ID NO: 45312 - DNA, 936 bp, Pasteurella multocida
  CDS (1)..(936): transl_table=11
atgaaagttgcagttctaggtgccgcaggtggtattggtcaagcgttagcattattattgaaattacaattaccagccggttcagagttatcattatatgatattgcccccgtgacaccaggtgttgctgcggatgtcagccatattccaacagctgtaaaagtgcaaggatttgccggtgaagatccaacacctgcattacaaggggctgatgtagtattaatttctgcaggtgttgcacgtaaaccgggtatggatcgttctgatttatttaatattaatgccggtatcgtgcgtaacttaattgagaaagttgcgcaagtttgtccaaaagcttgtgtggggattattactaatcctgtgaatacgacagtagcaattgcggctgaagtattgaaaaaagcgggtgtttacgataagcgtaaattattcggtgtaaccacattagatattattcgttctgaaacctttgtatcagaattgaaaaatttagagccagcgcgcacgacagtgcctgtgattggtgggcattctggtgtcaccattcttccattactttctcaagtccaatacgcagagtggaatgacgcggaaattgcaccattaacaaaacgtattcaaaatgcgggtaccgaagtggtcgaagcaaaagcgggtggtggttcagcaacgttatccatggcacaagccgcagcacgttttgcactttctttagttaaaggcttaaatggggaaaatgtagttgaatgtacttatgtggaaggtgatggcaaatatgcccgtttctttgctcagcctgttcgtttaggtaaagaaggcgttgaagaaattctaccattagggtcattgagtgcatttgaacaacatgcattagatgcaatgttagagacattacgtgcggatattgaattaggcgagaaatttgtcaatcaataa

SEQ ID NO: 45313 - protein, 311 aa, Pasteurella multocida
MKVAVLGAAGGIGQALALLLKLQLPAGSELSLYDIAPVTPGVAADVSHIPTAVKVQGFAGEDPTPALQGADVVLISAGVARKPGMDRSDLFNINAGIVRNLIEKVAQVCPKACVGIITNPVNTTVAIAAEVLKKAGVYDKRKLFGVTTLDIIRSETFVSELKNLEPARTTVPVIGGHSGVTILPLLSQVQYAEWNDAEIAPLTKRIQNAGTEVVEAKAGGGSATLSMAQAAARFALSLVKGLNGENVVECTYVEGDGKYARFFAQPVRLGKEGVEEILPLGSLSAFEQHALDAMLETLRADIELGEKFVNQ

SEQ ID NO: 45314 - DNA, 939 bp, Photorhabdus luminescens
  CDS (1)..(939): transl_table=11
atgaaagttgcagttctcggtgcagccggtggtattggtcaggctcttgctcttctactcaaaacccagcttccttcaggttcagaactttctttatatgatatcgctccagtaacacctggggtggctgttgatctgagccacattccaacggaagtgaaaattaaaggctttgctggtgaagatgcaactccagcgttggaaggagcaaatgttgtattgatttctgctggggttgcccgtaaaccaggcatggatcgttcagatctgtttaatattaatgcggggatcgttcgtaacctggtagaacaagtggctaaaacttgcccgaaatcactgattgggattattactaacccagtcaacacaacggtggctattgcagccgaagtgctgaaaaaagcgggtgtatatgacaaaaaccgcctgtttggtgttacaacgttggatgttattcgttctaatacttttgttgctgaattgaaaggtaaaaaaccacaggaaatcgaagtacccgttatcggtggtcattctggtgtgacaatcttacctctgttgtctcagatccctggtgtgaactttactgatggagagttggctgctttaactaagcgtattcagaatgctggtactgaagttgttgaggctaaggcaggtggaggatctgcaactctgtctatggggcaagctgcggctcgtctgggcctctctttggtccgtggcttacaaggcgaaagtgatgttgtagaatgcgcttatgttgaaggtgatggtaaatatgctcgcttcttcgctcagccagttcgtttgggtaaaaatggcgtagaagagcgtttgaacattggtgagttgagtgattttgaacagaaagcactggaaggcatgctagatgtattgagaaaagatatagaattaggcgaaaaatttattaataactaa

SEQ ID NO: 45315 - protein, 312 aa, Photorhabdus luminescens
MKVAVLGAAGGIGQALALLLKTQLPSGSELSLYDIAPVTPGVAVDLSHIPTEVKIKGFAGEDATPALEGANVVLISAGVARKPGMDRSDLFNINAGIVRNLVEQVAKTCPKSLIGIITNPVNTTVAIAAEVLKKAGVYDKNRLFGVTTLDVIRSNTFVAELKGKKPQEIEVPVIGGHSGVTILPLLSQIPGVNFTDGELAALTKRIQNAGTEVVEAKAGGGSATLSMGQAAARLGLSLVRGLQGESDVVECAYVEGDGKYARFFAQPVRLGKNGVEERLNIGELSDFEQKALEGMLDVLRKDIELGEKFINN

SEQ ID NO: 45316 - DNA, 975 bp, Picrophilus torridus
  CDS (1)..(975): transl_table=11
atggcaagaagcaaaatctcagttataggtgcaggcgctgttggtgctactgttgcacagacgcttgctatcaggcagacaggtgatatatacattttcgatattgttgatggccttgcagagggcaaggcacttgatatccttgaaggtgcaccccattggggctatgatcttgatataaagggattctgcactgcagatgaatcaaagtatgctgagatgaagggctcagacgtcatagttgttacggcaggccttgcaagaaagcccggaatgagcagggatgacctgcttttaaagaacataggcataatgaaatctgtgggagaggccataaaaaaatactcaccggaatcaaagatcgttgttgtaacaaaccctgctgatatcatggcatatgcaatatacaaggcatcaggaataagccctgaaagaataattggccttggtggctcactggacagcacaaggttcagaacattccttgcacaggagctaaacgtatcgtttgaggatgtaaatgcattcgttataggcggccatggggatgacatggtaccatttataagatattcaaatgtctctggaataccaatagaggatcttttgccaagggaaaaaatagatgagatagtaaaaaggacaagattcggcggcggtgagattgtcaacctttacaagaccggatccgcattctatgcaccgggcatatcaatagcggtaatggttgaatcaatagtaaatgaccgcaagcgcgtgataccgtgcgcggcttacataacaggcgagcattcaaagacatatctggtaaataatctcttcataggcgttccaattaagattggcaaaaatggtgttgaaaagatatacgatctaaaattcaatgaagatgagctcgaggcatggaagaaaagcgttgaatctgttaaaaagaacagtgcaatagccgatgattattttgcaaaaaatcaataa

SEQ ID NO: 45317 - protein, 324 aa, Picrophilus torridus
MARSKISVIGAGAVGATVAQTLAIRQTGDIYIFDIVDGLAEGKALDILEGAPHWGYDLDIKGFCTADESKYAEMKGSDVIVVTAGLARKPGMSRDDLLLKNIGIMKSVGEAIKKYSPESKIVVVTNPADIMAYAIYKASGISPERIIGLGGSLDSTRFRTFLAQELNVSFEDVNAFVIGGHGDDMVPFIRYSNVSGIPIEDLLPREKIDEIVKRTRFGGGEIVNLYKTGSAFYAPGISIAVMVESIVNDRKRVIPCAAYITGEHSKTYLVNNLFIGVPIKIGKNGVEKIYDLKFNEDELEAWKKSVESVKKNSAIADDYFAKNQ

SEQ ID NO: 45318 - DNA, 969 bp, Rhizobium loti
  CDS (1)..(969)
atggcacgcaacaagatagcgcttatcggctcgggcatgatcggcggcacgctggcccacatgatcggcctcaaggacctcggcgacgtggtgctgttcgatattgccgagggtattccgcaaggcaaggggctcgatatcgcgcagtcgtcgccggtcgatggtttcgattcccggctgaccggcgtcaacgactatgccggcatcgagggtgccgacgtctgcatcgttacagccggcgtgccgcgcaagcctggcatgagccgcgacgatctgctgggcatcaacctcaaggtcatggaacaggtcggcgccggtctgaagaagtatgcgcccaaggccttcgtcatctgcatcaccaatccgctcgacgccatggtgtgggcgctgcagaagttttccggcctgcccaagacccatgtcgtcggcatggccggcgtgctcgacagcgcgcgcttccgctatttcctggccgaggaattcaaggtctcggtcgaggacgtcaccgccttcgtgctcggcggccacggcgattccatggtgccgatgatccgctactcgacggtatcgggcatcccgctgcccgacctcgtcaagatgggctggacctcgaaggagaagctcgaccagatcgtccagcgcacccgtgatggcggcgccgagatcgtcggcctgctcaagaccggctcggcctattacgcgccggcggcctcggcgattgccatggccgaatcctacctcaaggacaagaagcgcgtgctgccctgcgctgcccacctttccggccagtatggcgtcaagggcacctatgtcggcgtccccgtggtgatcggcgccggcggcgtcgagcgcatcatcgagatcgacctcaacaagagcgaacagaaaatgttcgagagttcggtggcgaccgtgcagggcctgaccgaggcctgcgtcaagatcgcgccgcagctcgcttcgaagtga

SEQ ID NO: 45319 - protein, 322 aa, Rhizobium loti
MARNKIALIGSGMIGGTLAHMIGLKDLGDVVLFDIAEGIPQGKGLDIAQSSPVDGFDSRLTGVNDYAGIEGADVCIVTAGVPRKPGMSRDDLLGINLKVMEQVGAGLKKYAPKAFVICITNPLDAMVWALQKFSGLPKTHVVGMAGVLDSARFRYFLAEEFKVSVEDVTAFVLGGHGDSMVPMIRYSTVSGIPLPDLVKMGWTSKEKLDQIVQRTRDGGAEIVGLLKTGSAYYAPAASAIAMAESYLKDKKRVLPCAAHLSGQYGVKGTYVGVPVVIGAGGVERIIEIDLNKSEQKMFESSVATVQGLTEACVKIAPQLASK

SEQ ID NO: 45320 - DNA, 963 bp, Rhizobium leguminosarum
  CDS (1)..(963): transl_table=11
atggcgcgtaacaagatcgcactcattggttctggcatgattggtggcacgctggcgcacctcgccggcctgaaggaactgggcgacatcgttctcttcgacatcgcggacggcattccccagggcaagggtctcgatatttcccagtcgtcgccggtcgaaggcttcgacgtcaatctgacgggcgccagcgactattccgcgatcgaaggcgctgacgtctgcatcgtcacggcgggcgtcgcccgcaagcccggcatgagccgcgatgaccttctcggcatcaacctcaaggtcatggagcaggtcggcgccggcatcaagaagtatgcgccgaacgctttcgtgatctgcatcaccaatccgctcgacgccatggtctgggcgctgcagaagttttccggtcttccggccaacaaggtcgtcggcatggccggcgttctcgactcctcgcgcttccgtcttttcctcgccaaggaattcaacgtgtccgtacaggacgtcacggccttcgttctcggcggccacggcgacacgatggtgccgctcgcccgctactcgacggtcggcggcattccgctcaccgatctcgtcaccatgggctgggtcaccaaggagcgcctcgaagagatcatccagcgcacccgtgacggcggcgccgaaatcgtcggcctgctgaagaccggctcggcctattacgccccggccgcctcggcgatcgagatggccgaatcctacctcaaggacaagaagcgcgttctgccctgcgcggcccacctctccggtcagtacggcgtcaaggacatgtatgtcggcgttcccaccgtcatcggcgccggcggcgtcgagcgcatcatcgagatcgatctcaacaagaccgagaaggaagccttcgacaagtccgtcggcgccgttgccggtctctgcgaagcctgcatcaacatcgcgcctgccctcaagtag

SEQ ID NO: 45321 - protein, 320 aa, Rhizobium leguminosarum
MARNKIALIGSGMIGGTLAHLAGLKELGDIVLFDIADGIPQGKGLDISQSSPVEGFDVNLTGASDYSAIEGADVCIVTAGVARKPGMSRDDLLGINLKVMEQVGAGIKKYAPNAFVICITNPLDAMVWALQKFSGLPANKVVGMAGVLDSSRFRLFLAKEFNVSVQDVTAFVLGGHGDTMVPLARYSTVGGIPLTDLVTMGWVTKERLEEIIQRTRDGGAEIVGLLKTGSAYYAPAASAIEMAESYLKDKKRVLPCAAHLSGQYGVKDMYVGVPTVIGAGGVERIIEIDLNKTEKEAFDKSVGAVAGLCEACINIAPALK

SEQ ID NO: 45322 - DNA, 963 bp, Rhizobium meliloti
  CDS (1)..(963): transl_table=11
atggcgcgcaacaagatcgcacttatcggttcggggatgattggtggcacgctggcgcatctcgccggcctgaaggaactgggcgacatcgtcctcttcgacattgccgacggcattccccagggcaagggtctcgacatcgcgcagtcctccccggtcgagggcttcgatgcatcgctgaccggtgcgagcgactattccgcgatcgagggcgccgacgtctgcatcgtcaccgccggcgtgccgcgcaagcccggcatgagccgcgacgatctgctcggcatcaacctcaaggtcatggaacaggtcggcgccggcatcaagaaatacgctccgaacgccttcgtcatctgcatcaccaacccgctcgacgccatggtctgggcgctgcagaagttctccggcctgccgaagaacaaggtcgtcggcatggccggcgtgctcgactcttcgcgcttccggctcttcctcgccgaagagttcaacgtctctgtcaaggacatcaccgctttcgtgctcggcggccatggcgacaccatggtgccgctcgcgcgttattcgacggttgccggcatcccgctgcccgacctgatccagatgggttggaccaccaaggaaaagctcgaccagatcattcagcgcacccgtgacggcggcgccgagatcgtcggcttgctcaagaccggctcggcctattatgcgccggccgcctcggcgatcgaaatggccgaagcctatctcaaggacaagaagcgcgtgctgccctgcgccgctcatctctccggccagtatggcgtcaaggacatgtatgtcggcgtgcccaccgtgatcggtgccggcggcatcgagcgcatcatcgagatcgacctcaacaagggcgagaaggaagccttcgacaagtcggttgcggccgtcgccggcctttgcgaagcctgcatcaacatcgcacccagcctgaagtaa

SEQ ID NO: 45323 - protein, 320 aa, Rhizobium meliloti
MARNKIALIGSGMIGGTLAHLAGLKELGDIVLFDIADGIPQGKGLDIAQSSPVEGFDASLTGASDYSAIEGADVCIVTAGVPRKPGMSRDDLLGINLKVMEQVGAGIKKYAPNAFVICITNPLDAMVWALQKFSGLPKNKVVGMAGVLDSSRFRLFLAEEFNVSVKDITAFVLGGHGDTMVPLARYSTVAGIPLPDLIQMGWTTKEKLDQIIQRTRDGGAEIVGLLKTGSAYYAPAASAIEMAEAYLKDKKRVLPCAAHLSGQYGVKDMYVGVPTVIGAGGIERIIEIDLNKGEKEAFDKSVAAVAGLCEACINIAPSLK

SEQ ID NO: 45324 - DNA, 948 bp, Rhodopirellula baltica
  CDS (1)..(948): transl_table=11
atgcgtcgcgcaaagatcaccattgtcggagccggaaatgttggtgccacctgtgctcactggtgtgcggccgcagaactcggcgatgttgtcctgctggacattccccgaaccgaagacatgcctcgcggcaaggcactggacctaatgcaagcctcgccaatcatggggtttgactcgaacatcgtcggtaccaccgactacgccgacacggccgacagtgatgtgatcgtcgtcaccgctggattgccacgcaaacctggcatgagccgcgacgacttgctggccaccaacgcgaaaattgtgaccagcgttgcggaagaaatcaaagccaccagccctaacgctgtgatcattgttgtcagcaatccgctcgacgcgatggttcagcagatgttcaaagtcaccggcttcgaacctgccaaagtcatcggccaagccggcgttttggacaccgctcgctaccgcacattcctggcaatggaattgggcgtcagtgtcgaagacatcagcgctttgttgatgggcggacacggcgacacgatggtgcctgtcccaagctgcaccagcgttggcggcatccctgtcacccaactgatctccaaggaacgcttggacgaaatcgttgaccggactcgcaagggcggagccgaaatcgtttcgctgctgaagaccggcagcgcttactatgctcccgctgcggcttgtgcccaaatggtcgaagcgatcgtcaaagacaaaaagcgagtcatccctgtcgccgcatactgcgattccgaatacggcgtcggcggttactacgtcggcgtccctgttgtcctgggcagcggcggtgtagaacgcatcatcgaattgtcgctgaccgacgaagaaaccaaggcgttccagaacagcgtcgacgcggtcaaatcgctcgtttcgaccatggacgggctgctcgcggagtga

SEQ ID NO: 45325 - protein, 315 aa, Rhodopirellula baltica
MRRAKITIVGAGNVGATCAHWCAAAELGDVVLLDIPRTEDMPRGKALDLMQASPIMGFDSNIVGTTDYADTADSDVIVVTAGLPRKPGMSRDDLLATNAKIVTSVAEEIKATSPNAVIIVVSNPLDAMVQQMFKVTGFEPAKVIGQAGVLDTARYRTFLAMELGVSVEDISALLMGGHGDTMVPVPSCTSVGGIPVTQLISKERLDEIVDRTRKGGAEIVSLLKTGSAYYAPAAACAQMVEAIVKDKKRVIPVAAYCDSEYGVGGYYVGVPVVLGSGGVERIIELSLTDEETKAFQNSVDAVKSLVSTMDGLLAE

SEQ ID NO: 45326 - DNA, 969 bp, Rhodopseudomonas palustris
  CDS (1)..(969): transl_table=11
atggcgcgcgataaaattgctttgattggctccggccagatcggcggtacgctggcacatttggtcgggttgaaagagctcggcgacgtggtgctgttcgacattgccgagggcgtgccgcagggcaaggcgctcgacatcgcggagtcctcgccggtcgacggtttcgactccaagctgaccggtgccaactcctacgaggcgatcgaaggcgcccgcgtggtgatcgtcaccgccggcgtgccgcgcaagccgggcatgagccgtgacgatctgctcagcatcaacctcaaggtgatggagcaggtcggcgctggcatcaagaagtacgcgcccgacgcgttcgtgatctgcatcaccaacccgctcgacgcgatggtctgggcgctgcagaaggcctcgggcctgccggccaagaaggttgtcggcatggccggcgtgctcgactcggcgcggttccgttacttcctggccgacgagttcaacgtgtcggtcgaagacgtcaccgccttcgtgctcggcggccacggtgataccatggtgccgctggtgaagtactcgaccgtcgccggaattccgctgcccgacctggtcaagatgggctggacctcgcaggcgcgcctcgatgagatcgtcgaccgcacccgcaacggcggcgccgagatcgtcaacctgctgaagaccggctcggcgttctacgccccggcgtcgtcggcgatcgcgatggccgagagctatctgaaggacaagaagcgggtggtgccggtcgcggcccacctcaacggcgaatacggcgtcaaggacatgtatgtcggcgttccggtggtgatcggcgacaagggcgtcgagcgcatcgtcgagatcgagctggccggcaaggacaaggaagcgttcgacaggtcggtcgctgccgttcagggcctggtcgaggcctgcaagaagattgcgcccgatctgctcggtcgctga

SEQ ID NO: 45327 - protein, 322 aa, Rhodopseudomonas palustris
MARDKIALIGSGQIGGTLAHLVGLKELGDVVLFDIAEGVPQGKALDIAESSPVDGFDSKLTGANSYEAIEGARVVIVTAGVPRKPGMSRDDLLSINLKVMEQVGAGIKKYAPDAFVICITNPLDAMVWALQKASGLPAKKVVGMAGVLDSARFRYFLADEFNVSVEDVTAFVLGGHGDTMVPLVKYSTVAGIPLPDLVKMGWTSQARLDEIVDRTRNGGAEIVNLLKTGSAFYAPASSAIAMAESYLKDKKRVVPVAAHLNGEYGVKDMYVGVPVVIGDKGVERIVEIELAGKDKEAFDRSVAAVQGLVEACKKIAPDLLGR

SEQ ID NO: 45328 - DNA, 945 bp, Rickettsia conorii
  CDS (1)..(945): transl_table=11
atgaaacaaaacgcaaaaatctcattaataggtagcggtaacataggtggtacacttgctcacttaattagccttagagaactcggcgatatcgtgttatttgatgtgactgaaggagtaccgcaaggaaaagcattggatctcatgcaagccggtacaatagccgggtctgatatcaaaataaaaggcacaaacgactataaagatattgaaggatctgatgccataattattactgccggtttaccaagaaaaccagggatgagtagagaagatttaattagcattaacaccggtattatgaaaacggttgcagcaaatgttaaaaaatacgctcctgatgcctttgtaatagtaattaccaatccacttgatgttatggtatatgtcatgcttaaagaaagcggattgcctcacaataaagtaatcggtatggcaggagtacttgactcatcaagatttaatctttttcttgctgaagagtttaaagtatcggttaacaatgttaatagcatggttctcggcggtcacggcgatgctatggtacctcttgcaagatattctacaatatcaggcgtaccgatacctgacttgataaaaatgggcttatcaagtaatgaaaatattgaaaaaataatcgatcgtactagaaacggcggcggtgagattgttgcattacttaaaacaggttctgcttattatgctcccgcagcctcagcaatagaaatgcttgagtcatatttaaaagataaacgtcagattctaacttgtgccgctcatttacaaggtgagtacggcgtacatgatttatatgtcggagtgcctattatgatcggtaaagaaggtgttctaagagtaatagaactgcagttaaccgcagaggaaaaagcactatttgataaatcagtcgagggagttaaaaaactcattgagacgataaaataa

SEQ ID NO: 45329 - protein, 314 aa, Rickettsia conorii
MKQNAKISLIGSGNIGGTLAHLISLRELGDIVLFDVTEGVPQGKALDLMQAGTIAGSDIKIKGTNDYKDIEGSDAIIITAGLPRKPGMSREDLISINTGIMKTVAANVKKYAPDAFVIVITNPLDVMVYVMLKESGLPHNKVIGMAGVLDSSRFNLFLAEEFKVSVNNVNSMVLGGHGDAMVPLARYSTISGVPIPDLIKMGLSSNENIEKIIDRTRNGGGEIVALLKTGSAYYAPAASAIEMLESYLKDKRQILTCAAHLQGEYGVHDLYVGVPIMIGKEGVLRVIELQLTAEEKALFDKSVEGVKKLIETIK

SEQ ID NO: 45330 - DNA, 945 bp, Rickettsia prowazekii
  CDS (1)..(945): transl_table=11
atgaaaaaaaatccaaaaatctcattaataggtagtggtaacataggtggtacactcgctcacttaattagtcttaaaaaactcggtgatattgtattatttgacgtatctgaaggtctaccgcaaggaaaggcattagacctcatgcaagccgctacaatagaagggtctgatattaaaataaaaggtacaaacgattatagagatattgaaggctctgacgcagtaattattactgcaggtttaccaagaaaaccaggcatgagtagagatgatttaattagcgttaatacaaaaattatgaaagacgtagcacaaaatataaaaaaatatgctcagaatgcttttgtaatagtgattactaatccactagatattatggtatatgtcatgcttaaagaaagcggattacctcataataaagtaattggtatggcaggggtactcgactcctcaagatttaatctgtttcttgctaaagagtttaaagtatcagttaaaaatgttaatagtatagttctcggtggtcacggtgacactatggtaccactcttacgatattctacaatatcaggagtgccgatacctgacttaataaaaatgggcttatcaagtaataaaaatattgaaaaaataattgatcgtacaaaaaatggaggcggagagattgttaaattgcttaaaacaggttctgcttattatgctcctgcagcatcagcaattgcaatgcttgaatcatatttaaaagataaacgtcagattctaacttgtgccgcttatttacaaggtgaatatgacatacatgatttatatatcggagtcccgattattataggtaaagaaggtgtgataaaagtaatagaactacagttaacagaagaggaaaaaatactattttataaatcagtcacagaagtaaaaaaactcattgatacaatacaataa

SEQ ID NO: 45331 - protein, 314 aa, Rickettsia prowazekii
MKKNPKISLIGSGNIGGTLAHLISLKKLGDIVLFDVSEGLPQGKALDLMQAATIEGSDIKIKGTNDYRDIEGSDAVIITAGLPRKPGMSRDDLISVNTKIMKDVAQNIKKYAQNAFVIVITNPLDIMVYVMLKESGLPHNKVIGMAGVLDSSRFNLFLAKEFKVSVKNVNSIVLGGHGDTMVPLLRYSTISGVPIPDLIKMGLSSNKNIEKIIDRTKNGGGEIVKLLKTGSAYYAPAASAIAMLESYLKDKRQILTCAAYLQGEYDIHDLYIGVPIIIGKEGVIKVIELQLTEEEKILFYKSVTEVKKLIDTIQ

SEQ ID NO: 45332 - DNA, 939 bp, Salmonella typhimurium
  CDS (1)..(939): transl_table=11
atgaaagtcgcagtcctcggcgctgctggtggtatcggtcaggcgctggcattacttttaaaaaaccaactgccttcaggttcagaactctccctgtacgacatcgctccagtgactcccggtgtggccgttgatttgagccacatccccaccgctgtaaaaatcaaaggtttctccggtgaagacgcaaccccggcgcttgaaggcgctgacgtagtactgatttctgcgggtgtggcgcgtaagccgggtatggaccgttccgacctgtttaacgttaacgccggcatcgtgaaaaacctggtgcagcagatcgctaaaacctgcccgaaagcgtgcgtgggcattatcaccaacccggtgaacaccaccgttgcgattgcggcggaagtgctgaaaaaagcaggcgtatacgacaaaaacaaactgtttggcgttaccacgctggatatcatccgctctaatacctttgttgcagagctgaaaggtaagctgccaacggaagttgaagtgccggtgattggcgggcactccggcgtgacgattctgccgctgctgtcgcagattccaggcgtaagttttaccgaacaagaagcggccgagctgactaaacgtattcagaacgccggtactgaagtcgtcgaggcgaaagccggcggcggatcggcaaccctctctatgggccaggctgccgcgcgtttcggtctttctctggttcgcgctctgcagggcgagaagggcgtggtggaatgcgcctatgtggaaggcgacggtcagtatgcccgtttcttctctcagccgctgctgctgggtaaaaacggcgtagaagagcgtaaatccatcggcacactgagcgctttcgagcaacattcgctggacgctatgctggatacgctgaaaaaagatattcagttgggtgaagattttattaataaataa

SEQ ID NO: 45333 - protein, 312 aa, Salmonella typhimurium
MKVAVLGAAGGIGQALALLLKNQLPSGSELSLYDIAPVTPGVAVDLSHIPTAVKIKGFSGEDATPALEGADVVLISAGVARKPGMDRSDLFNVNAGIVKNLVQQIAKTCPKACVGIITNPVNTTVAIAAEVLKKAGVYDKNKLFGVTTLDIIRSNTFVAELKGKLPTEVEVPVIGGHSGVTILPLLSQIPGVSFTEQEAAELTKRIQNAGTEVVEAKAGGGSATLSMGQAAARFGLSLVRALQGEKGVVECAYVEGDGQYARFFSQPLLLGKNGVEERKSIGTLSAFEQHSLDAMLDTLKKDIQLGEDFINK

SEQ ID NO: 45334 - DNA, 936 bp, Shewanella oneidensis
  CDS (1)..(936): transl_table=11
atgaaagttgctgtacttggtgctgctggtggtatcggccaggctcttgccctactgttaaaaactcaattacctgcgggttctaaactgtctctatacgatatcgcaccggtaactccgggtgttgcggttgacttgagccatatccccactgcggttgaaatcaaaggttttgctggtgaagatccaacgcctgccctcgtgggtgctgacgttgtgctaatttctgctggtgttgcacgtaagcctggtatggatcgttcagatctgttcaatatcaacgctggtatcgttcgcaacctgatcgagaaagtggcagtcacttgccctaaagcgctcgtgggtattatcactaacccagtcaacactacggttgctatcgcagctgaagtgatgaaaaaagcgggtgtttacgataagaaccgtttattcggtgtgaccactctggacgttatccgttctgagactttcatcgctgaattaaaaggcttaaacgttgctgacgttaaaatcaacgtgattggcggccacagcggtgtgaccattctgccattactgtctcaagttgaaggcgtgactttctctgatgaagaagtggcttctttaactaaacgcatccaaaacgcgggtactgaagtggttgaagctaaagccggtggcggcagcgcgactctgtctatgggtcaagcggcttgccgttttggtatgtctctggttcgtggcctacaaggcgaagcgaatgttgttgaatgtgcctatgttgacggcggcagtgagcatgctgaattcttcgctcaaccagtactgttaggcaaaaacggtatcgaaaaagtactgccttacggtgaagtgagcgcattcgaagcaaatgcccgtgattctatgttagatacactgaaaggtgatatcaaactaggcgttgatttcgttaagtaa

SEQ ID NO: 45335 - protein, 311 aa, Shewanella oneidensis
MKVAVLGAAGGIGQALALLLKTQLPAGSKLSLYDIAPVTPGVAVDLSHIPTAVEIKGFAGEDPTPALVGADVVLISAGVARKPGMDRSDLFNINAGIVRNLIEKVAVTCPKALVGIITNPVNTTVAIAAEVMKKAGVYDKNRLFGVTTLDVIRSETFIAELKGLNVADVKINVIGGHSGVTILPLLSQVEGVTFSDEEVASLTKRIQNAGTEVVEAKAGGGSATLSMGQAACRFGMSLVRGLQGEANVVECAYVDGGSEHAEFFAQPVLLGKNGIEKVLPYGEVSAFEANARDSMLDTLKGDIKLGVDFVK

SEQ ID NO: 45336 - DNA, 948 bp, Staphylococcus epidermidis
  CDS (1)..(948): transl_table=11
ttgcttatggtcaatagaagaaagatatcaattattggcgcgggacatacaggtgggactctagcattcattcttgcacaaaaggaattaggagatattgtgttgattgaacgccagcaatcagagggtatggctaaaggaaaggcgttagatattttagaaagcggacccatttgggggtttgacacatctgtacatggttcagtaaatatagaagatattaaagattcagacatagtggtgatgactgcaggtatacctaggaaatcaggaatgacaagagaagaattagttcaaactaatgaacaaatagtacgagaaactgcattacaaattgcaacgtatgcacctcattcaataattattgtattgactaatccggttgatgttatgacatatactgcatttaaagcatcaggttttcctaaagaacgtattattggtcaatctggaattttagacgctgcaagatatcgaacttttattgctcaagaacttaacgtgtctgtcaaagatgtaaatgggtttgttttaggtggacatggtgatacgatgttacctttgattaataacacacacattaatgggattccagttaagcatcttatttctgaagaaaagattgatcaaattgttgaacgtacacgtaagggtggtgcagaaattgttgcattactaggtcaaggctcagcatattatgcaccagcaactgctatatatgaaactatagatgcaatttttaatgatcggaaacggttattaccaagtattgcttatctagagggagaatacggttgttcagatatttgtttcggagttcctactataataggatatcaaggaatagaaaagattatagaggtagatatgaataatgatgagtatcaacaactacaacactctgcgcaagctgtgagtgaagtcaaaaactcactaaaattcaaataa

SEQ ID NO: 45337 - protein, 315 aa, Staphylococcus epidermidis
MLMVNRRKISIIGAGHTGGTLAFILAQKELGDIVLIERQQSEGMAKGKALDILESGPIWGFDTSVHGSVNIEDIKDSDIVVMTAGIPRKSGMTREELVQTNEQIVRETALQIATYAPHSIIIVLTNPVDVMTYTAFKASGFPKERIIGQSGILDAARYRTFIAQELNVSVKDVNGFVLGGHGDTMLPLINNTHINGIPVKHLISEEKIDQIVERTRKGGAEIVALLGQGSAYYAPATAIYETIDAIFNDRKRLLPSIAYLEGEYGCSDICFGVPTIIGYQGIEKIIEVDMNNDEYQQLQHSAQAVSEVKNSLKFK

SEQ ID NO: 45338 - DNA, 978 bp, Thermoplasma acidophilum
  CDS (1)..(978): transl_table=11
atggcaagaaagaagatttctgtaataggcgccggaaatgtaggtgccacagtcgcacagttcttggccgcaaaacagctcggcgatgtttatctgtttgatgttgtagatggaattcctgagggaaaggctctggatattcaggagggagctccacactggagatacgatcttgatgtggtgggtttcagtacgagtgatgaaaccaagtacaagaacatggagggcagcgacgtcatagtcgttacggctggactggcaaggaagccagggatgagcagggacgatctctttgacaagaacgtggagataatatctgacgtttcgagaaacataaagaaatactcgccagattcaataatagtggtggtatcaaacccagccgatataatggcctatgcattgcagaagtttaccggcatagatccatcgaagataatgggtctcggcggatctcttgacagttcaaggttcagaacctttctcgcaaaggaattgaatgtgtctgttgaagacgttaacgcattcgtcattgggggacacggagatgatatggtgccgttcatacgatactccagcgttgccggcatacccatagagaacctgctttcaaaggagaagatcgatgagatagtgaagaggacgaggtttggcggcggagagatcgtgaactatctgaagacaggcagcgctttctacgcacctggcatatccataaccgcgatggtggaatctgtgatcatggacaagaaacgcgtcataccgtgcgcagcttacataaccggcaagcatgcggaccactacggaataagggacaagttcataggcgtgccgataaagatcggagagaagggtgtagaacagatatacgacatagacttcaagccggatgaacttgagctctggaagaagagtgtggcttcagttgaggccagctcaaagaaagtggacgagtggatcgcaaagcacgcccactga

SEQ ID NO: 45339 - protein, 325 aa, Thermoplasma acidophilum
MARKKISVIGAGNVGATVAQFLAAKQLGDVYLFDVVDGIPEGKALDIQEGAPHWRYDLDVVGFSTSDETKYKNMEGSDVIVVTAGLARKPGMSRDDLFDKNVEIISDVSRNIKKYSPDSIIVVVSNPADIMAYALQKFTGIDPSKIMGLGGSLDSSRFRTFLAKELNVSVEDVNAFVIGGHGDDMVPFIRYSSVAGIPIENLLSKEKIDEIVKRTRFGGGEIVNYLKTGSAFYAPGISITAMVESVIMDKKRVIPCAAYITGKHADHYGIRDKFIGVPIKIGEKGVEQIYDIDFKPDELELWKKSVASVEASSKKVDEWIAKHAH

SEQ ID NO: 45340 - DNA, 978 bp, Thermoplasma volcanium
  CDS (1)..(978)
atggcaagaaaaaagatttctgtaataggcgccggcaatgtaggcgcaacagttgcccagtttttagcaacaaaagagcttggcgatgtatacttattcgatgttgttgatgggattccagaaggaaaagctctagatattcaggaaggagcaccacactggggatatgatcttgacgttgtaggctttagtacatcagattcctcgaattacaaaaatatggagggatcagacgttatagtagtaactgccggaatggcaagaaaaccaggaatgagcagagaggacctatttgacaaaaatgtagagataattgcagatgtatctaagaacataaagaagtattcacctgattctataatagttgttgtttctaaccctgccgacataatggcatatgcccttcagaagatttccggtgttgatccgcaaagaataatgggtttaggcggttcattggatagttccaggttcaggacatttcttgctaaggagctcgacgtttcagtagaagacgtaaacgcttttgttattggaggccacggagatgatatggtgccatttataaggtactctagcgttgctggaattccaatagagaagctgcttcccaaagaaaagatagacgcaatcgtaaagaggaccaggtttggcggtggggaaatagtgaattacctcaaggcaggaagtgcttactatgcgcctgggatatccataacggctatggttgaatccgtcatcaaggataagaagagagtcataccatgcgcagcctatataacgggaaaacatgctgagcactacggaataaacaacaagttcataggtgttccaattaaaatcggtgaaagaggagttgaagagatctacgacatagacttcctgccagaggagcttgaactctggaagaagagtgtggcctctgttgaggcaagctcgaagaatgttgacgagtggttgaagaagcatccccagtag

SEQ ID NO: 45341 - protein, 325 aa, Thermoplasma volcanium
MARKKISVIGAGNVGATVAQFLATKELGDVYLFDVVDGIPEGKALDIQEGAPHWGYDLDVVGFSTSDSSNYKNMEGSDVIVVTAGMARKPGMSREDLFDKNVEIIADVSKNIKKYSPDSIIVVVSNPADIMAYALQKISGVDPQRIMGLGGSLDSSRFRTFLAKELDVSVEDVNAFVIGGHGDDMVPFIRYSSVAGIPIEKLLPKEKIDAIVKRTRFGGGEIVNYLKAGSAYYAPGISITAMVESVIKDKKRVIPCAAYITGKHAEHYGINNKFIGVPIKIGERGVEEIYDIDFLPEELELWKKSVASVEASSKNVDEWLKKHPQ

SEQ ID NO: 45342 - DNA, 933 bp, Vibrio vulnificus
  CDS (1)..(933): transl_table=11
atgaaagtagctgttattggtgccgctggtggcatcggtcaagccctagctcttttactgaaaaaccgccttccagcgggttctgatttagccctatatgatattgctccggttactccgggtgttgctgcagacctaagccacatcccaacccacgtttcgatcaaaggttatgccggtgaagatccaacgccagcactagaaggtgctgatgtggttcttatttctgctggtgttgcgcgtaagccaggtatggatcgtgcggatctatttaatgtcaatgctggtatcgtcaaatcacttgctgagcgcattgccgtggtttgtccaaatgcttgtattggtatcatcaccaacccggtgaacaccactgtgccaattgcagcagaagttctgaaaaaagcgggcgtttatgacaagcgtaaactttttggtgtgacgacgttggatgtgatccgttcagaaacgtttgttgctgagctgaaaggtcaagatccaggtgaagtccgtgtaccagtgattggtggtcactctggtgtgacgattctgcctcttctttctcaagtggaaggtgtcgagtttagcgacgaagaaattgcagccctaaccaaacgtatccaaaatgcaggtactgaagtggttgaagcgaaagcgggtggcggtagtgcaacactttcaatgggtcaggctgcgtgtcgctttggtcttgcgctcgtgaaagcactgcagggtgaagaagtgatcgaatacgcttacgttgaaggtaacggcgagcatgctagcttctttgcacagccagtgaaacttggcaaagagggtgttgaagagatcctaccttacggtgagctaagtgatttcgaaaaagcagcgctagatggcatgctagaaacgcttaacagtgacattcaaattggcgtggacttcgtaaagtaa

SEQ ID NO: 45343 - protein, 310 aa, Vibrio vulnificus
MKVAVIGAAGGIGQALALLLKNRLPAGSDLALYDIAPVTPGVAADLSHIPTHVSIKGYAGEDPTPALEGADVVLISAGVARKPGMDRADLFNVNAGIVKSLAERIAVVCPNACIGIITNPVNTTVPIAAEVLKKAGVYDKRKLFGVTTLDVIRSETFVAELKGQDPGEVRVPVIGGHSGVTILPLLSQVEGVEFSDEEIAALTKRIQNAGTEVVEAKAGGGSATLSMGQAACRFGLALVKALQGEEVIEYAYVEGNGEHASFFAQPVKLGKEGVEEILPYGELSDFEKAALDGMLETLNSDIQIGVDFVK

SEQ ID NO: 45344 - DNA, 951 bp, Wolbachia pipientis wMel
  CDS (1)..(951): transl_table=11
atgacagtacaaagaaaaaaaatatctttaatcggtgcaggaaatatcggtggaactctcacccatatgattgcactaagggaactcggtgatgttgttttacttgatattagtgatggaataccacaaggtaaagcactcgacatagcagaatcatcccctattgatggatttaatgtcaatattactggcacaaataggtatgaagatataaaaaactccgatgcaattataataaccgctggcatcgctagaaaacctggaatgagcagggatgacctcctgcaaaccaatgctaaagtaatgaaggaggttggcgaaaatattaaaaaatattctccaaacgcgtttgtaatagtggttaccaaccctttggatgccatggtttcagtggtgcataaattttcaaaccttccaactaatatgattgttggcatggcaggagtgcttgattcttcccgttttcgttactttcttgcaagtgagttaaatatctcagttgaagatatatctgcttttgtgcttggaggacatggcgacactatggtaccactaatcaattgtgcttcagttgctggagttccacttactcaaattatcgatatgggtcttatcacacagaaaaaagtcgatgaaatagttgaacgcactcgcaatggcggtaaagaaatagttgatctgcttaagtctggatctgcatactacgctcctgcatcttcagctatatgcatgttagaatcatatttaaaagataagaggcgcatattaccatgtgctgcttaccttaatggtgaatatggtgtagaagagttgtttattggtgttcctgtaattattggaaaaaacggaattgaaaagatcctagaagttaaaatgaatgatagtgaacaagaaatgtttaataagtctgtaaactcggtgagagagctggtgaaatctttaggttcataa

SEQ ID NO: 45345 - protein, 316 aa, Wolbachia pipientis wMel
MTVQRKKISLIGAGNIGGTLTHMIALRELGDVVLLDISDGIPQGKALDIAESSPIDGFNVNITGTNRYEDIKNSDAIIITAGIARKPGMSRDDLLQTNAKVMKEVGENIKKYSPNAFVIVVTNPLDAMVSVVHKFSNLPTNMIVGMAGVLDSSRFRYFLASELNISVEDISAFVLGGHGDTMVPLINCASVAGVPLTQIIDMGLITQKKVDEIVERTRNGGKEIVDLLKSGSAYYAPASSAICMLESYLKDKRRILPCAAYLNGEYGVEELFIGVPVIIGKNGIEKILEVKMNDSEQEMFNKSVNSVRELVKSLGS

SEQ ID NO: 45346 - DNA, 945 bp, Wolinella succinogenes
  CDS (1)..(945): transl_table=11
gtgggaatcatcggggcgggtcatgtgggatcaaccgtcgcctttatcttggcgactcaagggatttgtcaagagattatcatcaaagatctcaacctcgacaccgccagaggaatcgccctggatatgggtcacgccgcctcggcgacgaagactcacaccatcgtgcgtgttgccaatgaaccctcggatttgcgagggtgcgatgtggtggttttttgtgcaggctctccaagacagcctgggatgagtcgcgatgatcttttattggccaatgccaaggtgattcgtaccgttttatctgaagtgaagccctacatccaagagagcgttttggtgatggtctccaatccgctggatgccatggtttatacagcgattaaagagagcgggctctctcctttgcaggtgttgggaatggcaggaatcctagatagcgcccgaatggcctcctttatctttgagaaactcggctatggaagcgatcagattgtggcctcagtgatggggggacatggagatgatatggtgcccttgcctcgctatagtaatgtcgcaggggttcctatcacggagcttcttgagcctcaagagattgaagagatcatccatcgcacccgaaacgcaggagcagagattgtaggctatctcaaaaaaggctctgcctattttgctcccgccaaatcgaccgcgattatggttgaggcaattttgaaaaactctcatcaggtttttccctgctcggtgcttttgcagggcgagtatggctacagcgatgtggtggggggtgtgcccgtgaagcttggcagtcgaggggtctgtgagatcattgaacttgagcttcttcatgaggagagagagcgctttgaccagtcgatccagtcggttaaaagtctcattgatgccctctatcaccacgccttttttgtttctagtcgtccctag

SEQ ID NO: 45347 - protein, 314 aa, Wolinella succinogenes
MGIIGAGHVGSTVAFILATQGICQEIIIKDLNLDTARGIALDMGHAASATKTHTIVRVANEPSDLRGCDVVVFCAGSPRQPGMSRDDLLLANAKVIRTVLSEVKPYIQESVLVMVSNPLDAMVYTAIKESGLSPLQVLGMAGILDSARMASFIFEKLGYGSDQIVASVMGGHGDDMVPLPRYSNVAGVPITELLEPQEIEEIIHRTRNAGAEIVGYLKKGSAYFAPAKSTAIMVEAILKNSHQVFPCSVLLQGEYGYSDVVGGVPVKLGSRGVCEIIELELLHEERERFDQSIQSVKSLIDALYHHAFFVSSRP

SEQ ID NO: 45348 - DNA, 24 bp, Artificial sequence
  Primer sequence
atggtcaaagtcgcaattcttggc

SEQ ID NO: 45349 - DNA, 24 bp, Artificial sequence
  Primer sequence
tcatagcttggaagagtctaggat

SEQ ID NO: 45350 - protein, 533 aa, Artificial sequence
  Consensus
  Variant (2)..(2): Xaa in position 2 is any amino acid
  Variant (6)..(6): Xaa in position 6 is any amino acid
  Variant (9)..(10): Xaa in position 9 to 10 is any amino acid
  Variant (13)..(13): Xaa in position 13 is any amino acid
  Variant (16)..(22): Xaa in position 16 to 22 is any amino acid
  Variant (23)..(34): Xaa in position 23 to 34 is any or no amino acid
  Variant (36)..(36): Xaa in position 36 is any amino acid
  Variant (41)..(44): Xaa in position 41 to 44 is any amino acid
  Variant (45)..(49): Xaa in position 45 to 49 is any or no amino acid
  Variant (51)..(51): Xaa in position 51 is any amino acid
  Variant (53)..(53): Xaa in position 53 is any amino acid
  Variant (56)..(75): Xaa in position 56 to 75 is any amino acid
  Variant (76)..(84): Xaa in position 76 to 84 is any or no amino acid
  Variant (86)..(88): Xaa in position 86 to 88 is any amino acid
  Variant (94)..(94): Xaa in position 94 is any amino acid
  Variant (98)..(98): Xaa in position 98 is any amino acid
  Variant (107)..(232): Xaa in position 107 to 232 is any or no amino acid
  Variant (235)..(237): Xaa in position 235 to 237 is any amino acid
  Variant (240)..(240): Xaa in position 240 is any amino acid
  Variant (243)..(244): Xaa in position 243 to 244 is any amino acid
  Variant (246)..(253): Xaa in position 246 to 253 is any amino acid
  Variant (254)..(255): Xaa in position 254 to 255 is any or no amino acid
  Variant (257)..(257): Xaa in position 257 is any or no amino acid
  Variant (259)..(259): Xaa in position 259 is any or no amino acid
  Variant (261)..(261): Xaa in position 261 is any or no amino acid
  Variant (268)..(270): Xaa in position 268 to 270 is any or no amino acid
  Variant (272)..(272): Xaa in position 272 is any amino acid
  Variant (273)..(285): Xaa in position 273 to 285 is any or no amino acid
  Variant (287)..(287): Xaa in position 287 is any amino acid
  Variant (288)..(288): Xaa in position 288 is any or no amino acid
  Variant (290)..(295): Xaa in position 290 to 295 is any amino acid
  Variant (297)..(301): Xaa in position 297 to 301 is any amino acid
  Variant (304)..(305): Xaa in position 304 to 305 is any amino acid
  Variant (307)..(309): Xaa in position 307 to 309 is any amino acid
  Variant (313)..(324): Xaa in position 313 to 324 is any amino acid
  Variant (325)..(342): Xaa in position 325 to 342 is any or no amino acid
  Variant (348)..(351): Xaa in position 348 to 351 is any amino acid
  Variant (353)..(354): Xaa in position 353 to 354 is any amino acid
  Variant (356)..(365): Xaa in position 356 to 365 is any amino acid
  Variant (366)..(378): Xaa in position 366 to 378 is any or no amino acid
  Variant (380)..(385): Xaa in position 380 to 385 is any amino acid
  Variant (388)..(388): Xaa in position 388 is any amino acid
  Variant (392)..(393): Xaa in position 392 to 393 is any amino acid
  Variant (394)..(398): Xaa in position 394 to 398 is any or no amino acid
  Variant (400)..(400): Xaa in position 400 is any or no amino acid
  Variant (402)..(402): Xaa in position 402 is any or no amino acid
  Variant (404)..(408): Xaa in position 404 to 408 is any or no amino acid
  Variant (410)..(411): Xaa in position 410 to 411 is any or no amino acid
  Variant (413)..(413): Xaa in position 413 is any or no amino acid
  Variant (415)..(415): Xaa in position 415 is any amino acid
  Variant (417)..(424): Xaa in position 417 to 424 is any or no amino acid
  Variant (426)..(432): Xaa in position 426 to 432 is any amino acid
  Variant (433)..(435): Xaa in position 433 to 435 is any or no amino acid
  Variant (438)..(439): Xaa in position 438 to 439 is any amino acid
  Variant (440)..(466): Xaa in position 440 to 466 is any or no amino acid
  Variant (468)..(485): Xaa in position 468 to 485 is any or no amino acid
  Variant (487)..(487): Xaa in position 487 is any or no amino acid
  Variant (489)..(490): Xaa in position 489 to 490 is any amino acid
  Variant (492)..(492): Xaa in position 492 is any amino acid
  Variant (495)..(496): Xaa in position 495 to 496 is any amino acid
  Variant (497)..(499): Xaa in position 497 to 499 is any or no amino acid
  Variant (503)..(507): Xaa in position 503 to 507 is any amino acid
  Variant (508)..(513): Xaa in position 508 to 513 is any or no amino acid
  Variant (515)..(517): Xaa in position 515 to 517 is any amino acid
  Variant (519)..(528): Xaa in position 519 to 528 is any amino acid
  Variant (530)..(532): Xaa in position 530 to 532 is any amino acid
LXAAGXIGXXLAXLLXXXXXXXXXXXXXXXXXXXLXLYDIXXXXXXXXXGXAXDLXXXXXXXXXXXXXXXXXXXXXXXXXXXXXLXXXDVVVIXAGVXRKPGMTRDXXXXXXXXXXXXXXXXXXXXXXXXXXXXXXXXXXXXXXXXXXXXXXXXXXXXXXXXXXXXXXXXXXXXXXXXXXXXXXXXXXXXXXXXXXXXXXXXXXXXXXXXXXXXXXXXXXXXXXXXXXXXXXDLXXXNAXIVXXLXXXXXXXXXXPXAXIXVISNPVXXXVXXXXXXXXXXXXXXKXXGXXXXXXLXXXXXLDXXRXXXFVAXXXXXXXXXXXXXXXXXXXXXXXXXXXXXXVIGGHXXXXIXXLXXXXXXXXXXXXXXXXXXXXXXXLXXXXXXGGXEVVXXXXXXXKXGXGXXXXXMXXAXAXFXXXXXXXXLXXXXXXXXXXVVXXXXXXXXXXXXXXXXXXXXXXXXXXXXXVXXXXXXXXXXXXXXXXXXFXAXXVXLGXXXXXGVEXXXXXXXXXXXLXXXEXXXXXXXXXXLXXXI

SEQ ID NO: 45351 - protein, 38 aa, Artificial sequence
  Consensus
  Variant (2)..(19): Xaa in position 2 to 19 is any amino acid
  Variant (20)..(20): Xaa in position 20 is any or no amino acid
  Variant (22)..(22): Xaa in position 22 is any amino acid
  Variant (24)..(28): Xaa in position 24 to 28 is any amino acid
  Variant (29)..(32): Xaa in position 29 to 32 is any or no amino acid
  Variant (34)..(34): Xaa in position 34 is any amino acid
  Variant (35)..(35): Xaa in position 35 is Ala, Gly or Thr
  Variant (36)..(36): Xaa in position 36 is any amino acid
  Variant (38)..(38): Xaa in position 38 is Ile, Leu, Met or Val
GXXXXXXXXXXXXXXXXXXXLXDXXXXXXXXXGXXXDX

SEQ ID NO: 45352 - protein, 17 aa, Artificial sequence
  Consensus
  Variant (2)..(2): Xaa in position 2 is any or no amino acid
  Variant (4)..(4): Xaa in position 4 is any amino acid
  Variant (5)..(6): Xaa in position 5 to 6 is any or no amino acid
  Variant (9)..(9): Xaa in position 9 is Ile, Leu, Met or Val
  Variant (10)..(10): Xaa in position 10 is Ala or Pro
  Variant (16)..(16): Xaa in position 16 is Asp, Ser or Thr
VXIXXXAGXXRKPGMXR

SEQ ID NO: 45353 - protein, 32 aa, Artificial sequence
  Consensus
  Variant (3)..(3): Xaa in position 3 is Phe, Ile, Leu or Val
  Variant (4)..(5): Xaa in position 4 to 5 is any amino acid
  Variant (7)..(8): Xaa in position 7 to 8 is any amino acid
  Variant (9)..(9): Xaa in position 9 is Ile or Val
  Variant (10)..(11): Xaa in position 10 to 11 is any amino acid
  Variant (12)..(12): Xaa in position 12 is Ala, Asp, Glu, Gly, Asn, Gln, Ser or Thr
  Variant (13)..(20): Xaa in position 13 to 20 is any amino acid
  Variant (21)..(21): Xaa in position 21 is Ala, Cys or Ser
  Variant (22)..(22): Xaa in position 22 is Pro or Ser
  Variant (23)..(23): Xaa in position 23 is any amino acid
  Variant (25)..(28): Xaa in position 25 to 28 is any amino acid
  Variant (29)..(29): Xaa in position 29 is Ile, Leu or Val
  Variant (30)..(30): Xaa in position 30 is Ala, Asn, Ser or Thr
DLXXXNXXXXXXXXXXXXXXXXXAXXXXXXNP

SEQ ID NO: 45354 - DNA, 1512 bp, Saccharomyces cerevisiae
  CDS (1)..(1512)
atgattgaaaaggataaaagaacgattgcttttattcatccagacctaggtattgggggcgctgaaaggttagtcgtcgatgcagcattaggtctacagcaacaaggacatagtgtaatcatctatactagtcactgtgataaatcacattgtttcgaagaagttaaaaacggccaattaaaagtcgaagtttatggtgattttttaccgacaaactttttgggtcgtttttttattgttttcgcaacaattagacagctttatttagttattcaattgatcctacagaaaaaagtgaatgcgtaccaattaattatcattgatcaactgtctacatgtattccgcttctgcatatctttagttctgccactttgatgttttattgtcatttccccgaccaattattggctcaaagagctgggctattgaagaaaatatacagactaccatttgacttaatagaacagttttccgtgagtgctgccgatactgttgtggtaaattcaaatttcactaagaatacgttccaccaaacgttcaagtatttatccaatgatccagacgtcatttatccatgcgtggatttatcaacaatcgaaattgaagatattgacaagaaatttttcaaaacagtgtttaacgaaggcgatagattttacctaagtataaatcgttttgagaaaaaaaaggatgttgcgctggctataaaggcttttgcgttatctgaagatcaaatcaatgacaacgttaagttagttatttgcggtggttatgacgagagggttgcagaaaatgtggagtacttgaaggaactacagtctctggccgatgaatacgaattatcccatacaaccatatactaccaagaaataaagcgcgtctccgatttagagtcattcaaaaccaataatagtaaaattatatttttaacttccatttcatcatctctgaaagaattactgctcgaaagaaccgaaatgttattgtatacaccagcatatgagcactttggtattgttcctttagaagccatgaaattaggtaagcctgtactagcagtaaacaatggaggtcctttggagactatcaaatcttacgttgctggtgaaaatgaaagttctgccactgggtggctaaaacctgccgtccctattcaatgggctactgcaattgatgaaagcagaaagatcttgcagaacggttctgtgaactttgagaggaatggcccgctaagagtcaagaaatacttttctagggaagcaatgactcagtcatttgaagaaaacgtcgagaaagtcatatggaaagaaaaaaagtattatccttgggaaatattcggtatttcattctctaattttattttgcatatggcatttataaaaattctacccaataatccatggcccttcctatttatggccacttttatggtattatattttaagaactacttatggggaatttactgggcatttgtattcgctctctcctacccttatgaagaaatataa

SEQ ID NO: 45355 - protein, 503 aa, Saccharomyces cerevisiae
MIEKDKRTIAFIHPDLGIGGAERLVVDAALGLQQQGHSVIIYTSHCDKSHCFEEVKNGQLKVEVYGDFLPTNFLGRFFIVFATIRQLYLVIQLILQKKVNAYQLIIIDQLSTCIPLLHIFSSATLMFYCHFPDQLLAQRAGLLKKIYRLPFDLIEQFSVSAADTVVVNSNFTKNTFHQTFKYLSNDPDVIYPCVDLSTIEIEDIDKKFFKTVFNEGDRFYLSINRFEKKKDVALAIKAFALSEDQINDNVKLVICGGYDERVAENVEYLKELQSLADEYELSHTTIYYQEIKRVSDLESFKTNNSKIIFLTSISSSLKELLLERTEMLLYTPAYEHFGIVPLEAMKLGKPVLAVNNGGPLETIKSYVAGENESSATGWLKPAVPIQWATAIDESRKILQNGSVNFERNGPLRVKKYFSREAMTQSFEENVEKVIWKEKKYYPWEIFGISFSNFILHMAFIKILPNNPWPFLFMATFMVLYFKNYLWGIYWAFVFALSYPYEEI

SEQ ID NO: 45356 - DNA, 1479 bp, Homo sapiens
  CDS (1)..(1479)
atggcggccggcgaaaggagctggtgcctgtgcaagttgttgaggtttttttattcattattcttccctgggctcattgtatgtggaactttatgtgtgtgtttggtcattgtcctttggggaatcagactgctgctacagagaaagaaaaaattagtgtcaactagcagaaatgggaaaaatcaaatggtgattgcattttttcatccatactgcaatgctggtggaggaggagaaagagttttatggtgtgctttaagagccctgcagaaaaagtatcctgaagcagtttatgttgtttataccggcgatgttaatgtcaacggtcaacagatactagaaggtgctttcagaagatttaacatcagattaattcacccagtgcagtttgtttttttaaggaaacgctatcttgtggaagattcactgtatcctcacttcacactgctgggccaaagtctaggatccatttttcttggctgggaagctctaatgcagtgtgttcctgatgtttacattgattcaatgggatacgcttttacgcttcctctgtttaagtatatagggggttgccaagttggaagctatgttcattatcctactatcagcaccgacatgctctctgtagtgaagaatcaaaatattggatttaataatgcagccttcattaccaggaatccttttctcagcaaagtaaagctcatctactactatttatttgcttttatttatggacttgttggttcttgcagtgatgtagtcatggtcaattcttcttggacactaaaccatattctctcactatggaaagttgggaattgcactaacattgtttatccaccttgtgatgtgcagacatttctggacattcccttacatgagaaaaagatgaccccaggacatttgctggtttctgttggccagtttaggccggaaaagaatcatccattgcagatcagagcctttgctaaattgctgaataagaagatggttgagtcacctccttcgcttaaacttgtcctcattggaggttgtcgtaacaaagatgatgaacttagggtaaaccaactgagaaggctgtctgaggatttaggagttcaagaatatgtggaatttaaaataaacattccatttgatgaattaaagaattatttgtctgaagcaacaattggtctgcataccatgtggaacgagcattttgggattggagttgtggagtgtatggcagctggcacaattatccttgcacacaattcggggggcccaaagcttgacattgtgattcctcacgaaggagatataactggctttctggctgagagtgaagaagactatgctgaaactatcgctcacattctttccatgtctgcagaaaagagactccaaatcagaaaaagtgctcgtgcatctgtaagcagattctctgatcaggaatttgaagtgacattcctatcatctgtggaaaagttatttaagtaa

SEQ ID NO: 45357 - protein, 492 aa, Homo sapiens
MAAGERSWCLCKLLRFFYSLFFPGLIVCGTLCVCLVIVLWGIRLLLQRKKKLVSTSRNGKNQMVIAFFHPYCNAGGGGERVLWCALRALQKKYPEAVYVVYTGDVNVNGQQILEGAFRRFNIRLIHPVQFVFLRKRYLVEDSLYPHFTLLGQSLGSIFLGWEALMQCVPDVYIDSMGYAFTLPLFKYIGGCQVGSYVHYPTISTDMLSVVKNQNIGFNNAAFITRNPFLSKVKLIYYYLFAFIYGLVGSCSDVVMVNSSWTLNHILSLWKVGNCTNIVYPPCDVQTFLDIPLHEKKMTPGHLLVSVGQFRPEKNHPLQIRAFAKLLNKKMVESPPSLKLVLIGGCRNKDDELRVNQLRRLSEDLGVQEYVEFKINIPFDELKNYLSEATIGLHTMWNEHFGIGVVECMAAGTIILAHNSGGPKLDIVIPHEGDITGFLAESEEDYAETIAHILSMSAEKRLQIRKSARASVSRFSDQEFEVTFLSSVEKLFK

SEQ ID NO: 45358 - DNA, 1215 bp, Xenopus tropicalis
  CDS (1)..(1215)
atgggcccttcggttctgtttgttcacccagacctcggcattgggggcgctgaaaggctggtggtggatgcggctttggcattgaagtcccgtggctgtcatgttcaggtgtggacaagtcattacgaccctgatcactgcttctcggagactcgtgattccggtattcctataagatgttgtggagactggcttccccggagcttgctgggcagatgccatgcactttgcgcctacatacgcatgatcttcctcactctctacatagtatttcttagtggggaggaattcgatgtagtattttgtgatcaggtgtcggcttgcattcctttttttaaactggccagagattcaaagaaagtacttttttattgccattttcccgaccagcttctgactcagaggctatcattggtaaaaaggatgtacagagccccaattgattggctggaagaaaaaactactggtatggcagactgcattcttgtcaacagctatttcacttctgcaattttcaaagaaacatttgcttcattagctcacatagagccaactgttctctatccatcactaaatgtgagcaactttgaatcaacagtgtttgaagatgtaagtgacctttttcctgcaaaaagacaaaatatatttctctcaatcaatcgatttgaaagaaagaaaaatcttcatcttgctttggaatcgatgtgtaagcttcgcaagaggcttagcttgttggaatgggaacgtgttcatctcatattggctggagggtatgatgagagagtattggaaaatgttgaacattatgttgaactcaaagaaagtgctgtcaaatatgacattagtaaccatgttacatttttaagatccttttcagatgaacaaaaacgtaatctactccataatgccatatgtgttctttatacaccaagcaatgaacattttggaatagttcctatagaggctatgtacatgcgctgcccagtcatagctgttaattcgggtggtcctttggaatctgttgaaaataacgtaacaggatttttgtgcagtcctaacccggagcaatttgctgatgcaatggaaaagtttgttaaaaatcctgatcttaaaaatagaatgggtgaatctggacatataagagttaagagcaagttctccactgaagcattttcagaccaaatttatgctcacgtttgcaaattaattcattaa

SEQ ID NO: 45359 - protein, 404 aa, Xenopus tropicalis
MGPSVLFVHPDLGIGGAERLVVDAALALKSRGCHVQVWTSHYDPDHCFSETRDSGIPIRCCGDWLPRSLLGRCHALCAYIRMIFLTLYIVFLSGEEFDVVFCDQVSACIPFFKLARDSKKVLFYCHFPDQLLTQRLSLVKRMYRAPIDWLEEKTTGMADCILVNSYFTSAIFKETFASLAHIEPTVLYPSLNVSNFESTVFEDVSDLFPAKRQNIFLSINRFERKKNLHLALESMCKLRKRLSLLEWERVHLILAGGYDERVLENVEHYVELKESAVKYDISNHVTFLRSFSDEQKRNLLHNAICVLYTPSNEHFGIVPIEAMYMRCPVIAVNSGGPLESVENNVTGFLCSPNPEQFADAMEKFVKNPDLKNRMGESGHIRVKSKFSTEAFSDQIYAHVCKLIH

SEQ ID NO: 45360 - DNA, 1248 bp, Mus musculus
  CDS (1)..(1248)
atggccgaaaacctgtaccgagcccgttcccgggtttacagcccatctgtgctgtttctgcacccagacatgggtataggcggagccgagcgcctagtgctggacgcggcgctggcgctgcaggagtacggctgtgatgtgaagatatggaccgcgcactacgacccgaaccactgcttcatcgagacccgcgagctctcggtgcaatgcgcaggggactggctgcctcgcagcctgggctggggcggccgcggcgccgccatctgctcctacgtgcgcatggtctttctggcgctctacgtgctgtttctctccggcgaggagttcgacgtggtggtgtgcgaccaggtgtctgcctgtatcccggtgttcaaactggccagacggcgtaagagggtcctattttactgtcacttcccagatctgctgcttactcagagaaattcagctctgaagaagttctacagggcccccatcgactggatcgaggaatacaccacaggcatggcagaccgcatcttggtcaacagccagtacactgcttccgtctttaaagaaaccttcaagaccctgtctcacagaaatcctgatgtgctctacccatctctgaatatcggcagctttgacttggctattcctgaaaagatagatgacctcgtccccaaggggaagcaattcctgttcctctctatcaaccgatacgaaaggaagaaaaatctgcccttggcactgagatccttggtgcagcttcggaatcggttaccatctcaagagtgggataaggttcatctcttcatggccggtggttatgacgataggatcccggagaacgtggagcactataaggagttgaagaaaatggtccaagagtcagaccttgagcgtcatgtgaccttcctgcggtccttctcggacagacagaagatctcactcctccacggctgcttgtgtgtgctgtacactccgagcaacgagcactttggcatcgtccctctggaggccatgtacatgcagtgcccagtgatcgctgttaataacggtgggcccctggagtccattgtccacaaggtcacggggttcctgtgtgagccagacccagtgcacttctcagaagccatggagaagttaatccacaaaccatccttaaaagccacgatgggcctcgctggaaaagccagggtggcggagaagttttcagctgatgcatttgcagaccagctgtaccagtatgtcacgaagctggtgtag

SEQ ID NO: 45361 - protein, 415 aa, Mus musculus
MAENLYRARSRVYSPSVLFLHPDMGIGGAERLVLDAALALQEYGCDVKIWTAHYDPNHCFIETRELSVQCAGDWLPRSLGWGGRGAAICSYVRMVFLALYVLFLSGEEFDVVVCDQVSACIPVFKLARRRKRVLFYCHFPDLLLTQRNSALKKFYRAPIDWIEEYTTGMADRILVNSQYTASVFKETFKTLSHRNPDVLYPSLNIGSFDLAIPEKIDDLVPKGKQFLFLSINRYERKKNLPLALRSLVQLRNRLPSQEWDKVHLFMAGGYDDRIPENVEHYKELKKMVQESDLERHVTFLRSFSDRQKISLLHGCLCVLYTPSNEHFGIVPLEAMYMQCPVIAVNNGGPLESIVHKVTGFLCEPDPVHFSEAMEKLIHKPSLKATMGLAGKARVAEKFSADAFADQLYQYVTKLV

SEQ ID NO: 45362 - DNA, 1092 bp, Archaeoglobus fulgidus DSM 4304
  CDS (1)..(1092): transl_table=11
gtgaaaatttgcgtttttcacgactacttcggagcaattggaggtggggagaaggttgcgctgacaatctcgaagctcttcaacgcagacgtaatcacaaccgacgtcgatgcagttccagaggagttcaggaacaaagttatcagcttgggtgagacgataaagctgccacctttaaagcagatagacgcttcccttaagttctacttttctgactttccagattacgacttctacatactttctggaaactgggtaatgttcgcctcgaagaggcacattcctaatctcttatactgttacactcctccaagagctttttacgatctctacggagattacctaaaaaagagaaatattttgacgaagcccgcttttatattatgggtaaagtttcacaggaaatgggctgagaggatgctaaaacacatagataaagtcgtttgcatctcgcaaaacataaaaagcagatgcaaaaatttttggggaatcgatgccgaagtcatctatccgcctgtggaaacttcgaagtttaagttcaagtgctacggagacttttggctttctgtaaacagaatttatccagaaaaaaggatagaattgcagcttgaagtttttaaaaagttgcaagatgagaagctttacatcgttggctggttctcaaagggggatcatgcggagaggtacgcgagaaagattatgaaaatagctccagacaacgttaagtttttgggaagtgtcagtgaagaagagttgatcgatctatattctcgatgcaagggtttgctatgcacagctaaggatgaggattttggacttacacctattgaggcaatggcttctggaaagcctgtaatcgccgtaaacgagggtggttttaaggagactgttataaacgaaaaaacaggatatctcgtcaatgcagatgttaatgagataattgatgcaatgaaaaaagtttcgaaaaatcctgataaatttaagaaagactgttttagaagggcaaaggagtttgacattagtatatttaaaaacaagataaaagatgcgataagaatcgtaaagaaaaattttaaaaacaacacatgctaa

SEQ ID NO: 45363 - protein, 363 aa, Archaeoglobus fulgidus DSM 4304
MKICVFHDYFGAIGGGEKVALTISKLFNADVITTDVDAVPEEFRNKVISLGETIKLPPLKQIDASLKFYFSDFPDYDFYILSGNWVMFASKRHIPNLLYCYTPPRAFYDLYGDYLKKRNILTKPAFILWVKFHRKWAERMLKHIDKVVCISQNIKSRCKNFWGIDAEVIYPPVETSKFKFKCYGDFWLSVNRIYPEKRIELQLEVFKKLQDEKLYIVGWFSKGDHAERYARKIMKIAPDNVKFLGSVSEEELIDLYSRCKGLLCTAKDEDFGLTPIEAMASGKPVIAVNEGGFKETVINEKTGYLVNADVNEIIDAMKKVSKNPDKFKKDCFRRAKEFDISIFKNKIKDAIRIVKKNFKNNTC

SEQ ID NO: 45364 - DNA, 1212 bp, Arabidopsis thaliana
  CDS (1)..(1212)
atggcgaaaaaagaaggttcaaagatgaacatcgccattatacatccagatcttggaataggcggagcagagagattgattgttgatgcggccgttgagcttgcctcgcacggtcataaagttcatatcttcacctctcaccacgacaaatccagatgcttcgaggaaactctttccggtatctttcaagttacggtgtatggatctttcctgccacggcatattttctaccgactacacgcagtgtgtgcatatttgcggtgcttgtttgttgctctctgtgttcttttgggttggtcttcattcgatgttgtactagcagaccaagtttcagtcgtagtcccattgctgaaactcaaaaggtcatctaaggttgttttctactgccatttcccggatctcttgctagctaagcatacaacaacacttagacggatgtatcggaaacccattgatttcattgaagaacaaacaacagggatggctgatatgatccttgttaacagtaacttcacggcatcaacatttgccaatacatttaaaaggctaaatgcacaagggagtcgcccagctgtactttaccccgcagtcaatattgatcagttcattgaaccccacacttataagttgaatttcctctccataaaccgctttgagaggaaaaagaacatcgatctagctgtttcagcttttgctatcctatgcaaacataagcaaaatctgagtgatgttacccttaccgttgcaggtggatatgacgagcgattgaaggagaatgttgagtacttggaggagctcagaagtttagccgagaaagaaggagtttctgatcgagttaactttatcacatcttgttcaaccgctgaaagaaatgaacttctctcaagctgcttgtgcgttctctacacccccacggatgaacattttggtattgttccattagaagcaatggctgcatacaaacccgtgatagcctgcaacagtggtggccccgtggagacggtaaagaatggagtaacaggctatctttgtgaaccaactccagaagatttcagttcggcgatggctagattcatcgagaatcctgagttggcgaatagaatgggagctgaagccaggaaccatgtcgttgaatcattctctgtgaagacgtttggacagaagttgaatcagtatctcgttgatgtcgtatcaagtcctaaagaagattga

SEQ ID NO: 45365 - protein, 403 aa, Arabidopsis thaliana
MAKKEGSKMNIAIIHPDLGIGGAERLIVDAAVELASHGHKVHIFTSHHDKSRCFEETLSGIFQVTVYGSFLPRHIFYRLHAVCAYLRCLFVALCVLLGWSSFDVVLADQVSVVVPLLKLKRSSKVVFYCHFPDLLLAKHTTTLRRMYRKPIDFIEEQTTGMADMILVNSNFTASTFANTFKRLNAQGSRPAVLYPAVNIDQFIEPHTYKLNFLSINRFERKKNIDLAVSAFAILCKHKQNLSDVTLTVAGGYDERLKENVEYLEELRSLAEKEGVSDRVNFITSCSTAERNELLSSCLCVLYTPTDEHFGIVPLEAMAAYKPVIACNSGGPVETVKNGVTGYLCEPTPEDFSSAMARFIENPELANRMGAEARNHVVESFSVKTFGQKLNQYLVDVVSSPKED

SEQ ID NO: 45366 - DNA, 2772 bp, Bacillus halodurans C-125
  CDS (1)..(2772): transl_table=11
atgagagaaggatatttttccctagtcttacatgcccacttgccttatgttcgtcatcaagaagaagatcgattggaggaacgttggctgtttgaagccatgtcggaaacgtatattcctcttttatgggccttagaaaaactgcccgtaaaacatgcagtcaccatttcctttacccctcctgttatggagatgctgagtgacccacttgtgcaaactcgttacttgaatcaccttgaaaataccgaacagcttttgaaaaaagaagagaaacgtacaaacgatcaacgaacgcaaaatctcgttcagttttataagcagcgctatgaaaagctaaaagcaacgtttttacagtgggatcggaatctactcatcggtttccgcagcttgatggagaacgagcaatgcacattaatgacgtccgctgccacgcatgccttttttccatacttaaaaacaaaagaagcgattcgcgcccaagttcgccacggaatcgcatgctttgaacaacattttggcaaaaaaccacttgggttctggctcccagaatgtgccttctctccaggcgttgaccgaattttatttgaggaaggcatccgttacacatttgtagatgaacacgctgttttgacggcagatccgactccgcataagggatcaagtgccccgatctatagcccgcatggaattgcgttgttccctcgccatacggaactttccgcaaaagtgtggagctcaacgcttgggtatcctggtgatgtcgattaccgtgaattttaccgtgacatcgcatatgaccgggaatgggattatattaagccgcacgtccacaaagacgggattcggatcgatacagggttgaagtatcatcggattacagggcatacggaggaaaaagacttgtatgtccgtgaatgggcggagaaacgtgtgcaagaacatgcgaatcattttataggtgcgattcatcatgagatcgatcaacatggtggacaaaactttccgccgtatgtcatggtcactccgtttgatgctgagttgttcggtcattggtggtttgaagggccagagtggatcgaggcattatatgagcaaggagcagaccgtgtgtccttcataacaccagagctctatttgcagcgtcactatcaagattttcagaccgctcatgtgagcttttcgacttgggggagagacggttatggtcacgtttggttaaatgaccataatgcttggatgtatagacattatcatcgcatggaaaaagatttagcgaaaatagtggctatgtatccacaacctacagttctcgaaaagcaggccattcagcaaatggttagagagtggatgctcgctgttagcagtgactgggcgtttattcttgacggtcaaacggctgcacagtatgcgtcagagcgtttccatgagcatgttcgtcgcttcgacacgattcagagcgccttgcttgaagatcgtatagattcccagtggcttaagcaaatgcttgcagcgtttccttttctggagacgatcgacgagcgcgtatttttaagcccccatgatcgttacgtgcaatcgaaaaaagagacccagccatttgaaggaacgtgctcgatccttatgctgagttgggaatatccgcctcatgttgtcggaggcctatcacgtcatgtggatgctttgtctcaagcattagcaaaaaaggggcatgaaattcacgtcgttacagccgctatggatggagctcccgagtacgaaaaaaatggggaggtccacatccatcgggtcagcgggttacaaccagagagggagccatttttagattgggtggccagcttgaacttagccatgtttgaacatgtgaaaaaattataccgttttcgtccgtttgatgtcattcatgctcatgattggctcgtatcaggagctgctttagcattaaaacacctttttcaaacatcgcttatggctactattcatgcaacggagcacgggcggaatcaaggtatccataccgagttacagcaagcgattcatgaacaggaaatgaagctcgtgacagaggctgatcaaatcattgtttgcagtcaatttatgaaagaacatgttcaatcattgtttgtgcctaatcctgataaagtggcagtaatcgcaaatggtgtggctcgtgagcaaattgaagctgcacgtcttcaaacgatttctcctgaaaatcgtttcattgtattttctgttgggcgaatcgttcaagaaaaaggattttctctcttgattgaagcagctgcaaaatgcaaagaactaggcgaaccgattcaatttgttgtggctgggcacgggcctctactagctgactatcaacaacaagtaaaggaacgtcaccttgaagcttggatttcctttgtcggctatattagtgatagtgagagaaatgaatggtaccatcgcgcggatgtctgcatttttcctagcttgtacgagccgttcggaatcgtcgcgttagaagcgatggctgcaggcacacctacgattgtatctgacacgggtggtttagcggaaattgttgagcatggagacaatgggctaaaagtacctactggtgatgtggacgcgattgtagctcaattgttgtccctctatcataaaccgcttttgcgggcacaaattggttttaaaggttcacaagacgtgatcgagcagtatagttgggagacgattgccgatcaaacggaagcgatcttagtgaaaaaaatgaagcgagacatctatgcctaa

SEQ ID NO: 45367 - protein, 923 aa, Bacillus halodurans C-125
MREGYFSLVLHAHLPYVRHQEEDRLEERWLFEAMSETYIPLLWALEKLPVKHAVTISFTPPVMEMLSDPLVQTRYLNHLENTEQLLKKEEKRTNDQRTQNLVQFYKQRYEKLKATFLQWDRNLLIGFRSLMENEQCTLMTSAATHAFFPYLKTKEAIRAQVRHGIACFEQHFGKKPLGFWLPECAFSPGVDRILFEEGIRYTFVDEHAVLTADPTPHKGSSAPIYSPHGIALFPRHTELSAKVWSSTLGYPGDVDYREFYRDIAYDREWDYIKPHVHKDGIRIDTGLKYHRITGHTEEKDLYVREWAEKRVQEHANHFIGAIHHEIDQHGGQNFPPYVMVTPFDAELFGHWWFEGPEWIEALYEQGADRVSFITPELYLQRHYQDFQTAHVSFSTWGRDGYGHVWLNDHNAWMYRHYHRMEKDLAKIVAMYPQPTVLEKQAIQQMVREWMLAVSSDWAFILDGQTAAQYASERFHEHVRRFDTIQSALLEDRIDSQWLKQMLAAFPFLETIDERVFLSPHDRYVQSKKETQPFEGTCSILMLSWEYPPHVVGGLSRHVDALSQALAKKGHEIHVVTAAMDGAPEYEKNGEVHIHRVSGLQPEREPFLDWVASLNLAMFEHVKKLYRFRPFDVIHAHDWLVSGAALALKHLFQTSLMATIHATEHGRNQGIHTELQQAIHEQEMKLVTEADQIIVCSQFMKEHVQSLFVPNPDKVAVIANGVAREQIEAARLQTISPENRFIVFSVGRIVQEKGFSLLIEAAAKCKELGEPIQFVVAGHGPLLADYQQQVKERHLEAWISFVGYISDSERNEWYHRADVCIFPSLYEPFGIVALEAMAAGTPTIVSDTGGLAEIVEHGDNGLKVPTGDVDAIVAQLLSLYHKPLLRAQIGFKGSQDVIEQYSWETIADQTEAILVKKMKRDIYA

SEQ ID NO: 45368 - DNA, 1119 bp, Clostridium acetobutylicum ATCC 824
  CDS (1)..(1119): transl_table=11
atgaaggttgcactagtacatgactggcttaccaatatgggtggagcagaaagagtaattataaatttaaaagaaatatataaggaagcacctatatatacttccttatataatccagataaattagatgatgagttaagaaatattgatgtaagaacatcatttcttcaaaagcctaaaaatattaaaagagggcatcagaagttacttccttttatgccaatggcttttgagagttttgatttaaatgagtatgatattgttttgagtagttgttcttcttgtgctaagggagtagttactaatcctaatactatgcatgtttgttattgccatacaccaatgagatatgcatgggaatattactatgaatatgcagatgagtggggactaaataagttaaaagggaaacttcttaaatatgtaatgaattatataagactatgggatggtgtttcatctaagagagttgattattatatagctaattctcaaaatgtagcaaaaagaatatggaaacattataagcgagaaagtgttgttattcatcctcctgtaaggtgcaagttattcgatataagtgatgttaatgaagagtattttttaatagtgtctaggttagttccatataaaagaatagatttagcagtagaggtttttaatgaattaggtttaccattagttgtaataggcggtggaaaagatttagatagattaaagaatatggcaaaggataatataaaattcttaggaagacagtctgatgaggttattaaagagtactactctaaatgcagggcttttatatttccaggagaagaggattttggtataacacctcttgaagctcaggcaagtggaaggccggttatagcttatggaaagggaggagcgttagaaactgtagttagtggagttactggagtattttttaaagagcagacagttgactcattaaaaagtgctgtcaatgaatttgaaaaaattaattttgataagagtgtcataagaagacatgcagaagagtttgatgaggagatatttaagaaaaagattagagaatatttaagtagatcatatgatgaatttaaaaaattaaaaaaatggaaggtaatataa

SEQ ID NO: 45369 - protein, 372 aa, Clostridium acetobutylicum ATCC 824
MKVALVHDWLTNMGGAERVIINLKEIYKEAPIYTSLYNPDKLDDELRNIDVRTSFLQKPKNIKRGHQKLLPFMPMAFESFDLNEYDIVLSSCSSCAKGVVTNPNTMHVCYCHTPMRYAWEYYYEYADEWGLNKLKGKLLKYVMNYIRLWDGVSSKRVDYYIANSQNVAKRIWKHYKRESVVIHPPVRCKLFDISDVNEEYFLIVSRLVPYKRIDLAVEVFNELGLPLVVIGGGKDLDRLKNMAKDNIKFLGRQSDEVIKEYYSKCRAFIFPGEEDFGITPLEAQASGRPVIAYGKGGALETVVSGVTGVFFKEQTVDSLKSAVNEFEKINFDKSVIRRHAEEFDEEIFKKKIREYLSRSYDEFKKLKKWKVI

SEQ ID NO: 45370 - DNA, 1203 bp, Caenorhabditis elegans
  CDS (1)..(1203)
atggtccgggtaaccattctccatccagatctaggcatcggtggagccgaacgattgattgttgatgctgctgttggattacaggatcgaggacactctgttcggattttcacgaatcaatatagtagatcgcattgtttccaagaaactctagatttggatatttgtactgtggttccatggataccccgttcaatttttggaaaaggtcatgctctttgtgcatatcttaaaatgatcattgctgctctctacattgtaatctaccacaaagatactgacgtcatactttcggattctgtatctgctagtcaatttgttcttcgtcatttctcaaaggcaaaactcgtattctattgtcatttcccggatcgacttttaacgaaacgtgatggaaatctgaaagctttctatagaaatattattgattggattgaagagtacacaactggacttgcagatgtcatttgtgtcaatagtaattttacaaaaaatgtggttcgtgaaacattcaagtcactggcatctcaggagctgaccgtactctatccttcgttgaacaccgagtttttcgattcgattgaagcttcggatgattttggtgaagaaattccacgtggtaccaaatatgttttcacctcactgaaccgatttgaacgaaagaagaatatcgttttggctctagacgcattcgagaaattgaaatcgaatcttcctgccgacgaattttcgcaatgtcatcttgttattgctggcggatatgatttgaaaaacccagaaaacatcgaacactatgatgaacttgttgaacatatgaagaaactggagctcccagctgatcagatcgtatttctccactcaccatctgacactcaaaaagtaaatctcattcggagaagtcgtgcggtactttacacgcctgatagagaacatttcggaattgttccagttgaagcaatgtacttgggaaccccagtaattgctgttaacactggaggtccctgtgaatcggttcggaataatgagacgggatttttggttgatcaaacggccgaagcgtttgctgagaaaatgattgatttgatgaaagatgaggaaatgtatcgaagaatgagtgaggaaggtccgaaatgggtgcaaaaagtgtttgcatttgaagcatttgcaagaaagctcgacgagattattcaatctacgctttaa

SEQ ID NO: 45371 - protein, 400 aa, Caenorhabditis elegans
MVRVTILHPDLGIGGAERLIVDAAVGLQDRGHSVRIFTNQYSRSHCFQETLDLDICTVVPWIPRSIFGKGHALCAYLKMIIAALYIVIYHKDTDVILSDSVSASQFVLRHFSKAKLVFYCHFPDRLLTKRDGNLKAFYRNIIDWIEEYTTGLADVICVNSNFTKNVVRETFKSLASQELTVLYPSLNTEFFDSIEASDDFGEEIPRGTKYVFTSLNRFERKKNIVLALDAFEKLKSNLPADEFSQCHLVIAGGYDLKNPENIEHYDELVEHMKKLELPADQIVFLHSPSDTQKVNLIRRSRAVLYTPDREHFGIVPVEAMYLGTPVIAVNTGGPCESVRNNETGFLVDQTAEAFAEKMIDLMKDEEMYRRMSEEGPKWVQKVFAFEAFARKLDEIIQSTL

SEQ ID NO: 45372 - DNA, 1314 bp, Caenorhabditis elegans
  CDS (1)..(1314)
atgcacgtggttattgtccatcctgaacaatggaacgggggctccgatcggtgcaccgttgcccttatcagacattttgtctcccaggggcatcgtgttacatggcttacaactatgattgatgagtactggaagaatcacacttttgatggagttgaaattcgagaggttgggctcaagcttcaccctggagattggtggtcgcagaatgttgctctcggctggcatatggtctttagcaacttgaatccagatgttgcgattattgatcactccgctagttgcgttccgatgatcaagtggcgattcccacagtgcaaaattttgttctactgccattttccacaacagttagtaacaccgtctcgatttttcctgtatagatggtatgcaaagctcatcggaatcgtcgaagaagaacttttcgggcacatcgatcaaattttcgtgaacagtaattttactgccactcaattctgcaaagtgatgccaaatattgagaagaacaaggttcgagtcgtttatccaccgtgtgatattgattggattgttagcgcgtctgagcgtcctgtcagtcgtgctcagcgcgccaagaacgaaacgtacacgttcctgtcaatgaacagattttggccagagaagcggcttgatatcattatcgaagctgcatcgattctgaaacaaaaaggatatcacttccatgttcaacttgccggatctgtcatgccacacattccggaaagtagaatatattatgaggttcttcagagaatgactgaggagctcaatgttactgatatggtcacattcatcccttcgccgactgacaaggtgaagtttcagctgtatcaacaatgtgatacagcgctctacacaccgcctaacgagcatttcggaattgtcccaattgaggctttggatcaaagaagaccggttattgtctgtgatagtggaggcccagctgaaaccgtcttggaagatattacaggaaccaagattgccaagccatgtggcgagcttttggccgaagccatgcttcaccatatgaacaaacgtgattggccagaactggacacagatgagggatacgctaaacagcggcatcgccttgaaaccgaattctccacgcgcggattttgtgggaatatcgaccgagccattgccgaaatgatgggaacgttggagatcagctcatcggagccaacgacaacgccgctcgtggacacaatagttcatcagccaactgccactgaagtctattcgaagcctcaacagtacaataaggcggctcacagcaggcgtgctcaagcttaa

SEQ ID NO: 45373 - protein, 437 aa, Caenorhabditis elegans
MHVVIVHPEQWNGGSDRCTVALIRHFVSQGHRVTWLTTMIDEYWKNHTFDGVEIREVGLKLHPGDWWSQNVALGWHMVFSNLNPDVAIIDHSASCVPMIKWRFPQCKILFYCHFPQQLVTPSRFFLYRWYAKLIGIVEEELFGHIDQIFVNSNFTATQFCKVMPNIEKNKVRVVYPPCDIDWIVSASERPVSRAQRAKNETYTFLSMNRFWPEKRLDIIIEAASILKQKGYHFHVQLAGSVMPHIPESRIYYEVLQRMTEELNVTDMVTFIPSPTDKVKFQLYQQCDTALYTPPNEHFGIVPIEALDQRRPVIVCDSGGPAETVLEDITGTKIAKPCGELLAEAMLHHMNKRDWPELDTDEGYAKQRHRLETEFSTRGFCGNIDRAIAEMMGTLEISSSEPTTTPLVDTIVHQPTATEVYSKPQQYNKAAHSRRAQA

SEQ ID NO: 45374 - DNA, 1215 bp, Thermoanaerobacter tengcongensis MB4
  CDS (1)..(1215): transl_table=11
ttgaagagctcaaaaaaccgcaggaaatgggggttagctatggataatttaaaagtcacggtgtttaccaatgaataccctcctaatatttatggaggagcaggtgttcatgtagactacctgaccagagagttgtccaagttaatgaaagtagatgtgaggtgttttggggaccagaaatttttttcggagaatttgactgtaaagggatataaagagtgggaggagttaaaagaagggttagatcctaggtatcaaaaagttttaggtcctttttcaatagatttggcgatggtgaaggaccctgttgattccgatgtccttcattgccacacctggtacaccttcatggcaggctttttagctaaaaagctttatgataagcctttagttgtgacaattcacagccttgagcccttaaggccgtggaaagaagaacagttggggaatgggtataaattgagttcctggatggaaaaaacaggaattaaagctgctgacaggattatagccgtctcccaaggctcaaaagaggacatattgaaatattacgacgttcctgaagaaaagatagaggtcatatacaatgggatagatttaaaggagtacaaaaagatagatagaaatgttgctagaaaaaagtacggaattgaaggaaggtacattctctttgtagggagaatatctaggcagaaagggattactcacttgatagatgcagtgaaatatttgcctaaggatgtaaaagtggtgctgtgcgccagctctccagacacgccagaggtgttggaagaggtagagcaaaaggtgaagttgcacgacaatataatttggataaacaaaatggtggaaaaagaagatatcgtagagctttatagcaatgcagaagtgtttgtgtgcccttctatttatgagccctttggcataataaatttggaagcgatggcttgtgagactcccgttgtggcaagcgctacaggtgggattaaagaagttgtggtgcatgaggagacaggctttttggtagagccgggaaactctgaagagcttgcgaaatatataaatattctcctggagaatagagagttggcaaagaaatttgggataaatggaaggaaaagagttgaggagatgttcagctggggaagtattgctaaaaagacctatgaaatgtataggaaggttgtacaagagtataaaaaagcgaaaaagtaa

SEQ ID NO: 45375 - protein, 404 aa, Thermoanaerobacter tengcongensis MB4
MKSSKNRRKWGLAMDNLKVTVFTNEYPPNIYGGAGVHVDYLTRELSKLMKVDVRCFGDQKFFSENLTVKGYKEWEELKEGLDPRYQKVLGPFSIDLAMVKDPVDSDVLHCHTWYTFMAGFLAKKLYDKPLVVTIHSLEPLRPWKEEQLGNGYKLSSWMEKTGIKAADRIIAVSQGSKEDILKYYDVPEEKIEVIYNGIDLKEYKKIDRNVARKKYGIEGRYILFVGRISRQKGITHLIDAVKYLPKDVKVVLCASSPDTPEVLEEVEQKVKLHDNIIWINKMVEKEDIVELYSNAEVFVCPSIYEPFGIINLEAMACETPVVASATGGIKEVVVHEETGFLVEPGNSEELAKYINILLENRELAKKFGINGRKRVEEMFSWGSIAKKTYEMYRKVVQEYKKAKK

SEQ ID NO: 45376 - DNA, 1275 bp, Drosophila melanogaster
  CDS (1)..(1275)
atggttcgagttctgttcctccacccggatttgggcatcggaggagctgagcgactggtggtggatgccgctctggcactcaaggagcggggtcaccaggttagcttcctaacgaatcaccacgacagcacgcactgcttcaaggagacggcggacggcacttttccggtccacgtagtgggcgactggttgccacgcgggctcttcggaagattctatgccatctgtgcctatctgcgcatgctctatgcggcgatctacgccagtttttttatgccccagcgggagcaagtggacgtggtggtgtgcgacctaatctctgtgtgcattccagttctccgcttcgcccctcatcgtccgaaggttctattctactgccactttccggatcagcttctcagcagccgtgaaggactgctaaagcggctgtaccgcctgcccatcaactggctggaggagcacacgatcggtctagcagacaaggtgctggtcaactccaaatttacgctacgtgtcttccaggacacctttcgccgactgagcacggtgccggatgtgctgtatccttcactgcacacccagtactttgaccagatgcagaaaaagctagaacagcggtctgctttactggacgagccagtgcatccgcgagtaccactcaacgcctttatctatctggacatcaatcgctacgagcgcaagaagaaccacgcccttgccttacattccctgcgccttctgggcgacatgctgcccgccacggacttcaagcgctgtcgcctgatcatcgccgggggttacgacaccagatgcatggaaaatgtggagcacttcgcggagctggagcaccttacggaggagttgaaacttcaggatcacgttgtgctgctacgctcgcctaccgacgaggagaaatgtcgcctgctctttgccgctcactgtctgctgtatacgccagagaacgagcacttcggcattgtgccgctggagggcatgtactgctcgaagccagtcgtggcattaaacagcggcggacccactgaaacggtggtgagcacttccactggctttctgtgcgaaaagaccgagaagagctttggtggagcaatgctccagcttttccgggacgagcagctgcgtgtaaagatgggagaccagggtcacaaacgggtgcagcaaaagttctctttccaagcattcgcagatcggctgaacggcattattagagatcttgttcctatctccagggagtcgagtgctaagaaaaataaataa

SEQ ID NO: 45377 - protein, 424 aa, Drosophila melanogaster
MVRVLFLHPDLGIGGAERLVVDAALALKERGHQVSFLTNHHDSTHCFKETADGTFPVHVVGDWLPRGLFGRFYAICAYLRMLYAAIYASFFMPQREQVDVVVCDLISVCIPVLRFAPHRPKVLFYCHFPDQLLSSREGLLKRLYRLPINWLEEHTIGLADKVLVNSKFTLRVFQDTFRRLSTVPDVLYPSLHTQYFDQMQKKLEQRSALLDEPVHPRVPLNAFIYLDINRYERKKNHALALHSLRLLGDMLPATDFKRCRLIIAGGYDTRCMENVEHFAELEHLTEELKLQDHVVLLRSPTDEEKCRLLFAAHCLLYTPENEHFGIVPLEGMYCSKPVVALNSGGPTETVVSTSTGFLCEKTEKSFGGAMLQLFRDEQLRVKMGDQGHKRVQQKFSFQAFADRLNGIIRDLVPISRESSAKKNK

SEQ ID NO: 45378 - DNA, 1428 bp, Drosophila melanogaster
  CDS (1)..(1428)
atgtttctgtttctgtttcttctctggttgttgttatcgcttgtgttggtggcagtactctctttccttttcctgaggcaatggttgcttggccggaagaataagttgcacacatcgtcggaaaatggcatcaacgtgggcatttttcacccgtattgcaacgcgggtggcggcggagaacgcgtcttgtggtgcgccgtgagagcactacaggaaaagtaccagaacgccaggatggtaatctacacaggcgacatagacgcttctcccaattccatactgcaaaaggccaagaatgtcttcaacattgccgtcgatagtgacaatgtgaagttcgtcttcctgaagcaacgccactggatcgaggccaagaactatcctcatttcactctgctgggccagagcattggatcgatggtcgtgggtctggaggcactctgcaggtttccgcccgacatctacatcgacaccatgggatacgcctttacgtatcctctgttccgctacttggcccagtccaaggtgggctgctatgttcactatccggttattagcaccgatatgctgaagagggttcagcagcgacagatgtcgcacaacaacaagaagtacgtggcgaggaacccctttctcacctggactaagcttgcctactaccgcctcttctcaagaatgtacaagtgggttggctgttgtgctgagactatcatggtgaactcctcgtggaccgagaatcatattctgcaactgtgggatgtgcccttcaaaacacaccgggtttaccctccgtgcgaggttagtcacctaaagagccttcagcacacggaaaaaggcgacgaattcatcatactgtctgtcggacagttccgcccggagaaagaccatcccctccagctgcaagccatatacgagctccgaactctcttggcccaagacgaggccctttggaaccaaattaagttggttattgtgggctcctgccgaaatgaagatgactacgagcggttgaaaaacatgcaggacctgacaaagcatctgtcgctagaaaacaatgtgcaatttagtgtgaatgtcccttacgaagaccttcttaagttgtatcaaactgcccacattggcattcacactatgtggaacgaacattttggcatcggcatcgtcgagtccatggctgctggccttataatggtggcccacaagtcagggggtcctttgcttgacattgtcgaaacttccgcgggaagtcagaacggattcctggctactgacgccgttgaatacgcagaaaacatattaaatattattgttaacaactcagaaatgaacggcattcgaaacgcagccagggcctccgtggaacggttttctgagcaagagtttgaaaaaaactttcttcgagctgtttcaacgctatttaccaacaattaa

SEQ ID NO: 45379 - protein, 475 aa, Drosophila melanogaster
MFLFLFLLWLLLSLVLVAVLSFLFLRQWLLGRKNKLHTSSENGINVGIFHPYCNAGGGGERVLWCAVRALQEKYQNARMVIYTGDIDASPNSILQKAKNVFNIAVDSDNVKFVFLKQRHWIEAKNYPHFTLLGQSIGSMVVGLEALCRFPPDIYIDTMGYAFTYPLFRYLAQSKVGCYVHYPVISTDMLKRVQQRQMSHNNKKYVARNPFLTWTKLAYYRLFSRMYKWVGCCAETIMVNSSWTENHILQLWDVPFKTHRVYPPCEVSHLKSLQHTEKGDEFIILSVGQFRPEKDHPLQLQAIYELRTLLAQDEALWNQIKLVIVGSCRNEDDYERLKNMQDLTKHLSLENNVQFSVNVPYEDLLKLYQTAHIGIHTMWNEHFGIGIVESMAAGLIMVAHKSGGPLLDIVETSAGSQNGFLATDAVEYAENILNIIVNNSEMNGIRNAARASVERFSEQEFEKNFLRAVSTLFTNN

SEQ ID NO: 45380 - DNA, 1353 bp, Mus musculus
  CDS (1)..(1353)
atggcggcggacactgggagctggtgcgtgtacgccgtgctgcggtttttctattcactcttctttcctggactgatgatatgcggagttttgtgtgtatatttggtcattggcctttgggttatcaggtggcatctacagagaaagaagaagtctgtgtcgaccagcaaaaatggaaaagaacaaacggtggttgcatttttccatccatactgtaatgcaggtggcggaggagagagagttctgtggtgtgctttgagagccctgcagaaaaagaaacgctaccttgtggaagattcccggtatcctcacttcacattgctaggccaaagtcttggatccattcttctcggctgggaagctctgatgcagcgcgttcctgatgtttacatcgactcaatgggatacgccttcacactccctctctttaagtatgtgggaggttgccgagtcggaagctatgttcactatcccacgatcagcactgacatgctgtctgtggtgaagaatcagaatcctggatttaataatgctgctttcattagcagaaatgctcttctcagcaaagcaaagctcatctattactatttatttgcttttgtttatggccttgttggatcttgcagtgacatagtcatggttaattcttcttggacattaaaccatatcctctcactgtggaaggttgggcattgcactaacattgtctatccaccttgtgatgtgcagacatttctggacatccctttacatgagaagaaggtgaccccagggcatttgctggtttccattggccagttcagacctgaaaagaatcatgctttgcagatcaaagcctttgctaaattgttaaatgagaaagcagctgagttaggccattctcttaaacttgtccttattggagggtgtcgcaacaaagatgatgagtttagagtaaaccaactgagaagtctatctgagaatttgggagttcaagaaaatgtggaatttaaaataaacatttcattcgatgaattgaagaattacttgtctgaagcgaccatcggtctgcatactatgtggaatgagcattttgggattggagttgtcgagtgtatggcagctggcacagttatccttgcacacaactcaggaggcccgaagctggacattgtcattcctcatgaaggacagataactggctttctggctgagagtgaagaaggctatgctgactctatggctcacattctttctctgtctgcagaagagagactccaaatcaggaagaatgctagagcgtctataagcagattctccgaccaggagtttgaagtagcattcctgtgttccatggagaagttacttacttag

SEQ ID NO: 45381 - protein, 450 aa, Mus musculus
MAADTGSWCVYAVLRFFYSLFFPGLMICGVLCVYLVIGLWVIRWHLQRKKKSVSTSKNGKEQTVVAFFHPYCNAGGGGERVLWCALRALQKKKRYLVEDSRYPHFTLLGQSLGSILLGWEALMQRVPDVYIDSMGYAFTLPLFKYVGGCRVGSYVHYPTISTDMLSVVKNQNPGFNNAAFISRNALLSKAKLIYYYLFAFVYGLVGSCSDIVMVNSSWTLNHILSLWKVGHCTNIVYPPCDVQTFLDIPLHEKKVTPGHLLVSIGQFRPEKNHALQIKAFAKLLNEKAAELGHSLKLVLIGGCRNKDDEFRVNQLRSLSENLGVQENVEFKINISFDELKNYLSEATIGLHTMWNEHFGIGVVECMAAGTVILAHNSGGPKLDIVIPHEGQITGFLAESEEGYADSMAHILSLSAEERLQIRKNARASISRFSDQEFEVAFLCSMEKLLT

SEQ ID NO: 45382 - DNA, 972 bp, Homo sapiens
  CDS (1)..(972)
atgcccctattaaaacttgtacatggctccccattggtttttggagaaaagttcaagctttttaccttggtgtctgcctgtatcccagtgttcaggctggctagacggcggaagaagatcctattttactgtcacttcccagatctgcttctcaccaagagagattcttttcttaaacgactatacagggccccaattgactggatagaggaatacaccacaggcatggcagactgcatcttagtcaacagccagttcacagctgctgtttttaaggaaacattcaagtccctgtctcacatagaccctgatgtcctctatccatctctaaatgtcaccagctttgactcagttgttcctgaaaagctggatgacctagtccccaaggggaaaaaattcctgctgctctccatcaacagatacgaaaggaagaaaaatctgactttggcactggaagccctagtacagctgcgtggaagattgacatcccaagattgggagagggttcatctgatcgtggcaggtggttatgacgagagagtcctggagaatgtggaacattatcaggaattgaagaaaatggtccaacagtccgaccttggccagtatgtgaccttcttgaggtctttctcagacaaacagaaaatctccctcctccacagctgcacgtgtgtgctttacacaccaagcaatgagcactttggcattgtccctctggaagccatgtacatgcagtgcccagtcattgctgttaattcgggtggacccttggagtccattgaccacagtgtcacagggtttctgtgtgagcctgacccggtgcacttctcagaagcaatagaaaagttcatccgtgaaccttccttaaaagccaccatgggcctggctggaagagccagagtgaaggaaaaattttcccctgaagcatttacagaacagctctaccgatatgttaccaaactgctggtataa

SEQ ID NO: 45383 - protein, 323 aa, Homo sapiens
MPLLKLVHGSPLVFGEKFKLFTLVSACIPVFRLARRRKKILFYCHFPDLLLTKRDSFLKRLYRAPIDWIEEYTTGMADCILVNSQFTAAVFKETFKSLSHIDPDVLYPSLNVTSFDSVVPEKLDDLVPKGKKFLLLSINRYERKKNLTLALEALVQLRGRLTSQDWERVHLIVAGGYDERVLENVEHYQELKKMVQQSDLGQYVTFLRSFSDKQKISLLHSCTCVLYTPSNEHFGIVPLEAMYMQCPVIAVNSGGPLESIDHSVTGFLCEPDPVHFSEAIEKFIREPSLKATMGLAGRARVKEKFSPEAFTEQLYRYVTKLLV

SEQ ID NO: 45384 - DNA, 1464 bp, Xenopus tropicalis
  CDS (1)..(1464)
atggcagggattctgtgcttatgtgggatgatgcgactgttgactgccttgttcatcccagtactgattgccagcattggtttgtgcctcgtcttggtgttgctctttatttgcactcgattgtggattcagcgaaagaaaaagcagagcgtggaaataggaaaagatgggaaaaagaaaagagtggtggcgttttttcacccatactgcaatgctggaggtggaggagagagagtactgtggtgtgcactgagatctctgcaaaagaggtacaaagatgcgatctatgtcatttataccggtgacaaagatgtgtctgaggaacagatccttaatggcgcagctgcaaggtttaacatcaagctgtcccaccctgtaaagttcatcttcctggaaaagcgaggacttgtggaagcgagtttttatccccgttttactttgctgggccagagtctgggctctgttgttttaggctgggaagctcttacaaagtgtgtgccagatatttacattgattctatgggctatgcatttacattgcctcttttcaagtatgtcggaggatgccaagttggctgctatgtgcattaccctactatcagcatggatatgctgtctgttgtgcgcagccagaacgcgagattcaacaatgctgctttcatctctaacaatcctgttctgagcaggctcaaactgatttattattacctgtttgcagtaatctatggatgggttggttcatgtagtgacgtcatcatggttaactcaacatggactttcgcccacatccttgatctttggaagtgtagtgagcgtaccagcatcgtttatcccccttgtgatgttcagacatttttagatattaatttgaatcagcacaaagacatagaggagcattccattgtttctattgggcagtttaggcccgagaaggaccaccctttgcaaatatgcgcgtttgcagccttacttaaaaagaaaaccactgaaaaacttaagctgaaacttatcctaattgggggatgtcgaaacaatgaagatgaactacgtgtatcagaactgaaaaaactcagctctgaactcggaattcctgtggagttcaaagtaaacattccgtttgcagaactaaagaaacatttgagtgaagctaccattggcttgcacaccatgtggaacgagcactttggaattggcatagttgagtgcatggcagctggtaccataattctggctcataactctggaggcccaaaactggatattgtggtgccttatgaagaacatgagactggcttcttggcagatagcgtggagagctatgcagcagcaatggattatattctgtgtctgacaccagaacagaggctaactataaggcaaaatgcacgtcgttctgttgccagattttcagatcaggaatttgaagctaatttcctagcctcttcagagccactatttatgtga

SEQ ID NO: 45385 - protein, 487 aa, Xenopus tropicalis
MAGILCLCGMMRLLTALFIPVLIASIGLCLVLVLLFICTRLWIQRKKKQSVEIGKDGKKKRVVAFFHPYCNAGGGGERVLWCALRSLQKRYKDAIYVIYTGDKDVSEEQILNGAAARFNIKLSHPVKFIFLEKRGLVEASFYPRFTLLGQSLGSVVLGWEALTKCVPDIYIDSMGYAFTLPLFKYVGGCQVGCYVHYPTISMDMLSVVRSQNARFNNAAFISNNPVLSRLKLIYYYLFAVIYGWVGSCSDVIMVNSTWTFAHILDLWKCSERTSIVYPPCDVQTFLDINLNQHKDIEEHSIVSIGQFRPEKDHPLQICAFAALLKKKTTEKLKLKLILIGGCRNNEDELRVSELKKLSSELGIPVEFKVNIPFAELKKHLSEATIGLHTMWNEHFGIGIVECMAAGTIILAHNSGGPKLDIVVPYEEHETGFLADSVESYAAAMDYILCLTPEQRLTIRQNARRSVARFSDQEFEANFLASSEPLFM

SEQ ID NO: 45386 - DNA, 1248 bp, Rattus norvegicus
  CDS (1)..(1248)
atggccgaaaacctgtaccgaacccggtcccgggtttacagcccatccgtgctgtttctgcacccagatatgggtataggcggtgccgagcgcctagtgctggacgcggcgctggcgctgcaggagtacggctgtcaggtgaagatatggaccgcgcactacgacccaaaccactgtttcattgagacccgcgagctctcggtgcagtgcgcaggggactggctgcctcgcagcctgggctggggcggccgcggcgccgccatctgctcctacgtgcgcatggtctttctggcgctctacgtgctgtttctctccggcgaggagttcgacgtggtggtgtgcgaccaggtgtctgcctgcatccctgtgttcaaactggccagacggcggaagagggtcctcttttactgtcacttcccagatctgctgcttactcagagaaattcatctctgaagaagttctacagggcccccatcgactggatcgaggagtacaccacgggcatggcagatcgcatcttggtcaacagccagtacacagcttccgtctttaaggaaaccttcaagaccctgtctcacagaaatcccgatgtgctctacccatctctgaacatcggcagcttcgacttggccgttcctgaaaagatagatgacctagtccccaaggggaaacagttcctgttcctctccatcaaccggtacgagaggaagaaaaacctgcccttggccctgagctccctggtccagcttcgcgctcggttgccgcctcaagagtgggagaaggttcatctgttcatggctggcggctacgacgacagggtcctggagaacgtggagcactataaggagttgaagaaaatagtccaagagtcagatctcgagcggcacgtgaccttcctgcggtccttctcagacagacagaagatctcactcctccacggctgcttgtgtgtgctctacacgcccagcaatgagcactttggcatcgtccctctggaggccatgtacatgcagtgcccggtcatcgctgtcaattccggtgggcccttggagtctattgtccacaaggtcacggggtttctgtgtgagcccgacccagttcacttctcggaagccatggagaagttcatccacaaaccatccttaaaggcaacgatgggcctggccggaaaagccagggtggcagagaagttttccgctgatgcatttgcagatcagctctaccagtatgtcaccaaactggtgtag

SEQ ID NO: 45387 - protein, 415 aa, Rattus norvegicus
MAENLYRTRSRVYSPSVLFLHPDMGIGGAERLVLDAALALQEYGCQVKIWTAHYDPNHCFIETRELSVQCAGDWLPRSLGWGGRGAAICSYVRMVFLALYVLFLSGEEFDVVVCDQVSACIPVFKLARRRKRVLFYCHFPDLLLTQRNSSLKKFYRAPIDWIEEYTTGMADRILVNSQYTASVFKETFKTLSHRNPDVLYPSLNIGSFDLAVPEKIDDLVPKGKQFLFLSINRYERKKNLPLALSSLVQLRARLPPQEWEKVHLFMAGGYDDRVLENVEHYKELKKIVQESDLERHVTFLRSFSDRQKISLLHGCLCVLYTPSNEHFGIVPLEAMYMQCPVIAVNSGGPLESIVHKVTGFLCEPDPVHFSEAMEKFIHKPSLKATMGLAGKARVAEKFSADAFADQLYQYVTKLV

SEQ ID NO: 45388 - DNA, 1242 bp, Anopheles gambiae str. PEST
  CDS (1)..(1242)
atggtgcgtgtactgtttgttcatccggatctgggcattggcggtgcggaacgactggtcgtggatgctgcactggctttgcagagcaagggccacacggtcagctttctgacgaaccatcacgatccgaaccactgtttcgacgagacgaaggatggtcgtttgccggtgatgacggtcggcgactggctgccgagggacatctttggcaagttttacgccgtgtgcgcctacatacgcatgctgtacgctgccttctactacagtctgttcctgtccaagaaggaaccggtcgatgtcgtgttttgcgatttgatttcgctaggcattcccatttttcgactcgccaggcccaacccaaagatcctgttctactgtcactaccccgaccagctgctgtcgaagccgggcaacctgctgaaacagtgctaccgcatgccgctcaactacctcgaggaagtgactacggcccaggccgatggcatcctggtgaacagcaagttcaccagccgcgtgtttaaggaaacgttcaagcgcatcgcaaccgatccggatgtgctgtacccgtcgctaaacacccggttctttgacgaaaccgccatcgaagagtccgaccaggtggtgaagctaccgaacgacgcgttcgtcttcctgtccatcaatcggtacgagcggaagaaaaaccttgcactcgctttgcacgccttcaaggcgttgcaggacatggtgtcctcgagcgagtggcacaaggtgtgtctcatcatggccggcgggtatgacgatcgcgtgatggaaaacgtggaacattacgacgaactggaggagctggccgaagacatgcagatacgggccaaagtgcgcctgctacgatctccgaccgatcgtcaaaagctgttcctactgcatcgtgcccaagcgctaatttacacgcccgagttcgagcacttcggaatcgttccgctggagggaatgtacctttcgaagcccgtcattgccgccaacagtggcggaccgatggagaccatcattcacgagcagacgggctttttgtgcgaacccgtgccgaaggagtttgccgccgcaatggcaaagctggtgagagacgacaagcactgcgaacgcatgggtgccatggggcggaagcgcgttcagcagcgcttttccttcgaagcgttcagcaccaagctggacaacgttgtgaccgatctgattcagcgggatggcgagaaaaagttcaaatag

SEQ ID NO: 45389 - protein, 413 aa, Anopheles gambiae str. PEST
MVRVLFVHPDLGIGGAERLVVDAALALQSKGHTVSFLTNHHDPNHCFDETKDGRLPVMTVGDWLPRDIFGKFYAVCAYIRMLYAAFYYSLFLSKKEPVDVVFCDLISLGIPIFRLARPNPKILFYCHYPDQLLSKPGNLLKQCYRMPLNYLEEVTTAQADGILVNSKFTSRVFKETFKRIATDPDVLYPSLNTRFFDETAIEESDQVVKLPNDAFVFLSINRYERKKNLALALHAFKALQDMVSSSEWHKVCLIMAGGYDDRVMENVEHYDELEELAEDMQIRAKVRLLRSPTDRQKLFLLHRAQALIYTPEFEHFGIVPLEGMYLSKPVIAANSGGPMETIIHEQTGFLCEPVPKEFAAAMAKLVRDDKHCERMGAMGRKRVQQRFSFEAFSTKLDNVVTDLIQRDGEKKFK

SEQ ID NO: 45390 - DNA, 1479 bp, Rattus norvegicus
  CDS (1)..(1479)
atggcggcggacacagggagctggtgcgtgtacgcagtgctgcgatttttttattcactcttctttcctggactaattatatgtggagttctgtgcgtatatttggtcattggcctttgggttatcaggagacatctacagaggaagaaaaagtcagcctcaaccagcaaaaatggaaaagatcaaatggtggttgcatttttccatccatactgcaatgcaggcggaggaggagagagagttctgtggtgtgctttgagagccctgcagaaaaagtatcctgatgcagtctatgttgtgtatactggtgacattcatgtcagtggtcaacagatactggaaggtgctttcagaaggtttaacatcaagttggttcacccagtgcagtttgttttcttaaggaaacgctaccttgtggaagattctcgctatcctcacttcacattgctaggccaaagtctcggctccattcttcttggctgggaagctctgatgcagcgtgttcccgatgtgtacatcgattcgatgggctacgccttcacactgcctctgtttaaatatgtgggaggttgccgagttgggagctacgttcactatcccactatcagcacagacatgctgtctgtggtgaagaatcaaaatcctggatttaataacgctgctttcattagcagaaacgctctcctcagcaaagcaaagctcatctactactatttatttgcttttgtttatggccttgttggatcttgcagtgacatagtcatggttaattcttcatggacactaaaccatattctctcactgtggaaagtcgggcattgcactaacattgtttatccaccttgtgatgtgcagacatttctggacatccctttacatgagaaaaaggtgaccccagggcatttactggtttccattggccagttcaggccggaaaagaatcatgctttgcagatcaaagcctttgctaagttgctaaatgagaaggcagctgagtcccgccattctctaaaacttgtccttattggaggatgtcgcaacaaagatgatgagtttagagtaaaccaactgagaagactgtctgagaatttgggagttcaagaaaatgtggaatttaaaataaacatttcattcgatgaattgaagaattacttgtctgaagcaacaatcggtctgcataccatgtggaatgagcattttgggattggagttgtcgagtgtatggcggctggtacaattatcctcgcacacaattccggaggcccaaagcttgacatcgtcattcctcatgaaggacagataactggatttctggctgagagtgaagaaggctatgctgaaaccatggcccatattctctctctgtccccagaaaagagacttcgaatcagggaaactgctagagcatctctgagcaggttttccgaccaggagtttgaagtagcattcctgtgttccgtggggaagctgcttacttaa

SEQ ID NO: 45391 - protein, 492 aa, Rattus norvegicus
MAADTGSWCVYAVLRFFYSLFFPGLIICGVLCVYLVIGLWVIRRHLQRKKKSASTSKNGKDQMVVAFFHPYCNAGGGGERVLWCALRALQKKYPDAVYVVYTGDIHVSGQQILEGAFRRFNIKLVHPVQFVFLRKRYLVEDSRYPHFTLLGQSLGSILLGWEALMQRVPDVYIDSMGYAFTLPLFKYVGGCRVGSYVHYPTISTDMLSVVKNQNPGFNNAAFISRNALLSKAKLIYYYLFAFVYGLVGSCSDIVMVNSSWTLNHILSLWKVGHCTNIVYPPCDVQTFLDIPLHEKKVTPGHLLVSIGQFRPEKNHALQIKAFAKLLNEKAAESRHSLKLVLIGGCRNKDDEFRVNQLRRLSENLGVQENVEFKINISFDELKNYLSEATIGLHTMWNEHFGIGVVECMAAGTIILAHNSGGPKLDIVIPHEGQITGFLAESEEGYAETMAHILSLSPEKRLRIRETARASLSRFSDQEFEVAFLCSVGKLLT

SEQ ID NO: 45392 - DNA, 1950 bp, Magnaporthe grisea 70-15
  CDS (1)..(1950)
atggaaatgaactctcgcctagaagcaagcgtctcgatttactacatcaagctttactttgaagccggcctgtcgcatgcgaagaaattcaaaatctgcttgatgacttgcgggacttgtgattggtcgctgtttattgacgttgttccttcgaatttcaattccaacatcctagataattggcaaggattttggtgtaattactgccacttttgcatgcatgcggcttgcgataactggatggaggttgtcgagctgtatcacatcgtgcctatttccttcgctactcttgcatccatccatgtaacctttgagctgaagcaaatctggctcaacctgcaccaccccccactcttcgacgctcgcctctcgtccaaattgccaagcagcaacatggcaaaggaaaagagaaagaagccgccgaccgggtcggaaggcaagacgatcgtctttctgcacccggatctgggcatcggcggcgccgagcgcctggtcgtggacgctgccgttggcctgcagaagcgcggccaccgagtcgtcatcttcacgagccactgcgacccgagtcactgcttcgacgaagcccgcgacggcactctcgacgtccgcgtccgcggcaacaccatcgtgccgccgtcgatcctgtcgcgcttctccatcctctgcgccatcctccgccagatacacctcatcctgcagatcgccatcttctcgagcgagctcgccgacctccagcccgacggcttcttcgtcgaccagctcagcgccggcctgccgctgctggccggcctctcgccccagctcaactccccgccgccgcacatactcttctactgccactttccggacctgctgctcgcgcagggccggcaaaagtggtggaagcgcctgtaccgcgtgccgtttgatcggctggaggagtggagcatgggcttcgcggacgcaatcgccgtcaactcgggcttcaccaagggcgtcgtctcgcgcacctggcccgccctcgctgccaagaccgacctccaggtggtctatccttgcgtcgatgtgcgcgtgccgggagagccgcccaaggagggtcagagtgcagcagagggcaacaaggaagatgtgacctccgaactggactggaaggaatccaggatactgctcagcatcaaccgattcgagcgcaaaaagaatgtcgcattggcaatcaaagcctacgcgggtctacccaaggagaagcgggcgggcgtaaaactcgtcattgcgggcggctacgacaaccgcgtacccgaaaatgtctcctaccatacggagctcacaaacctggccgactcgcttgatctccgtcacggaaccaccaagacggtcgtcacagcactgggtctggcacgtgatccttcaatcgacgtactcttcctgcagtccgtcccgtcagcgctcaaaacagcactcctacgatcggcaaagctgctgctctacacgccagcagaggagcatttcggcattgtgcctctggaggcgatgctggcaggcctgcccgtccttgcctgcgacagcggtggtcccaccgagacagtactggagggcgtcacgggctggctgcgctcacccgagaagcccgaggagtggaccaaggtggtagatatggtcttgaacgaactctccgatgagcaaaaggatgatatgcgtgctgcgggtcccaagagggtcaaggagaatttcgccgaggagcaaatggcggagcggcttgacaggatctttgatgacatggagcagagcgcttccggatacaattgggcaggggacaagtgggatttctcgagcactttgagtgttttgataccctgcgtaaaatcccaagaaataccatatcatgacatctgcatcagtgacgacttaatatggtctcgatgcgtaatgacgcccatcagggtacccaaggtattagaaatgaatgcaggatag

SEQ ID NO: 45393 - protein, 649 aa, Magnaporthe grisea 70-15
MEMNSRLEASVSIYYIKLYFEAGLSHAKKFKICLMTCGTCDWSLFIDVVPSNFNSNILDNWQGFWCNYCHFCMHAACDNWMEVVELYHIVPISFATLASIHVTFELKQIWLNLHHPPLFDARLSSKLPSSNMAKEKRKKPPTGSEGKTIVFLHPDLGIGGAERLVVDAAVGLQKRGHRVVIFTSHCDPSHCFDEARDGTLDVRVRGNTIVPPSILSRFSILCAILRQIHLILQIAIFSSELADLQPDGFFVDQLSAGLPLLAGLSPQLNSPPPHILFYCHFPDLLLAQGRQKWWKRLYRVPFDRLEEWSMGFADAIAVNSGFTKGVVSRTWPALAAKTDLQVVYPCVDVRVPGEPPKEGQSAAEGNKEDVTSELDWKESRILLSINRFERKKNVALAIKAYAGLPKEKRAGVKLVIAGGYDNRVPENVSYHTELTNLADSLDLRHGTTKTVVTALGLARDPSIDVLFLQSVPSALKTALLRSAKLLLYTPAEEHFGIVPLEAMLAGLPVLACDSGGPTETVLEGVTGWLRSPEKPEEWTKVVDMVLNELSDEQKDDMRAAGPKRVKENFAEEQMAERLDRIFDDMEQSASGYNWAGDKWDFSSTLSVLIPCVKSQEIPYHDICISDDLIWSRCVMTPIRVPKVLEMNAG

SEQ ID NO: 45394 - DNA, 1422 bp, Gibberella zeae PH-1
  CDS (1)..(1422)
atggctccagacgccaaagataaaggctcaatcgtcttcttccaccccgatctcggtatcggtggtgcagagcgtcttgtagtagacgctgctgtcggtcttcaggagcgaggtcatcgcgtggtgatatttacgaatcactgcgatcctaagcattgctttgatgaatgtcgtgatggaactctcgatgtccgtgttcgtggtcactggctcatccccatgtccatcctctcccgcctcacaatcctctgcgccatcctccgtcatgtccacctcctcatccacatagctctcaccggcgagctacaagacctaaacccgcgcgcttttatcgtcgaccaactctccgccggccttcctctcatgcgctacatcgcccccgacagcccaatcctcttctactgccatttccccgaccttcttcttgcgcagggtcgcgaatctgccctgaagcgcctgtatcgtcgcccgttcgattggcttgaagaatggactatgggcttcgcgagcgctgtggcagtaaactcgggtttcacaaagggtgttgtgaaccagacgtggcccaatctcaagaagcgcaccgacaccaaagtggtgtatccttgtgtcgacactggggtcaaggaaaaggaagatgctggtaatgatggggacattcctttcaagggcgagaagatcatcttgagcatcaaccgttttgagaggaagaaggatattggacttgcgatcaaggctttcgctgctattcctgaagctgagcgcaagggctgccgtctcattttagcaggcggatatgatcctcgagtttctgaaaacgtccaataccatgccgaactggaagccctcgcctcctcccacggtctcgagcacctcaccaccaagactctcatcaccgctctgtccgcgcccacatccgtccccgtcctcttcctcctctcgatccccaactctctcaaagctacacttcttcgttccgcgcgtgttcttctctacacgcccaaaaacgagcatttcggcatcgttcctctcgaagctatgctcgcacggacacctgttctggccgccaactcaggcggtcctgtcgagacgatcgtggacggtgaaacaggatggttgcgatctccagacgatgtagatgagtgggccaaggtcgtgcgtcttgcgctggaacttggtgatgatcagatcaagtctatgggagatagaagcgaagcaagagtcaaggatatgtttggacgggcgcagatggccagccgattcaacgaaattttggatgacattgttgaaaagaaggcttcatcctccgtgcgcactgttgtcaatgtcgcagcggtctttggtttgggtcttttgggtttggtagcttcagcacttattgctcgtatgggaaagcaagctgagccatcggaattttcagtttaa

SEQ ID NO: 45395 - protein, 473 aa, Gibberella zeae PH-1
MAPDAKDKGSIVFFHPDLGIGGAERLVVDAAVGLQERGHRVVIFTNHCDPKHCFDECRDGTLDVRVRGHWLIPMSILSRLTILCAILRHVHLLIHIALTGELQDLNPRAFIVDQLSAGLPLMRYIAPDSPILFYCHFPDLLLAQGRESALKRLYRRPFDWLEEWTMGFASAVAVNSGFTKGVVNQTWPNLKKRTDTKVVYPCVDTGVKEKEDAGNDGDIPFKGEKIILSINRFERKKDIGLAIKAFAAIPEAERKGCRLILAGGYDPRVSENVQYHAELEALASSHGLEHLTTKTLITALSAPTSVPVLFLLSIPNSLKATLLRSARVLLYTPKNEHFGIVPLEAMLARTPVLAANSGGPVETIVDGETGWLRSPDDVDEWAKVVRLALELGDDQIKSMGDRSEARVKDMFGRAQMASRFNEILDDIVEKKASSSVRTVVNVAAVFGLGLLGLVASALIARMGKQAEPSEFSV

SEQ ID NO: 45396 - DNA, 1437 bp, Aspergillus nidulans FGSC A4
  CDS (1)..(1437)
atggcagaaaaactgctccccaaaccggcgagcataataatcattcatcccgatctcggcattggcggtgcagaacgcctgatcatcgacgtcgccctcgcgctccagaactctggccacaaagtcaccgtctacacgtcgcaccgggacaaatcgcattgcttcgaggaggcgcgggatgggacgcttgaagtacgggttcgcggggacagtttcttcccaccaagtataagaggccggtttgttgttcttttggcgatcttgaggcagctttgcttgacgttcgagttgttgcgggaggtcgcgcaaacggaaaacgagaatgccgaccaagtgtttattgttgaccaggtaccggcctgtgtgccgttactaaagatgcttggtccgcggtggtttgcttcaaagggaaaacaacgcatcctcttttactgtcattttcccgaccaattacttgcgcggcgagatggtgggtctgctttactgcaattgttgaaggggctgtaccggtatccttttgactggtttgagggatgggcgatgagtgcgagtgaccgggttgttgcgaactccactttcacgaagagcgtggtgagaggtgtctttggggcagagaaattgggtgatgtacgggttgtctatccgtgtgttgatacagcggcgaaagagaagagtgagaaggatgtggggactatctgggaagggaagaagatactcctgagtgtgaatcggttcgagaagaagaaggatcttgcgctggcgataagggcatatcatgggcttggggaaaagaggaagggggtaagattggttattgctggcggctatgaccctcgcataacagaaaatgtgcaataccacaaagaacttgatgccctcgcaacaagcctcggcttgcaaaccgccacatcgaagaccgtcccgtctgccctctccatcccctcctccatcgacgtcctctttcttccctcagtgtcctctgccttccgcgacagcctcctggctaaatcctcgcttctcctctacaccccggtgaacgaacactttgggatcgttcccattgaggcaatgcgcgcggggattcccgtccttgcatcgaacacgggcggtccgcttgagacgatcgttgaagggaagacagggtggctccgtgacgtggatgacgtcccagcttggacaggtgtcattgagaaggtgttgtatcagttgggggcggacgagcttcggcagatgagtgtggcggcgaaggagcgcgtcgaggctgagttctcgctgcacgctatgggtgatagacttgagggggagattgggaagatgctgagtactgaacggagacagtttaatggcgcgcaacaagcattgttgcttttgggaatgctgggggtggtatttgcagtgcttgtagggttggttctggcgtgggtcggttttgtataa

SEQ ID NO: 45397 - protein, 478 aa, Aspergillus nidulans FGSC A4
MAEKLLPKPASIIIIHPDLGIGGAERLIIDVALALQNSGHKVTVYTSHRDKSHCFEEARDGTLEVRVRGDSFFPPSIRGRFVVLLAILRQLCLTFELLREVAQTENENADQVFIVDQVPACVPLLKMLGPRWFASKGKQRILFYCHFPDQLLARRDGGSALLQLLKGLYRYPFDWFEGWAMSASDRVVANSTFTKSVVRGVFGAEKLGDVRVVYPCVDTAAKEKSEKDVGTIWEGKKILLSVNRFEKKKDLALAIRAYHGLGEKRKGVRLVIAGGYDPRITENVQYHKELDALATSLGLQTATSKTVPSALSIPSSIDVLFLPSVSSAFRDSLLAKSSLLLYTPVNEHFGIVPIEAMRAGIPVLASNTGGPLETIVEGKTGWLRDVDDVPAWTGVIEKVLYQLGADELRQMSVAAKERVEAEFSLHAMGDRLEGEIGKMLSTERRQFNGAQQALLLLGMLGVVFAVLVGLVLAWVGFV

SEQ ID NO: 45398 - DNA, 1557 bp, Gallus gallus
  CDS (1)..(1557)
atgagagagaggcaatgcctggttggtcccgcccccaagcaacgggcgcttccggcgggtggaggggcggcggcgcgcaagatggtggcgggtgggctgtgcctctgcgggctgctcagattgctgtgctcactgttaatccctgcgttgtttctaagtggagttctgtgcgcctgcttggccatcctgctgtggggaattcggctctggatacaaggaaggagaaagcagcagaccccagcaggaagggatgggaggcggccactgctggttgcattttttcatccctattgcaatgcaggtggtggaggagagagggtcttgtggtgtgccataagaacgctccagaaaaagtacaaaaatgtaacgtgtgttgtttacactggtgatagagatgccactgaagaagacataatagaaggtgctttcagaagattcaacattaaattaactcatcctgtgaagtttgtatttctggaaaaacgctatcttgtggaagcttctctttatcctcacttcactttgctgggacaaagtttaggctctgtgtttcttggttgggaagctcttctaaagtgcgttccagatatttacattgactcaatgggttatgctttcacgctccccctctttaaatatttaggaggttgtcgtgttggatgctatgtccattatcccaccatcagcaccgatatgctttctgtagttaggaatcaggataccaggtttaacaatgcagccttcattacaaacaatcctctcttcagcaaatttaaacttgtctactactacttgtttgccttcatgtacggattggtgggatcctgcagtgacgtggttatggtcaattcttcttggacactaaatcacatcctttctctctggagagctgggccttgcactagcgttgtgtatccaccatgtgatgttcagaccttcctggatatcccgctggaagaggaaaagaacagtgctgaatattctattgtttccatcagtcaattcaggcctgaaaaagatcaccctttgcaaatccgagcttttgctaagttgctgaaggagaagagactgaggcagcagctctcattgaagcttatcttaattggaggctgtcggaaccagcaagatgaagaccgtgtgaataaccttaagagtctttgtgaagagcttggagttagtaacaatgtgatgttcagaataaacattccctttgaggagctaaagaaacacctggccgaggccactatcggtctgcatacgatgtggaatgagcacttcggcatcggagtggttgaatgtatggcagctggcacagttatcctggctcacaattctggaggccccaaactggatattgtggtaccctacgaaggacgtattacaggcttcctagcagagaacgaggacagttatgctgagacaatggcttacatcttttccatgtctcctgaaaaaaggttagagatcagagaaagtgctcgccagtctgtgtgcaggttttctgaccagcattttgaagagacattcctcttatctgtggagcccttatttaaataa

SEQ ID NO: 45399 - protein, 518 aa, Gallus gallus
MRERQCLVGPAPKQRALPAGGGAAARKMVAGGLCLCGLLRLLCSLLIPALFLSGVLCACLAILLWGIRLWIQGRRKQQTPAGRDGRRPLLVAFFHPYCNAGGGGERVLWCAIRTLQKKYKNVTCVVYTGDRDATEEDIIEGAFRRFNIKLTHPVKFVFLEKRYLVEASLYPHFTLLGQSLGSVFLGWEALLKCVPDIYIDSMGYAFTLPLFKYLGGCRVGCYVHYPTISTDMLSVVRNQDTRFNNAAFITNNPLFSKFKLVYYYLFAFMYGLVGSCSDVVMVNSSWTLNHILSLWRAGPCTSVVYPPCDVQTFLDIPLEEEKNSAEYSIVSISQFRPEKDHPLQIRAFAKLLKEKRLRQQLSLKLILIGGCRNQQDEDRVNNLKSLCEELGVSNNVMFRINIPFEELKKHLAEATIGLHTMWNEHFGIGVVECMAAGTVILAHNSGGPKLDIVVPYEGRITGFLAENEDSYAETMAYIFSMSPEKRLEIRESARQSVCRFSDQHFEETFLLSVEPLFK

SEQ ID NO: 45400 - DNA, 972 bp, Gallus gallus
  CDS (1)..(972)
atggccttcgtggcgctctacgtcctcctgctcagcggggagcacgccgacgccttcatctgcgaccaggtgtctgcttgcattccgatacttaggctggccagaacacggaagaaggttttgttttactgtcactttcctgatcagctcctgaccaaaagagaatctttcctgaagcgcctctacagaatgccgctggactggctggaagagtacaccactggcatggcagactgtatcgttgtgaacagcaaattcaccgccagtgtattcaaggagacgtttaaatccttgtctcacataaatccagatgtcctttatccatcactcaacaccagtagcttcgagacagtggttcctgtggacatagctgacttgattcccaaaaagaccaagttcttgtttctatctattaataggtatgagagaaaaaagaaccttgcattggctcttgaagctttgcatgagcttcgaggaagacttgattctcatcagtggagtgaagttcacttggttatggcaggtggctatgacaaacgagttctggaaaacgtggagcattatgaagaactaaggggaattgcagctaagcttaatgttagcgatcatgtcactttcttgagatcattcacagatgaacagaaagtctctctccttaataactgtgtatgtgtgctttacacaccaagtaacgaacactttggcattgttcctctggaggcaatgtatatgagacgtccagttatagcagttaattcgggtggtcctttagaatcaatcttgaataacgttacaggatttttatgtgatcctctgccaacacaattctctgaggccatggaaaaaatcgtgagagatcctctcttgaaggactcaatgggagcagctgggagagtcagatttatggaaaaattttcctcagaagcattctcagaacagctgtatcaatacatatgcagactaacacaataa

SEQ ID NO: 45401 - protein, 323 aa, Gallus gallus
MAFVALYVLLLSGEHADAFICDQVSACIPILRLARTRKKVLFYCHFPDQLLTKRESFLKRLYRMPLDWLEEYTTGMADCIVVNSKFTASVFKETFKSLSHINPDVLYPSLNTSSFETVVPVDIADLIPKKTKFLFLSINRYERKKNLALALEALHELRGRLDSHQWSEVHLVMAGGYDKRVLENVEHYEELRGIAAKLNVSDHVTFLRSFTDEQKVSLLNNCVCVLYTPSNEHFGIVPLEAMYMRRPVIAVNSGGPLESILNNVTGFLCDPLPTQFSEAMEKIVRDPLLKDSMGAAGRVRFMEKFSSEAFSEQLYQYICRLTQ

SEQ ID NO: 45402 - DNA, 1257 bp, Oryza sativa (japonica cultivar-group)
  CDS (1)..(1257)
atggcagcggcggcgggaggagtcgccggcgagccgtcggggacgaggacgaagcagcttaaggtcgccgtgatccaccccgatctcgggataggtggtgctgagagattgatagtcgatgcggcttgtcagcttgcggtccatggtcatgatgttcatgttttcacatcacatcatgacaaaaaccgatgctttgaagagactgtttctggtccatttgaagttaaagtatatggagatttcttgcctcgccatattttttaccgcttccacgctatctgtgcatatcttcgctgcatttttgttgcaatgtgtgtgctactttggtggccctcatttgacatcatattagtagaccaggtttcggttgtgattccactgcttaaactgaaggcaaaatccaagatagtattttattgtcactttcctgatatgttgcttgctcaacatactaccatgcttcggaggttgtatcgcaagccaattgacatgattgaagaaacaactactggtatggcagatttgattctagtaaacagcaagttcactgcaacaacatttgccaggaccttttgcagccttcatgctagaggagtcgagcctgctgttctatatccagctgtctctgttgaacagtttcaggaacctcatgcttataagttgaatttcctctcaattaaccggtttgagagaaaaaagaatcttggtcttgccatttcagcattttctctgcttcgctctgttgcttctatgctacctggtgatgctcgacaggaagtaaccttaacagtagcaggtggatatgataagcgtctcagagaaaatgttgaataccttgaggagctcaaaagattggcagcgagtgaaggggtttctgaacatgtcaaatttgtgacatcttgttcaacttctgaaaggaacgaacttctctccaactgcctttgtgtgttatacactccaaaggatgaacatttcggtattgttcctctggaagccatggccgcatataaacctgtaattgcatgcaacagtggtggtccagtggaaacagtcataaatgacgagacagggtttctctgtgagccctctgcccctgaattttcaaaagccatgctgaagctcgtgaacgatcacgatctagcagttaagatgggtaaacaagcaaggggccatgttgtgcagaagttctcaaccaagacatttggtgaccttctgaacagctatgtccttaatgtgtaccatcagaggattgagtga

SEQ ID NO: 45403 - protein, 418 aa, Oryza sativa (japonica cultivar-group)
MAAAAGGVAGEPSGTRTKQLKVAVIHPDLGIGGAERLIVDAACQLAVHGHDVHVFTSHHDKNRCFEETVSGPFEVKVYGDFLPRHIFYRFHAICAYLRCIFVAMCVLLWWPSFDIILVDQVSVVIPLLKLKAKSKIVFYCHFPDMLLAQHTTMLRRLYRKPIDMIEETTTGMADLILVNSKFTATTFARTFCSLHARGVEPAVLYPAVSVEQFQEPHAYKLNFLSINRFERKKNLGLAISAFSLLRSVASMLPGDARQEVTLTVAGGYDKRLRENVEYLEELKRLAASEGVSEHVKFVTSCSTSERNELLSNCLCVLYTPKDEHFGIVPLEAMAAYKPVIACNSGGPVETVINDETGFLCEPSAPEFSKAMLKLVNDHDLAVKMGKQARGHVVQKFSTKTFGDLLNSYVLNVYHQRIE

SEQ ID NO: 45404 - DNA, 1311 bp, Pan troglodytes
  CDS (1)..(1311)
atggcggaggagcagggccgggaacgggactcggttcccaagccgtcggtgctgtttctgcacccagacctgggcgtgggcggcgctgagcggctggtgttggacgcggcgctggcgctgcagacgcgcgggtgtagcgtgaagatctggacagcgcactacgacccgggccactgtttcgccgagagccgcgagctaccggtgcgctgtgccggggactggctgccgcgaggcctgggctggggcggccgcggcgccgccgtctgcgcctacgtgcgcatggtcttcctggcgctctacgtgctgttcctcgccgacgaggagttcgacgtggtagtgtgcgaccaggtgaggcggccgcggggccggctgcgcgagtgcggacctcgccgtggagggcggccgcgggtgtctgcctgtatcccagtgttcaggctggctagacggcggaagaagatcctattttactgtcacttcccagatctgcttctcaccaagagagattcttttcttaaacgactatacagggccccaattgactggatagaggagtacaccacaggcatggcagactgcatcttagtcaacagccagttcacagctgctgtttttaaggaaacattcaagtccctgtctcacatagaccctgatgtcctctatccatctctaaatgtcaccagctttgactcagttgttcctgaaaagctggatgacctagtccccaaggggaaaaaattcctgctgctctccatcaacagatacgaaaggaagaaaaatctgactttggcactggaagccctagtacagctgcgtggaagattgacatcccaagattgggagagggttcatctgatcgtggcaggtggttatgatgagagagtcctggagaatgtggaacattatcaggaattgaagaaaatggtccaacagtccgaccttggccagtatgtgaccttcttgaggtctttctcagacaaacagaaaatctccctcctccacagctgcacgtgtgtgctttacacaccaagcaatgagcactttggcattgtccctctggaagccatgtacatgcagtgcccagtcattgctgtaaattcgggtggacccttggagtccattgaccacagtgtcacagggtttctatgtgagcctgacccggtgcacttctcagaagcaatagaaaagttcatccgtgaaccttccttaaaagccaccatgggcctggctggaagagccagagtgaaggaaaaattttcccctgaagcatttacagaacagctctaccgatatgttaccaaactgctggtataa

SEQ ID NO: 45405 - protein, 436 aa, Pan troglodytes
MAEEQGRERDSVPKPSVLFLHPDLGVGGAERLVLDAALALQTRGCSVKIWTAHYDPGHCFAESRELPVRCAGDWLPRGLGWGGRGAAVCAYVRMVFLALYVLFLADEEFDVVVCDQVRRPRGRLRECGPRRGGRPRVSACIPVFRLARRRKKILFYCHFPDLLLTKRDSFLKRLYRAPIDWIEEYTTGMADCILVNSQFTAAVFKETFKSLSHIDPDVLYPSLNVTSFDSVVPEKLDDLVPKGKKFLLLSINRYERKKNLTLALEALVQLRGRLTSQDWERVHLIVAGGYDERVLENVEHYQELKKMVQQSDLGQYVTFLRSFSDKQKISLLHSCTCVLYTPSNEHFGIVPLEAMYMQCPVIAVNSGGPLESIDHSVTGFLCEPDPVHFSEAIEKFIREPSLKATMGLAGRARVKEKFSPEAFTEQLYRYVTKLLV

SEQ ID NO: 45406 - DNA, 1251 bp, Canis familiaris
  CDS (1)..(1251)
atggcggagaagcggggccgcgacccggagcctgggcccagcccgtcggtgctgtttctgcacccggacctgggcgtgggcggcgccgagcggctggtgctggacgcggcgctggcgctgcaggcgcgcgggtgcagcgtgaagctctggacggcgcactacgaccccggccactgcttcgcggacagccgcgggctgcaggtgcgctgcgccggggactggctcccgcgcagcctgggctggggcggccgcggcgccgcggtgtgcgcctacgtgcgcatggtcttcctggcgctctacgtgctgttcctcggcgacgaggagttcgacgtggtcgtgtgcgaccaggtgtctgcctgcatcccagtgctcaagctggccagacggcgcaagaagatcctgttttattgtcacttcccagatctgcttctcaccaggagagattcttttctgaaacgcctatacagggccccgattgactggatagaggaatacaccacaggcatggccgactgcatcttggtcaacagccggtttaccgctgccatttttaaggaaacattcaagtcgctgtctcacatagaacccgatgtcctctacccatctctcaatgtcaccagctttgactccactgctcccgaaaagctcgatgacctcgtccccgaggggaagaagttcctgttcctctccatcaacagatacgaaaggaagaaaaatctgactttggcactggaagccctagtaaaactgcgtgggagattgacatcccaagattgggacaaggtccatctaatcatggcaggtggctatgatgaaagagtcttggagaatgtggaccactatcaggaattgaagaaaatggtccaacagtctgaccttgcacagtgtgtgaccttcctgcggtctttctcagacaaacagaaaatctcactcctccacggctgtacctgtgtgctttacacaccaagccatgaacactttggcatcgtccctttggaagccatgtacatgcagtgcccggtcatcgctgttaattcgggtgggcccttggagtccatcacccatggtgtcacagggtttctgtgcgagcctgacccagtgcacttctcagaagcaatggaaaagttcatccatgaaccttctttaaaagccacaatgggactggctgggagagccagggtgaaagcaaagttttcctcggaagcctttacagaacagctctaccagtatgtcaccaaactgctggtataa

SEQ ID NO: 45407 - protein, 416 aa, Canis familiaris
MAEKRGRDPEPGPSPSVLFLHPDLGVGGAERLVLDAALALQARGCSVKLWTAHYDPGHCFADSRGLQVRCAGDWLPRSLGWGGRGAAVCAYVRMVFLALYVLFLGDEEFDVVVCDQVSACIPVLKLARRRKKILFYCHFPDLLLTRRDSFLKRLYRAPIDWIEEYTTGMADCILVNSRFTAAIFKETFKSLSHIEPDVLYPSLNVTSFDSTAPEKLDDLVPEGKKFLFLSINRYERKKNLTLALEALVKLRGRLTSQDWDKVHLIMAGGYDERVLENVDHYQELKKMVQQSDLAQCVTFLRSFSDKQKISLLHGCTCVLYTPSHEHFGIVPLEAMYMQCPVIAVNSGGPLESITHGVTGFLCEPDPVHFSEAMEKFIHEPSLKATMGLAGRARVKAKFSSEAFTEQLYQYVTKLLV

SEQ ID NO: 45408 - DNA, 1506 bp, Cryptococcus neoformans var. neoformans JEC21
  CDS (1)..(1506)
atgagccgccccctccgaatagggttcatacatccagaccttggaataggcggggcagagcgtctcgtagtggacgcggctctatctctcaaaaacaaaggccaccatgtcacgatattcacttcgaggcatgatccttctcggtgctttccagagactatagatggcactcttccagtccatgtcctcggatcgtcccttcctcgatcactccaccccaaattcccattcaccatcctcttctccatcctccgatcccttcttcttgctgtccttctcctcacgtctcttcttttacccggtccgccatccattgccaaccctctttcgcctcttcaagggttcgatatcttctttgtcgatcagcaaagtgttgctgtgccgcttctgaggtttgttagcgggacaaggatcgtattttactgtcatttccccgacaaactgcttagcggaggatgggagatcgatgtgggcaaagataaggccgtggtggagagaaaaggggttggcatactgaagcgcatgtaccggtggcctatcgacaagctcgaggagtatacgactggtcaatcggacatcatcatctccaactctgaattctcttctcgcgtttttgccctcgctttcccttctctcgcccagaaacctcgccgagtggtctacccttgtatcgacctatcttcttacacatcaacttcttctgatgtcaaggatggaagcgtcaaccttattcaatccgatcgacctacaatcatttcttttaacaggtttgaggcgaagaagaatgtggacctagccataaggacttttgcaaaacttcgtgacgatgatctcatctcaaaggaagagtttagaaatcttcgatttgtcgttggtggggggtacgaccctgatcaacgggacaatgcccaaactcttctccacctccaaaacctctgtactaacctctccttatcacatcataccattccctcttcctctccaatctctcccaacacgcaaatcattttcctcctcaacttttcctctgcccagcgtgcccatctccttacttctccttctaccttagcgctcttgtacacacccaccaacgagcatttcggtatcgtccccatcgaagccggggcctgcggattacccgtattggcatgcgataccggcggtccggtagagaccgtcgttgatttttccatcccttccaatgctgagaacggcacgggtctcctacgaccaccccgagctgaagaatgggcaccagcgttgaccactctcctccatctctcttcttcccaacgctccattatctctcagagtgctcaaacccgtatcgccgaaaacttttccttggctacgatggggacgcagcttgagaaggcttgtcgggatgcgctagcgatgggtgatttgcatgttcaagttggggataagctaatttggggtggactgggattaatgggttttgcagcgggtgggttgggcgttatttggatggtatggggggtttga

SEQ ID NO: 45409 - protein, 501 aa, Cryptococcus neoformans var. neoformans JEC21
MSRPLRIGFIHPDLGIGGAERLVVDAALSLKNKGHHVTIFTSRHDPSRCFPETIDGTLPVHVLGSSLPRSLHPKFPFTILFSILRSLLLAVLLLTSLLLPGPPSIANPLSPLQGFDIFFVDQQSVAVPLLRFVSGTRIVFYCHFPDKLLSGGWEIDVGKDKAVVERKGVGILKRMYRWPIDKLEEYTTGQSDIIISNSEFSSRVFALAFPSLAQKPRRVVYPCIDLSSYTSTSSDVKDGSVNLIQSDRPTIISFNRFEAKKNVDLAIRTFAKLRDDDLISKEEFRNLRFVVGGGYDPDQRDNAQTLLHLQNLCTNLSLSHHTIPSSSPISPNTQIIFLLNFSSAQRAHLLTSPSTLALLYTPTNEHFGIVPIEAGACGLPVLACDTGGPVETVVDFSIPSNAENGTGLLRPPRAEEWAPALTTLLHLSSSQRSIISQSAQTRIAENFSLATMGTQLEKACRDALAMGDLHVQVGDKLIWGGLGLMGFAAGGLGVIWMVWGV

SEQ ID NO: 45410 - DNA, 1251 bp, Bos taurus
  CDS (1)..(1251)
atggcggagaagccgggccaagatgcggactcagatcctaagccaaccgtgctgttcctgcacccggacctgggcgtaggcggcgccgagcgactggtgctcgacgcagcgctggcgctgcaggcgcgcggatgtagcgtgaagatctggacggcgcactacgacccgggccactgcttcgcggagagccgtgagctgtcggtgcactgcgccggggactggctgcctcgcagcctgggctggggcggccgtggcgccgctgtctgcgcctacgtgcgcatgatcttcctggctctctacgtgctgttccttggcgatgaggagttcgacgtggtcgtgtgcgaccaggtgtctgcctgtatccccgtgttcaagctggccagacggcgtaagaaaatcctgttttactgtcacttcccagatctgcttctcaccaggagagattcttttattaaacgcctgtacagggccccgattgactgggtagaggaatataccacaggcatggcagactgcatcttggtcaacagccgcttcacagctgccattttcaaggaaacgttcaagtccctgtctcacatagaccctgctgtcctctacccatctctgaatatcgtcagctttgattctgctattcctgaaaagcttgatgacatagtcccccaggggaaaaaattcatattcctctccatcaacagatatgaaaggaagaaaaatctgactttggcagtagaagcccttgtaaagctgcgtggaagattgacatcccaagattgggacaaagttcatctgatcattgcaggtggttatgatgagagagtcctggagaacgtacagcactaccaggaactgaagcaagtggtccagcagtctgacctaggtcagtatgtgaccttccttcggtcttgctcagacaaacagaaaatctcactcctccgaggctgcacgtgtgtactttacacaccaagcaatgagcactttggcatcgttcccttggaggccatgtacatgcagtgcccagtcattgctgttaattcaggtgggcccttggagtccgtcgtccacagtgtcacaggatttctgtgtgaccctgacccagaacacttctcagaagcaatagaaaagtttatccatgaaccttccttaaaagccacaatgggactggctggaagaaaccgggtgaaagagaagttttcccctgaagcatttaccgaacagctttaccagtatgtcaccaaactgctggtataa

SEQ ID NO: 45411 - protein, 416 aa, Bos taurus
MAEKPGQDADSDPKPTVLFLHPDLGVGGAERLVLDAALALQARGCSVKIWTAHYDPGHCFAESRELSVHCAGDWLPRSLGWGGRGAAVCAYVRMIFLALYVLFLGDEEFDVVVCDQVSACIPVFKLARRRKKILFYCHFPDLLLTRRDSFIKRLYRAPIDWVEEYTTGMADCILVNSRFTAAIFKETFKSLSHIDPAVLYPSLNIVSFDSAIPEKLDDIVPQGKKFIFLSINRYERKKNLTLAVEALVKLRGRLTSQDWDKVHLIIAGGYDERVLENVQHYQELKQVVQQSDLGQYVTFLRSCSDKQKISLLRGCTCVLYTPSNEHFGIVPLEAMYMQCPVIAVNSGGPLESVVHSVTGFLCDPDPEHFSEAIEKFIHEPSLKATMGLAGRNRVKEKFSPEAFTEQLYQYVTKLLV

SEQ ID NO: 45412 - DNA, 1500 bp, Bos taurus
  CDS (1)..(1500)
atggcgactgctgaaaggggttggtgcttgtgtgagttattgaggtttttttattcattactcttccccgggctatttgtatgtggaactttgtgtgtgtgtttacttattatcctttggggaatccgactgctgctacagagaaagaaaaagtcagtgtcatctagcaaaactgggaaaaatcaaacggtgattgcatttttccatccatactgcaatgctggcggaggaggagaaagagtgttatggtgtgccttaagggctctacagaaaaagtatccagaagcactttatgttgtttacactggcgatgccgacgtcagtggccaacagatactggaaggcgcgttcagaagatttaacatcaggttaactcgcccagtgaagtttgttttcttaaggaagcgctaccttgtggaagattcactctatcctcatttcacactgctgggccaaagtctgggatccattttcctgggctgggaagctctgatgcagtgtgttcccgatgtttacattgattcaatgggctacgctttcacacttcctctgtttaagtatctaggtggttgccgagttggaagctatgttcattaccccaccatcagcactgacatgctctccgtcgtgaagaatcagaatgtgggatttaacaacgcagccttcattaccaggaatccttttctcagcaaagtaaagctcatctactactatttatttgcttttatgtatgggcttgttggttcttgcagtgacatcgtcatggtcaattcttcttggacactgaaccatattctgtcactgtggaaggttgggaactgcactaatattgtttatccaccttgtgatgtgcagacattcttggatcttcccttacatgaagagaaggcaacctcagaacacttactggtttcgattggccagttcaggcctgaaaagaaccatcctttgcagatcagagcctttgctaagttgttgaataagaaggagagtgaatctcttcctccacttaaacttgtgctcattggaggttgtcgtaaccaagatgatgaactcagggtaaaccaactgagaaggcttgctgaggaccttggagttcaagaagatgtggaatttaaaataaacattccgtttgatgagttaaagaattacttgtctgaagcaacagttggtctgcatactatgtggaacgagcattttgggattggaattgttgagtgtatggcagctggcatgattgtcctcgcacacaattcggggggcccgaagcttgacatcgttgttcctcaccacggcgagaggacagggttcctggctgaaagtgaagagggctatgctgagactatggcccatattctttccatgtctgcagaacagaggctccaaatcagaaacagtgcccgtgcatccgtaagcagattctccgatcaggagtttgaagtggcattcctatcgtctgtggaacgattattccaaaaatgccacacctgtacaaattaa

SEQ ID NO: 45413 - protein, 499 aa, Bos taurus
MATAERGWCLCELLRFFYSLLFPGLFVCGTLCVCLLIILWGIRLLLQRKKKSVSSSKTGKNQTVIAFFHPYCNAGGGGERVLWCALRALQKKYPEALYVVYTGDADVSGQQILEGAFRRFNIRLTRPVKFVFLRKRYLVEDSLYPHFTLLGQSLGSIFLGWEALMQCVPDVYIDSMGYAFTLPLFKYLGGCRVGSYVHYPTISTDMLSVVKNQNVGFNNAAFITRNPFLSKVKLIYYYLFAFMYGLVGSCSDIVMVNSSWTLNHILSLWKVGNCTNIVYPPCDVQTFLDLPLHEEKATSEHLLVSIGQFRPEKNHPLQIRAFAKLLNKKESESLPPLKLVLIGGCRNQDDELRVNQLRRLAEDLGVQEDVEFKINIPFDELKNYLSEATVGLHTMWNEHFGIGIVECMAAGMIVLAHNSGGPKLDIVVPHHGERTGFLAESEEGYAETMAHILSMSAEQRLQIRNSARASVSRFSDQEFEVAFLSSVERLFQKCHTCTN

SEQ ID NO: 45414 - DNA, 1224 bp, Apis mellifera
  CDS (1)..(1224)
atgacacgaattacatttcttcatccggatcttggtattggaggagcagaaagattagtaatagatgctgcgttagctttaaagaaaggaggatatgaggttaatttcgtgacaactcatcatgatcctgaacattgtttttctgaaacaaaagatggaacaattcctattacagttgtaggaaattggttacctagacatattttcggtagatttttcgcactttttgcttatattcgtatgatatatgcagctagttatatcattttttgtgaacatcgaccagatattgtattctgtgatttagtttctgtatgcattcctattcttcgattacgaattccatatataattttttattgtcattatccagatcagttgctttcacaatcaaagggaattagtaaacaattatatcgtgcacctcttaattatttagaagaattaacaactggaatggcacataaaatatttgtaaatagcatatatacactttctgtatttaaagatacttttaagaaattgtatattgaacctgaagttttatatccttctattaatactgacttttttgataaaactcgaataatatccttagaaagaatatttgataaaaaattgccatcaaatagtattatattattgtctattaatagatatgaacgtaaaaaaaatttagaactagcaatagaagcattggcagaacttcaaaaatatttgacagaagaagaatataaaaaagtatatttaattatggctggtggatatgataaaagagttgaagaaaatgtagaatattatttggaattaataggacttgttgatgaattacatgtaacagaaaaagtaatatttcttcgatctccttcagatattgataaaatatctattttacatcattgtaaaattatattgtacacacctccaaatgaacattttggtattgtaccacttgaagcaatgtatatgagtaaaccagtaattgcacataattctggtgggccaaaagaatctataatttctggagttactggatttttggttgatttatctggtgatgcatttgcttcaaaaatagcttatttaattaaaaatccagaatatattcaagaatttggaaatgcaggcaaagatagatttatgaaaacttttagttttgctgcatttaatgctcaattaaatgaagcaattgaagatttaataagtaataaaaaaataaagtaa

SEQ ID NO: 45415 - protein, 407 aa, Apis mellifera
MTRITFLHPDLGIGGAERLVIDAALALKKGGYEVNFVTTHHDPEHCFSETKDGTIPITVVGNWLPRHIFGRFFALFAYIRMIYAASYIIFCEHRPDIVFCDLVSVCIPILRLRIPYIIFYCHYPDQLLSQSKGISKQLYRAPLNYLEELTTGMAHKIFVNSIYTLSVFKDTFKKLYIEPEVLYPSINTDFFDKTRIISLERIFDKKLPSNSIILLSINRYERKKNLELAIEALAELQKYLTEEEYKKVYLIMAGGYDKRVEENVEYYLELIGLVDELHVTEKVIFLRSPSDIDKISILHHCKIILYTPPNEHFGIVPLEAMYMSKPVIAHNSGGPKESIISGVTGFLVDLSGDAFASKIAYLIKNPEYIQEFGNAGKDRFMKTFSFAAFNAQLNEAIEDLISNKKIK

SEQ ID NO: 45416 - DNA, 1428 bp, Cryptosporidium parvum
  CDS (1)..(1428)
atgagggtgtcaagttcatctttacttttcgatagaatgaagcctattaagagagttgcagttactcatcttgagtgtggtataggaggcgcagaacaactaatggtattagcatctctagcattacagagctacaaatcttcaaatgagaaaatcgagctgaccttgttcacttcttaccatgataagtctcactcattttctgccacaaatgatggcaggatcaaagtaaaagtttatggaaattggattccaagaacattttttggttacggtacaacattattttcctatattagaattatttatacttctcttataatgttttttttcgtaatgatgacatcattttcacttgagaaaacaagtagatactacgatgtgattttgaatgatcaagttagtgtaatcaatcctattttgaaattgatgactagaagactaatattttattgtcattttcctgatcagttgttggttagaaaaagagatggttctcttagaaaaatgtatagatatgtcatggactttttagaggaatttggcatgagatattgcgattatgtatttgtaaattcaatttttaccagaaaggtttatatagaaacattcaaaggattgatttctaatgcaaataaatatcctcttactttaagctatcctgaggtactttatccaccagtaaatctggaggatatcccctcagaagaagaatgtgaaaactgtttttcaaattcaaaaatacctcagcagctgaacagagcaccaaatgtaccatttttcttatcattaaatagatatgaaaggaaaaaaaatattgaacttgctattaagtcattcgcaatattacgtgaccaatacaagccaggagagaaattgtgtcttgttatttctggaggctatgacaaaagagtttcagagaatatcgagtattttgaagaacttctcaggcttgctaattcttatgcttttaatgtttatattggaaatgaatgtattgaatcaactgattcttgtttctccgttgtctttttaaggagtatttctgactcacttcgttggtctttactaagaaaatcaattggacttctttacactcctgaaaatgaacattttggtatggttccatgcgaagcaatgtctgtggggacttgtgtgattgcctgcaactctggcgggccaactgaaacaatagtgcatggaaaaactggttttctttgcgaaccaaatccagaaaattttgcgattagaatgaatgagctcattaaaattagtagagacagtatagagagctcagtttggagtagttcgtgtaaagaaagagtaactgcattatttagtcagagcattttccagaaaaggctctgtgaagtagcttattcaaatgagactaaatcaaaagtattcaagaagataaaacatttataa

SEQ ID NO: 45417 - protein, 475 aa, Cryptosporidium parvum
MRVSSSSLLFDRMKPIKRVAVTHLECGIGGAEQLMVLASLALQSYKSSNEKIELTLFTSYHDKSHSFSATNDGRIKVKVYGNWIPRTFFGYGTTLFSYIRIIYTSLIMFFFVMMTSFSLEKTSRYYDVILNDQVSVINPILKLMTRRLIFYCHFPDQLLVRKRDGSLRKMYRYVMDFLEEFGMRYCDYVFVNSIFTRKVYIETFKGLISNANKYPLTLSYPEVLYPPVNLEDIPSEEECENCFSNSKIPQQLNRAPNVPFFLSLNRYERKKNIELAIKSFAILRDQYKPGEKLCLVISGGYDKRVSENIEYFEELLRLANSYAFNVYIGNECIESTDSCFSVVFLRSISDSLRWSLLRKSIGLLYTPENEHFGMVPCEAMSVGTCVIACNSGGPTETIVHGKTGFLCEPNPENFAIRMNELIKISRDSIESSVWSSSCKERVTALFSQSIFQKRLCEVAYSNETKSKVFKKIKHL

SEQ ID NO: 45418 - DNA, 1518 bp, Dictyostelium discoideum
  CDS (1)..(1518)
atggacgaattaataatgatggtttttgtgttattcacaatagtattattattaacagtttcaatgacattggcagcattaatttcaaccattgtggtattagttgtaccattaattatttgtataatagcattattaattgcattaagaattaaatatggtagtaaaaaagatctaagtgaagtttcaataggatttttccatccatattgtactgcaggtggaggtggtgaaagagtattatggtgtgcaattaaatcaattcaagaagaatatccatatgttagatgtgttgtatatacaggtgataaagagagtgatgatgaaatatttaataaagtaaagaaaacatttgatatagaattgggtagagataatttagaatttattagattgaaaaaaagaaaatgggtagaagcatcaacatacccaagatttacattaattggacaaagtttaggatcaatgatattaggttgggaagcattaaccaaatttgttccaaccattttcttggattcaatgggttatgcattcacattcccaatattttcattaattggtggttcaactgttgcatgttatgttcattatccaacaattagtagtgatatgatctcttctgttaaatcatcatcatattcttttaataatgatgtttcaatttcttcaaataaatttaaaactatttcaaaattaatatattataatatattttcaaaaatttatcaaattgttggtagtttttcaaaattagtaatggtaaatggaacatggacaggcaatcatattagagatatttggaagaaacaatttggatatgatttatttatagtttatccaccagtcgatgttaaaggtagaaaacaattgaaattgggttggatggatggtactagaaagaatatgatattgtcgattgcacaatttagaccagaaaagaatcaccaattacaattgagaacattggctcatctattggagaaatatccatcacatagagaacaaccattgaataccaaattagtattggtaggtggtgttcgtgatcaagccgatcgtgatagagttgaacaattacgtaacctttcaaaagaattaaatattgaagatcatgttgaattccaaattggtattagctcagatcaacttaatcaactattaagtgaagcatcagttggtatacatacaatgtataatgaacattttggtattggtgtagtggaattaatggctgctggtgttataccagttgcaaacaatagtgcaggtccaaaagaagatattgtacgtcatgaagatactggtttcttagcttcaaccattcaagagtatgctgaatacattcatgaaattttagcatatcgtgaaaaatatgttgaaatgcaaaagaaagccagagattcaactgaccgtttctctgaatcaaatttttcaaatcaatttttaaaatatattaaaccattaattaatcaaagtttaagaaataataatagtagtagtaaaaaaagaaattaa

SEQ ID NO: 45419 - protein, 505 aa, Dictyostelium discoideum
MDELIMMVFVLFTIVLLLTVSMTLAALISTIVVLVVPLIICIIALLIALRIKYGSKKDLSEVSIGFFHPYCTAGGGGERVLWCAIKSIQEEYPYVRCVVYTGDKESDDEIFNKVKKTFDIELGRDNLEFIRLKKRKWVEASTYPRFTLIGQSLGSMILGWEALTKFVPTIFLDSMGYAFTFPIFSLIGGSTVACYVHYPTISSDMISSVKSSSYSFNNDVSISSNKFKTISKLIYYNIFSKIYQIVGSFSKLVMVNGTWTGNHIRDIWKKQFGYDLFIVYPPVDVKGRKQLKLGWMDGTRKNMILSIAQFRPEKNHQLQLRTLAHLLEKYPSHREQPLNTKLVLVGGVRDQADRDRVEQLRNLSKELNIEDHVEFQIGISSDQLNQLLSEASVGIHTMYNEHFGIGVVELMAAGVIPVANNSAGPKEDIVRHEDTGFLASTIQEYAEYIHEILAYREKYVEMQKKARDSTDRFSESNFSNQFLKYIKPLINQSLRNNNSSSKKRN

SEQ ID NO: 45420 - DNA, 1263 bp, Dictyostelium discoideum
  CDS (1)..(1263)
atggtaaaagatgaaaaagaattaaatattgcaattttacatccagatttaggtattggtggagcagagagattaatcgttgatttagcattaggattaaagagtgttggaaataatagaatcacaatgtacacatcaagacacgacccaaagagatgctttaaagagacatctaatggtgaattggacgtacacgtcacaggtggctatttcccaagacatattttcaatagatttatggtaatttgcgcaatcattagaaaccttttagcagcattatacatcatctttttctctggtcaaaagtatgacgtgattgtattggaccaaatctcagcctcaattccattatttaaactatttacaaattctaaagtactattctactgtcatttccctgacaaactattaacatcgagaacatcattaatcaaaagactctatcgtataccaatcgacctcttcgaagagtttaccactggttgtgccgatcaagtattggtcaatagtaacttcacttcatcaatttataaacaatcttttaaacatctcaaaaattcaccatcagtattatacccaatcatcaatacaaacgaatttgataaaacaaaacaatctcataatttttcaaatcaaccaattgaaaataatttaattaatccaattaaattagatgataaaaaattctttttgtcaattaatagatatgaaagaaaaaaagatttaaaattagcattggatgcatttagtgtatttattagtaatagtgaaagtggtggtagtggtaaaggtaaagatgaaatttatttagtatttgcaggtggatatgatacaggattaaaagagaatgttgaacatttacaagaattaaaagataaagccaaagaatatggattagagaatcgtgtaattttcttgataacaattaatgaagaacaaaaacaatggttattattaaactgttgttgtttaatttatacaccatcatttgaacattttggtattacaccattggaaggaatgtatgctggtaaacctgtgattgctgttaataatggtggtccattagaaacagttgtcgatggtaaaactggttacctttgtaatccaaccgttaaagattttgcaaatgctttcaataaaattatcaatgatcctatcaattccaaaaaaatgggtatcaatggtaaacaacgtgtaaatgataaattttcttttaaaccatttgctcaaaatttaaatacaattgttaaaaaactataa

SEQ ID NO: 45421 - protein, 420 aa, Dictyostelium discoideum
MVKDEKELNIAILHPDLGIGGAERLIVDLALGLKSVGNNRITMYTSRHDPKRCFKETSNGELDVHVTGGYFPRHIFNRFMVICAIIRNLLAALYIIFFSGQKYDVIVLDQISASIPLFKLFTNSKVLFYCHFPDKLLTSRTSLIKRLYRIPIDLFEEFTTGCADQVLVNSNFTSSIYKQSFKHLKNSPSVLYPIINTNEFDKTKQSHNFSNQPIENNLINPIKLDDKKFFLSINRYERKKDLKLALDAFSVFISNSESGGSGKGKDEIYLVFAGGYDTGLKENVEHLQELKDKAKEYGLENRVIFLITINEEQKQWLLLNCCCLIYTPSFEHFGITPLEGMYAGKPVIAVNNGGPLETVVDGKTGYLCNPTVKDFANAFNKIINDPINSKKMGINGKQRVNDKFSFKPFAQNLNTIVKKL

SEQ ID NO: 45422 - DNA, 1143 bp, Entamoeba histolytica HM-1:IMSS
  CDS (1)..(1143)
atggataataacactaaaactgctatcattattcatcctgatcttggtattggtggagctgaacgacttgttgtagatattgctcttgcattggaacatgaagattatgacgttaaattttatacatcacatcatgataaagaacattgttttccagagacaaaaggaaggttccaagtatttgttcatggagattttcttccaattacattatttggatatttttatattttctttgctacaataagagctctttatttatcaataattgttgcatggaaaactaatgcagacatttatattgttgatcaaatttcaattggagttccaatattaaaactctttaataaaaaggtattgttttattgtcatcatccagataaatgtctttgtaaagaaggaggatttatgaaaaagatatatagaatcccttttgattggttagaagaaaaatctatgggactaacatttccaagtcattctagaacaccacaagtactttatccaacatataatcctattttagaagaatcaatgaatagtgaaagtccatttgaagaagaacctaaagaagaattttggtttatttcaattaatagatatgaaggaaagaagaatcataaagtagcacttgaagcattaagtttattagaagatgatttaaaaaataatgttagaattattattgctggtggttatgatcttagagtaaaagaaaataaagatgtctataatgaattagaacaactttcacatcaattacatattgaagatcatgtatctttacttaaaaatttctcaaatgaagaacgtgaatatctttttaaaaaagctactgctgtattatatactcctccatttgaacatttcggtattgttccattagaagcaatgattaaaggagtaccagtaattgcttgtaataatggtggtccattagaaacagttcaaaatgaattaacaggactgctttgtgatggaagtaaagaaggatttgcagcatgtatatctcgactatgtcatgataacaacttaagacaaaaattaaagttaaatgctaagaaagcaactaaagaaaagtttgggtttgaaacatttacaaagaaagtatcagaggttgtacatcaagtcatatcaaactaa

SEQ ID NO: 45423 - protein, 380 aa, Entamoeba histolytica HM-1:IMSS
MDNNTKTAIIIHPDLGIGGAERLVVDIALALEHEDYDVKFYTSHHDKEHCFPETKGRFQVFVHGDFLPITLFGYFYIFFATIRALYLSIIVAWKTNADIYIVDQISIGVPILKLFNKKVLFYCHHPDKCLCKEGGFMKKIYRIPFDWLEEKSMGLTFPSHSRTPQVLYPTYNPILEESMNSESPFEEEPKEEFWFISINRYEGKKNHKVALEALSLLEDDLKNNVRIIIAGGYDLRVKENKDVYNELEQLSHQLHIEDHVSLLKNFSNEEREYLFKKATAVLYTPPFEHFGIVPLEAMIKGVPVIACNNGGPLETVQNELTGLLCDGSKEGFAACISRLCHDNNLRQKLKLNAKKATKEKFGFETFTKKVSEVVHQVISN

SEQ ID NO: 45424 - DNA, 1338 bp, Entamoeba histolytica HM-1:IMSS
  CDS (1)..(1338)
atggttgtgttacttactttctgtattcttttaccaattattatcttaattttattaattttaagatttaaataccaaaaaaagaggactatagctttcttccatcctaattgttctgctggaggaggaggagaaatggtactatgggttataattaaagttcttcttcaatcattccctaattattctattgttatctttactgctgatacatctccaaaagataagatattagaaaaagtaaagtcaacatttggttttgatttcttagactgtaacattaagttctatcaaatcaaacatagttattctttagttataaaaaaatatccctttttaactttattctttcaagcaattggttcaatgatttgttgttttgatgcattaattaaatgcaatgcagaatatttctttgacactacaggatgtgcatttacttatccatttgcatggttagcaggtgcaaagattatgacttatactcattatcctactatatcaactgatatgcttaatgtagttcaaaagagagaagttagtattaacaatacaaatacaattgcacgtagttcaatactttcaactatgaaagtcttttattataaaatatttgcttacctttattacttagttggaaatttagcttctttagtctttgttaatggaacttggactaaaaaccatatttctcaattatggaaaattcaacctcacttactctatcctccatgtgatattaatgtatctaatctaaatgaaaaaaattcatcttgtcatcttatcatttctataggacaatttagacctgaaaaaagacatttagtgcaaatagaagctatcaatattttagtacaagaacatcctgaaattaaaaataaaataaaattcgtagttattggtggagctcgtgatgcagaagaccttaaacgtaaagaagaagttattaaaacaattgaaaaagacaaattaactgacattattacagtgcctgaaagtacttcatatgaacaaaaaattgaatatctaaagaatgctgagattggtcttcacactatggttaatgaacattttggtatttgtgtggtagagtatatgggatttggagttattcctgttgctcataaaagtgctggaccagaattagatattgttgatgatcaatgtggttatcttgcaacaacacctaaagaatatgcagatgctattttcaagattataaatgatccagaaaagactgctcaaatgagacaagccgcaattcaaaaagctaaaaagttttcagtctcggcttttgaaaaacagtgtgaaaaagaattacttgaatttttgaaataa

SEQ ID NO: 45425 - protein, 445 aa, Entamoeba histolytica HM-1:IMSS
MVVLLTFCILLPIIILILLILRFKYQKKRTIAFFHPNCSAGGGGEMVLWVIIKVLLQSFPNYSIVIFTADTSPKDKILEKVKSTFGFDFLDCNIKFYQIKHSYSLVIKKYPFLTLFFQAIGSMICCFDALIKCNAEYFFDTTGCAFTYPFAWLAGAKIMTYTHYPTISTDMLNVVQKREVSINNTNTIARSSILSTMKVFYYKIFAYLYYLVGNLASLVFVNGTWTKNHISQLWKIQPHLLYPPCDINVSNLNEKNSSCHLIISIGQFRPEKRHLVQIEAINILVQEHPEIKNKIKFVVIGGARDAEDLKRKEEVIKTIEKDKLTDIITVPESTSYEQKIEYLKNAEIGLHTMVNEHFGICVVEYMGFGVIPVAHKSAGPELDIVDDQCGYLATTPKEYADAIFKIINDPEKTAQMRQAAIQKAKKFSVSAFEKQCEKELLEFLK

SEQ ID NO: 45426 - DNA, 1392 bp, Cryptosporidium hominis
  CDS (1)..(1392)
atggaacctattaagagagttgcagttactcatcttgagtgtggtataggaggcgcagaacaactaatggtattagcatctctagcattacagagctacaaatcttcaaatgagaaaatcgagctgaccttgttcacttcttaccatgataagtctcactcattttctgccacaaatgatggcaggatcaaagtaaaagtttatggaaattggattccaagaacattttttggctacggtacaacattattctcctatattagaattatttatacttctcttataatgttttttttcgtaattatgacatcattttcacttgagaaaacaagtagatactacgatgtgattttgaatgatcaagttagtgtaatcaatcctattttgaaattgatgactagaagactaatattttattgtcattttcctgatcagttattggttagaaaaagagatggttctcttagaaaaatgtatagatatgtcatggactttttagaggaatttggtatgagatattgcgattatgtatttgtaaattcaatttttaccagaaaggtttatatagaaacattcaaaggattgatttctaatgcaaataaatatcctcttactttaagttatcctgaggtactttatccaccagtaaatctggaggatatcccttcagaagaagaatgtgaaaactatttttcaaattcaaaaatacctcaacagctgaacagagcaccaaatgtaccatttttcttatcattaaatagatatgaaaggaaaaaaaatattgaacttgctattaagtcatttgcaatattacgtgaccaatacaagccaggagagaaattgtgtcttgttatttctggaggctatgacaaaagagtttcagagaatatcgagtattttgaagaacttctcaggcttgctaattcttatgcttttaatgtttatattggaaatgaatgtattgaatcaactgattcttgtttctccgtcgtctttttaaggagtatttctgattcacttcgttggtctttactaagaaaatcaattggacttctttacactcctgaaaatgaacattttggtatggttccatgcgaagcaatgtctgtggggacttgtgtgattgcctgcaactctggcgggccaactgaaacaatagtgcatggaaaaactggttttctttgcgaaccaaatccagaaaattttgcgattagaatgaatgagctcattaaaattagtaaagacagtatagagagctcagtttggagtagttcgtgtaaagaaagagtaactgcattatttagtcagagcattttccagaaaaggctttgtgaagtagcttattcaaatgagactaaatcaaaagtattcaagaagataaaacatttataa

SEQ ID NO: 45427 - protein, 463 aa, Cryptosporidium hominis
MEPIKRVAVTHLECGIGGAEQLMVLASLALQSYKSSNEKIELTLFTSYHDKSHSFSATNDGRIKVKVYGNWIPRTFFGYGTTLFSYIRIIYTSLIMFFFVIMTSFSLEKTSRYYDVILNDQVSVINPILKLMTRRLIFYCHFPDQLLVRKRDGSLRKMYRYVMDFLEEFGMRYCDYVFVNSIFTRKVYIETFKGLISNANKYPLTLSYPEVLYPPVNLEDIPSEEECENYFSNSKIPQQLNRAPNVPFFLSLNRYERKKNIELAIKSFAILRDQYKPGEKLCLVISGGYDKRVSENIEYFEELLRLANSYAFNVYIGNECIESTDSCFSVVFLRSISDSLRWSLLRKSIGLLYTPENEHFGMVPCEAMSVGTCVIACNSGGPTETIVHGKTGFLCEPNPENFAIRMNELIKISKDSIESSVWSSSCKERVTALFSQSIFQKRLCEVAYSNETKSKVFKKIKHL

SEQ ID NO: 45428 - DNA, 1344 bp, Cryptosporidium hominis
  CDS (1)..(1344)
atgatttttaattctttcaaaatttggaaggaagagagaaaaagtacaataggattttttcatcctcagtgtggtaactttggtgggggcgaaaaggtattatggtgtattatatatgaagttctaaataccaatataaaaaataaggttgtgatatattctacttgtaaacttgataggactgaaattgttaagaaagttgagagtttatttagaatccctttaaatcgtcccgagtttgttgacaggattaaaatcgtcgaattaaagttagggtttcttttacaacttgcattttttagactctggagtgtaaacttagcagctttaattgtttctctggagggtttattgtttagctggccatttccggaagtttttgtagaaacagcaggattcccgtttgcactaataccagcaagagttctcccaacaactaaacatatttcaacatatattcattatcctcaagttagcaaagaaaatattgaaagtgaaagggaaaggaatattctaagatatttttacttaaaactattcttgtttgtttataaacttagtattggtcttgcaaacaaggttgttgtaaattcaaattggacgtttaataagcttaatgagctttgggagaaaaattctattgaaatgagtgtttgctatccacctataaatatagatcattcactaaataagttagtagatccaaaactaagaaaaaatgtgattatttcactttcacaatttagagttgaaaaaaatcattttgtacaaatacgaattttctctggagtacttaaaaggatcaaggaaattattaataaagcgagcaaagaagagaaaattaggcttgaaaaaatctatgaagaaataaggtttaaaatgtgtggaacttcacaggattcaaatcctaaatacaaggattatctaaattcccttaaacaaatgatagtagatgagaagcttgaagagaagttagagctagttattaattcaagttcaacagagttgcagaatattatgagcacatcaaggtttgcaatccacacaatggaagatgaacattttggtatctgcgttgcagaattcgtctgctccggcttgttaacgtttgcacacaagtcaggagggcctgagaaagacatcctaacgagattcaatggacaagatgtcgggttcttggcatcgaacatccaggagtttgtggaaaaactcacacatgcaatcatttactatgaaagcccagctattcaaggcattttaaacaatgcacttaagtcagtatttgaaaggtatcaggataatatctcgtttggaaagacatgttggagagctctaaatatataa

SEQ ID NO: 45429 - protein, 447 aa, Cryptosporidium hominis
MIFNSFKIWKEERKSTIGFFHPQCGNFGGGEKVLWCIIYEVLNTNIKNKVVIYSTCKLDRTEIVKKVESLFRIPLNRPEFVDRIKIVELKLGFLLQLAFFRLWSVNLAALIVSLEGLLFSWPFPEVFVETAGFPFALIPARVLPTTKHISTYIHYPQVSKENIESERERNILRYFYLKLFLFVYKLSIGLANKVVVNSNWTFNKLNELWEKNSIEMSVCYPPINIDHSLNKLVDPKLRKNVIISLSQFRVEKNHFVQIRIFSGVLKRIKEIINKASKEEKIRLEKIYEEIRFKMCGTSQDSNPKYKDYLNSLKQMIVDEKLEEKLELVINSSSTELQNIMSTSRFAIHTMEDEHFGICVAEFVCSGLLTFAHKSGGPEKDILTRFNGQDVGFLASNIQEFVEKLTHAIIYYESPAIQGILNNALKSVFERYQDNISFGKTCWRALNI

SEQ ID NO: 45430 - DNA, 1572 bp, Danio rerio
  CDS (1)..(1572)
atgagtttgaacaaaagcgcttccgggatctgtcaggtgacgtgttgtgttgtcatatatttggagaagatgtcagcgcacgatcacttttccctttgtctgtgcgatttaataaggttactctggtctcttatgttaccatgcttctatctgagtttcctcctgacaactatccttttcctcttcatcatgggggtgagaagttggctgcagatgaagaggaagaccagaagagttcaggatggccggcctgccgtggcttttttccacccatactgcaatgcaggaggaggaggagaaagagtgctgtggtgtgctttacgggctcttcaaaacaggtaccaagatgtttctttcgtggtctacacgggtgatcagggggtgacggcagaagagattttggatggagcacggagacgctttaacatcagactcccccgacccgttaagtttgtgttcctgaagcatcgtctactggtggaggcaaaactttacccacatttcacccttctggggcagagtgtgggctccatcttcttggggtgggaggcattgaccgagtttgttccagatctctatattgactcaatgggcttcgccttcaccttacccgtgttccgctatctgggtggttgtcaagtgggaagctatgtgcactacccaaccatcagcacggacatgctgtctgtggttcgagaaagaaaccccaggttcaacaatgcagactacatctccagcaaccctgtactcagtgccattaaggtgatttattattgtgtcttcgcactgctgtatggcctggctggctcctgtagtgacgtcatcatggtcaattccacctggactttgggtcacattctggctctgtggcgcactccgaaccgcaccagtgtggtttacccaccatgcgatgttcaggcattcctggatgttccaattggggaagacaatgaagagaaagagcaaaagaagtgtcacagtctggtctctgtgggtcagttccggccagaaaaagaccatcagctgcagatcagggcatttaaaaagcttttaaacagaaaggaggcggagcttgcgggaagagaggctgtgaagctggtgctgattggtgggtgtcggaaccaggaggatgaagatcgggttctgatgctgagaggattgtgccaggagctgggcatagcagacagggtggagtttaagctcaatattccattccaggagctgaagaaagatttagcagatgccactatcgggttgcacacaatgtggaacgaacattttggcattggtatagtggagtgtatggctgcaggaacaataattctagctcacaaatctggcggtccaaagttggacattgtagttccatacgatggtggtcccaccggctttctggcagatgatgaagacaattacgcagacgccatggaacgaatcctttctatgagtcctgctactcggttagaaatgcgacgccgggcccgtctgtccgtctcccgcttctcagatcaggagtttgaaggttcatttctgtcagcaatggagcctctgatgtcaacattgagagcgtga

SEQ ID NO: 45431 - protein, 523 aa, Danio rerio
MSLNKSASGICQVTCCVVIYLEKMSAHDHFSLCLCDLIRLLWSLMLPCFYLSFLLTTILFLFIMGVRSWLQMKRKTRRVQDGRPAVAFFHPYCNAGGGGERVLWCALRALQNRYQDVSFVVYTGDQGVTAEEILDGARRRFNIRLPRPVKFVFLKHRLLVEAKLYPHFTLLGQSVGSIFLGWEALTEFVPDLYIDSMGFAFTLPVFRYLGGCQVGSYVHYPTISTDMLSVVRERNPRFNNADYISSNPVLSAIKVIYYCVFALLYGLAGSCSDVIMVNSTWTLGHILALWRTPNRTSVVYPPCDVQAFLDVPIGEDNEEKEQKKCHSLVSVGQFRPEKDHQLQIRAFKKLLNRKEAELAGREAVKLVLIGGCRNQEDEDRVLMLRGLCQELGIADRVEFKLNIPFQELKKDLADATIGLHTMWNEHFGIGIVECMAAGTIILAHKSGGPKLDIVVPYDGGPTGFLADDEDNYADAMERILSMSPATRLEMRRRARLSVSRFSDQEFEGSFLSAMEPLMSTLRA

SEQ ID NO: 45432 - DNA, 1413 bp, Aspergillus fumigatus Af293
  CDS (1)..(1413)
atggcccgcctcaaaccctccaaagttatcatcatccacccagacctgggaattggcggcgcagagcgcctaatcattgacgtggcgctggcgctgcagtcccgcggccacagagtcaccatctacacctcccaccgggacaaatcgcactgcttcgaggaagcacgcgacggcacgctcgacgtgcgcgtgcgcggcaactccctcttccccgcgcatgtcggcggccgactacacgtcctcatggccgttctacggcaattgcatctgaccgtctcggtgttgagggagattgcgacctctgaagaaaaagacaacatcttcatcgtcgaccaggtccccgcttgcgtgccgcttctgaaaacgctgggcccgcgcgcggcgcgcagcagtcgcagtcgccagcgcatcctcttctactgccatttccctgatcagttgcttgcacgtcggaatgagggcggggagctgttgcgacttgcgaagacgctctaccggtatccgtttgattggtttgaggggtgggcgatgagcgcgtcggataaggtcgttgccaactcgaggttcacgcgcggggtcgtgagcgaggtcttcgggaaggagaagctgggagatgttcggattgtctatccgtgtgtcgataccaaggctggcgcgccggttgggaccgaggaaggtcctttatggggtggaaagaagatcttcttgagtgtgaatcggttcgagaggaagaaggatttggcgctggccattcgtgcgtatcacggtcttgggcaggagaagcggagggggacgcggttggtggttgctggcggttacgacaatcgggtccaggagaatgtccaataccatcgagaactagaccagctcgccacaagtttgggattacagaccgcgacctctaaaacagtcatctccgccctatccatccccgactccatcgacgttctgttcttgctctccgtaccaactgccttccgggatacgctcctctcgcaggcaaaactgcttctctacactcccatcaacgaacactttggtattgtccccgtcgaagccatgcgcgccgggatccccgttctcgcatcaaatacaggcgggccattagaaactatcgtggaaggcgaaacgggctggctccgggacgcaacggttgtcgcggattggactgcggtcatggaccgggttctctacgagatggaccagaaggacttggaccgcatgtcagccgtgagcaaggcgagagtggagaaggagttctcgctgactgcaatgggtgacaggctcgaggaggagatcaccgatatgctcagcaaggaaagacggccgttcagcggttttcaccagctaatcctcgtctttgccctgttgggtattatgtcttctattcttgccgtgtgggctttgaaatga

SEQ ID NO: 45433 - protein, 470 aa, Aspergillus fumigatus Af293
MARLKPSKVIIIHPDLGIGGAERLIIDVALALQSRGHRVTIYTSHRDKSHCFEEARDGTLDVRVRGNSLFPAHVGGRLHVLMAVLRQLHLTVSVLREIATSEEKDNIFIVDQVPACVPLLKTLGPRAARSSRSRQRILFYCHFPDQLLARRNEGGELLRLAKTLYRYPFDWFEGWAMSASDKVVANSRFTRGVVSEVFGKEKLGDVRIVYPCVDTKAGAPVGTEEGPLWGGKKIFLSVNRFERKKDLALAIRAYHGLGQEKRRGTRLVVAGGYDNRVQENVQYHRELDQLATSLGLQTATSKTVISALSIPDSIDVLFLLSVPTAFRDTLLSQAKLLLYTPINEHFGIVPVEAMRAGIPVLASNTGGPLETIVEGETGWLRDATVVADWTAVMDRVLYEMDQKDLDRMSAVSKARVEKEFSLTAMGDRLEEEITDMLSKERRPFSGFHQLILVFALLGIMSSILAVWALK

SEQ ID NO: 45434 - DNA, 1818 bp, Ustilago maydis 521
  CDS (1)..(1818)
atggttctcgatcggcagtcagccgctgtggctaactcggtgcattcgccacgcaaaaagctgcgcatcggcttcgtccatcctgaccttggcatcggtggagctgaaaagctggtggtagacgctgcactctcactccaacaacttgggcacgaggtggtcattttcacttcgcatcacgatccgcgtcattgctttgaggctacacgcgatggaacgctcaaggtacaagtgatgcgtaccgcgataccgcgctctttgcttggcggcttccatcttccatgtgccatcttgcagcagatgagcctcgttttccagctcatcctcgcagttaccctgttcaactatcctggtactatgccacgctttgtttcgaaacgtatgacctcttcgccccccattcctggattcgatctgttcttcttcgaccagctacccgcgggtattccgtggctcaagatcatactggcgacgcgcgtcgtctattactgccactttccggacaaggacattagcaactcgattgcgatgcaaagggcacatgccagaggcgagtcgggtccatcggtcttgcgcaaactgtatcgcataccatttgacctgttcgaagaaggcaccaccgattattccgacaagatcttggtcaattccgagttcacctcggctcaattcgtcaagtccttcttccgtctcaggaggcagcccagggtgtgctatccaggcgtggaaatggatcagttcaagccggagagggtggagcaggcgctcaaaaaactcgagaccgaggcaaagcaaatgggcgacccgatacgaggttccattgccaagttctgcaaggacgagagcaagacgaccctgctctcgatcaaccgatttgaggcgaaaaagaatgtggcactggctttggaggctttcgccattgcgcagaaggagcttgctgccactgccaccaacggcgacagtgtgggatcgctaaggctggtgctggtgggtggatacgacaagcgcgtccgtgacaatgtcgcgacgctcaacgagttgcaaacccaggcgcaagagcttggtttgtcctccgtgacgctcagctaccatcgccaggcattcgaaacgcccactacagcgcctgcagccgacaagctcgcgaaagcctcggtgatcttcctgccctccttaccgatggcattgatccacacgcttctgctcaacccagccaccagggctctactatacactcccacagacgaacatttcggaatcgtgccgctcgaagccatggcatgcggtgttccggtgctcgcgaccaacactggtggaccggtcgaaactgtggtcgacctcgcactctcgtccacaggcgaacccacaaacctctcgaacggcacaggtcttcttcgtcatgcttccgctcccatctgggccgtttcaatcactgcgttgcttcgcctttcgtcctcgcatcgagagcagatctccgctgcggccaaggaacgtgtccgtaccaagtttagcaccgaagtgctctcgctagcgctcgaaaaggcgtgctacgatgcgttcgagctgggacgtgttcgcggtgacgaagggctgtaccagtggggctcgacgctggccgtattgatggtcatgtcgatcctcttttgggtcaacgtgtatttcagccatgacaagtggttggctatccaagcggcgaaattggcaaacgagaaggacaagtggttggcagagctcaaagcgactggcgtagccggttcagcaggtgggttgaatccgcatgctgatcacgttgcacaggcccctctgcccacgccactgtga

SEQ ID NO: 45435 - protein, 605 aa, Ustilago maydis 521
MVLDRQSAAVANSVHSPRKKLRIGFVHPDLGIGGAEKLVVDAALSLQQLGHEVVIFTSHHDPRHCFEATRDGTLKVQVMRTAIPRSLLGGFHLPCAILQQMSLVFQLILAVTLFNYPGTMPRFVSKRMTSSPPIPGFDLFFFDQLPAGIPWLKIILATRVVYYCHFPDKDISNSIAMQRAHARGESGPSVLRKLYRIPFDLFEEGTTDYSDKILVNSEFTSAQFVKSFFRLRRQPRVCYPGVEMDQFKPERVEQALKKLETEAKQMGDPIRGSIAKFCKDESKTTLLSINRFEAKKNVALALEAFAIAQKELAATATNGDSVGSLRLVLVGGYDKRVRDNVATLNELQTQAQELGLSSVTLSYHRQAFETPTTAPAADKLAKASVIFLPSLPMALIHTLLLNPATRALLYTPTDEHFGIVPLEAMACGVPVLATNTGGPVETVVDLALSSTGEPTNLSNGTGLLRHASAPIWAVSITALLRLSSSHREQISAAAKERVRTKFSTEVLSLALEKACYDAFELGRVRGDEGLYQWGSTLAVLMVMSILFWVNVYFSHDKWLAIQAAKLANEKDKWLAELKATGVAGSAGGLNPHADHVAQAPLPTPL

SEQ ID NO: 45436 - DNA, 1431 bp, Strongylocentrotus purpuratus
  CDS (1)..(1431)
atgatcctgttgctgattatagcatttccagttctactggctatggtgctgttcatggctcttcggcaaaaagttgagattgtgcgccattccaaactaactcatctttctaagccaggtccagatgggaagaaacccatcactgttggattctttcatccctactgtaatgctggtggaggtggtgagagggtcttatggtgtgcaatcagagctttacaaaccagatatcctcatattcagtgtgtagtgtactctggagacatagatgcaacaggggagcagattgtagagaaagctaagcagagattcaaccttacccttcccagacctgtagagtttgtgttcctaaccaaccgattccttgttgaagccaagacctacccattcctaactcttcttgggcagagcttgggttctatgcttctaggaatggaggccttgttcaaattcgtgcctgatgtgtacatagacaccatggggtatgccttcacactgcctttgtttcgctttcttgcaaagtgcagggtcggttgctatgtccactacccaaccatcagcacagacatgttgtcaagagttgctgcaggtactgtttcatacaacaacccaggatttgtggcacgcaacccagtgctccgcaagctcaagctcctatattacaaggcatttgctttcatctacggactaatgggtgcaagatcagacgtggtcatggtgaactcgtcgtggactcatggccatatcaatgaaatctggggagcttccactggacctagcattgtttatccaccatgtgataccaaagaattcacaagtctggcaatcattcctgatgaagagaaaaccaccaaagtcattgcgtcggtggcgcagtttcgtcctgaaaaagaccacgcgctgcaagtgaaatccttctccaatttaatgaataaactcacggtggatgaaaagagtgtggtgagacttgagctgatcgggggctgtcgcaatgctggagatgagagtagagtagctgatctgagggcgctggcttcatctctgggtgttgcagatcatgtagactttctgcttaatattccatttgaagatctcaagtcacatctagctggggccacaataggactacactccatgtggaatgaacattttggcatcggtgtggtagagtgtatggcagctggtaacatcattgttgcccacaactctgggggtcctaggatggacatcgtggtccctcaccaagaccagccaacagggtttttagctgacaccgaagagggttatgctgacaccatgctgaaaattctaagaatgacctctgaagaaaggatgaagattagactcgctgccaggagttctgtcgatagattctctgagaaggagtttgaaaaatctttccttgcagcttcagaaaaactttttgattag

SEQ ID NO: 45437 - protein, 476 aa, Strongylocentrotus purpuratus
MILLLIIAFPVLLAMVLFMALRQKVEIVRHSKLTHLSKPGPDGKKPITVGFFHPYCNAGGGGERVLWCAIRALQTRYPHIQCVVYSGDIDATGEQIVEKAKQRFNLTLPRPVEFVFLTNRFLVEAKTYPFLTLLGQSLGSMLLGMEALFKFVPDVYIDTMGYAFTLPLFRFLAKCRVGCYVHYPTISTDMLSRVAAGTVSYNNPGFVARNPVLRKLKLLYYKAFAFIYGLMGARSDVVMVNSSWTHGHINEIWGASTGPSIVYPPCDTKEFTSLAIIPDEEKTTKVIASVAQFRPEKDHALQVKSFSNLMNKLTVDEKSVVRLELIGGCRNAGDESRVADLRALASSLGVADHVDFLLNIPFEDLKSHLAGATIGLHSMWNEHFGIGVVECMAAGNIIVAHNSGGPRMDIVVPHQDQPTGFLADTEEGYADTMLKILRMTSEERMKIRLAARSSVDRFSEKEFEKSFLAASEKLFD

SEQ ID NO: 45438 - DNA, 1236 bp, Strongylocentrotus purpuratus
  CDS (1)..(1236)
atgcaaaaccggctttgtacaaaagagagaatggtgcgggtaattttcttgcatcctgatttgggcattggaggagccgagcgcctggtcgttgatgccgctctagccctgcagacccggcgacattctgtgaagatctacactgcccaccacgaccccactcattgtttcaaggaaacaagtgatggcactcttgaggtcgtgacagcaggagactggcttccaagaaatatttttggatcctgctacgcactctgcgcttacatccggatgatatatgtcgccctctatttactcctgttcagccgtgaaccgtatgatgtcatcatctgcgatcagatttctgcctgtattccgttcctgaagctgggtagatccaaagtgctgttctattgtcactttccggatctgttgctgacgaagcgacagagtttcctcaagaaattgtaccgaactcctatagactggctggaggagaagactaccggcatgtccgattgcatagtggtcaacagtaacttcactgcggatactttcaagcagaccttcaccaccctcaaggacgtccagcccgatgtcctctacccatccctcaacttcagcgccttcaacgcccgcgtagagcctgcaggtgacctcataccagtaggggtcaagacactcttcctgtcgatcaatcgctatgaaagaaagaagaaccttgtattggcgatagaagctatgggtgaattgaaatccaggctgtcggaggatgaatggcagaacgtccacctcgtcatggcaggaggctacgacggacgtgtcactgaaaacctggagcactacgaagagctcgtccaacgtgctgacgaacttaagctaactgatcatgtgacctttatccgttccttcagcgatgctcagaagctcactctccttgatagctgcacttgcctgctctacactccatcaaacgaacactttggtatcgtccctatagaagccatgtacatgtatcgtccggttatagcggtgaatagcgggggtccgctagaaaccatcgctcataaacagacagggtttctttgcgagccttctgcagctagttttgcgcctgcactggagcgtttcgtgcgggagccagacctgaagaatagactaggaaaagcagggagagatagagtcatcaacaatttctcatttagagcctttggcaataagttagagaaattggtgaaaagagttcataggttgtag

SEQ ID NO: 45439 - protein, 411 aa, Strongylocentrotus purpuratus
MQNRLCTKERMVRVIFLHPDLGIGGAERLVVDAALALQTRRHSVKIYTAHHDPTHCFKETSDGTLEVVTAGDWLPRNIFGSCYALCAYIRMIYVALYLLLFSREPYDVIICDQISACIPFLKLGRSKVLFYCHFPDLLLTKRQSFLKKLYRTPIDWLEEKTTGMSDCIVVNSNFTADTFKQTFTTLKDVQPDVLYPSLNFSAFNARVEPAGDLIPVGVKTLFLSINRYERKKNLVLAIEAMGELKSRLSEDEWQNVHLVMAGGYDGRVTENLEHYEELVQRADELKLTDHVTFIRSFSDAQKLTLLDSCTCLLYTPSNEHFGIVPIEAMYMYRPVIAVNSGGPLETIAHKQTGFLCEPSAASFAPALERFVREPDLKNRLGKAGRDRVINNFSFRAFGNKLEKLVKRVHRL

SEQ ID NO: 45440 - DNA, 1518 bp, Trypanosoma cruzi
  CDS (1)..(1518)
atgaacgaatttctctcatatctgtctatcaaccttggatgctcttttttattcgttggcatcttgctggtgcttcgcctgcggatccatgaggccgcactgcgtcggtttaggcccgaggcggcagagacgcgaaacccaacggacgtggcctcccagaaggaagctcagcgaccactgaaggtggtgattcttcacccagacctcggcattggtggggccgaacgacttattattgacgcggctttggccctacagaaacatcagcgtgttactcccgtcagtgtatgtattgtaacaaatcatcatgatccgaaacgtgcatttccggagactgtggacggtactgtaaaggtggtggtgagtggagcgtggctacccgatcatttcttgggacgtgcaaaggttttctgcgcgacgtgtcggatgctttgggctgccctcatgatctgctattgctaccccgacaccgactgtatctttgtggatcaagtagccgccgtgctaccgctgctccactttgttgcaacgcccatcccacgtctcttttattgtcactttcctgatcaatgctgtgacgccaaccgtgatgcgcaggggcgttttttgaaacccatctggagagtccataaactgtaccgacgcctttttgattatttggagtcttgggcgctgagctttgcggacagcattgtgtcaaactcaaagttcagccgaggggtgacggtgagggtttttccgcatcttgattcggtcattgacgccgagtcagatattttttatcctcccgtttcgtgggcaactaaggatctcccgaccgacacgacgcccgacctcgagaatgatgaattggcgccgttgcataacagtctagaaaaccgaactgtggtgcttagcatcaaccgttatgagaggaagaagaatcttccactggcaattgatgcatttgcacttgttgtggcggcggtttctaatgtcacctcgaggtccccacttcttgtcatggccgggggttatgacgtccgcttgaaagaaaatgtggagcacctgaaggagttgaaggagttggtggcgcaccacaacctcacagatgatcaggttctgtttctacagaacatatctgatgtgactaagggctatcttttgtcgcagtgtcgctgcttagtttacacaccagctatggaacactttggaattgtgccaacggagggcatggtgtgcgccaaaccaattgtcgccgtgaaccaaggcggtccatgcgagagtgtgggcgagggtgggacactttgtgatcccacaccggaggcatttgccgaagcactgacggcatacgtgaaggacgaggcgctggcaaaacgtgtgggtgcagccggacgagagcgtgcattaaagctttttggaatggatgtctttggagaaaaactggcaacaagactggtgaccttatgggcaaagaaaaacggagagctgaattctgcccaagacgaggagagtgttaagaagcaaaagagtaattag

SEQ ID NO: 45441 - protein, 505 aa, Trypanosoma cruzi
MNEFLSYLSINLGCSFLFVGILLVLRLRIHEAALRRFRPEAAETRNPTDVASQKEAQRPLKVVILHPDLGIGGAERLIIDAALALQKHQRVTPVSVCIVTNHHDPKRAFPETVDGTVKVVVSGAWLPDHFLGRAKVFCATCRMLWAALMICYCYPDTDCIFVDQVAAVLPLLHFVATPIPRLFYCHFPDQCCDANRDAQGRFLKPIWRVHKLYRRLFDYLESWALSFADSIVSNSKFSRGVTVRVFPHLDSVIDAESDIFYPPVSWATKDLPTDTTPDLENDELAPLHNSLENRTVVLSINRYERKKNLPLAIDAFALVVAAVSNVTSRSPLLVMAGGYDVRLKENVEHLKELKELVAHHNLTDDQVLFLQNISDVTKGYLLSQCRCLVYTPAMEHFGIVPTEGMVCAKPIVAVNQGGPCESVGEGGTLCDPTPEAFAEALTAYVKDEALAKRVGAAGRERALKLFGMDVFGEKLATRLVTLWAKKNGELNSAQDEESVKKQKSN

SEQ ID NO: 45442 - DNA, 1530 bp, Trypanosoma brucei
  CDS (1)..(1530)
atgatttacgaacttgcgctacttatatccaccttccttggactttccatctttgttattcccttttccctgctgcgaacatggacacgtaggcaggcgagtagtcgtttcgattcttcttctgctcgtcaacggcacccaacgaagttggatgagcaggtcaacgcgaaacgtccgttgaaggttgtgtttcttcaccccgatcttggcattggtggcgccgaacggcttgtcgttgacgctgctattgcacttcagaggtaccagaaagtgacgcctgtgcaagttattattgtgacaaaccatcatgatccccagcgtgcttttgctgagacggtggacgggacagtgaccgtgcaggtattcggttcgtggcttcccgcctccataaaggggcgagccaaagtgtttgctgcaacccttcgcatgtgctgggcggcgtgggttacgtgttggatgcaccctgatgcggactgtttcatggtggatcaagtagccgcagttcttccgctgctctcatttgtggcaccgcaaattcctcggctcttttattgtcattttcccgatcagtgctgtgacgggaaccgcgatgaaaaccagcaatacaagaagaaaccgtctatctttcgcctgctttatcggaagctatttgatgaggttgaagtctttgctatgaactatgccagcagtatcgtgtcgaattccaaattcagtagagcggctactctgaaggtttttcccaaactaagcaacaggattgacgccgaggctgacatattctaccctcctgtgtcattggctgttagggaaggagctaaacctaacggtgacacaaaagtatttgacaccgaggaactcgacaagctccgggacgctattcagggaagaagtgtggtgctcagtatcaaccgctacgagcgtaagaagaaccttgtattggctattgaagcatttgcacgtttgttaaactcggggaaaacgacatgcagtggtgctccgttgctcgttctggctggtgggtacgacacacggttggaagagaatgttgcacatttgaatgagctccaaaaggttgctgacacatacaagcttatggatagtcagattcttttcctgaagaatataaccgaactcgaaaagcgctaccttctttcccaatgttgctgtcttctctacacacccacatcggagcatttcggtattgttccgactgaggcaatgattagtgcgaagccagttgtagctgtcaaccgcggtggaccatgtgaaagtgtgggtgaaggtggcacactttgtgacccaacgcctgaggcttttgcggaggctatacttttatatctgaatgatgatgaattaaggaggcgggtgggagaggcgggaaggaaacgggcgagcgatgttttcactattgaaaggtttggggagaagctggccacacgttttgtgaagctatggactgaaacgaacgcggctatgggcagagcggcgttttgggggaaatggcttgagggaggaaaaaaggcggactga

SEQ ID NO: 45443 - protein, 509 aa, Trypanosoma brucei
MIYELALLISTFLGLSIFVIPFSLLRTWTRRQASSRFDSSSARQRHPTKLDEQVNAKRPLKVVFLHPDLGIGGAERLVVDAAIALQRYQKVTPVQVIIVTNHHDPQRAFAETVDGTVTVQVFGSWLPASIKGRAKVFAATLRMCWAAWVTCWMHPDADCFMVDQVAAVLPLLSFVAPQIPRLFYCHFPDQCCDGNRDENQQYKKKPSIFRLLYRKLFDEVEVFAMNYASSIVSNSKFSRAATLKVFPKLSNRIDAEADIFYPPVSLAVREGAKPNGDTKVFDTEELDKLRDAIQGRSVVLSINRYERKKNLVLAIEAFARLLNSGKTTCSGAPLLVLAGGYDTRLEENVAHLNELQKVADTYKLMDSQILFLKNITELEKRYLLSQCCCLLYTPTSEHFGIVPTEAMISAKPVVAVNRGGPCESVGEGGTLCDPTPEAFAEAILLYLNDDELRRRVGEAGRKRASDVFTIERFGEKLATRFVKLWTETNAAMGRAAFWGKWLEGGKKAD

SEQ ID NO: 45444 - DNA, 1086 bp, Synechococcus elongatus PCC 6301
  CDS (1)..(1086): transl_table=11
atgagagttgcgatcgttcactattggctggtgcaaatgcggggcggcgaacgggtcttggaagcactctgcgatctctttcccgaagctgacctgttcacccatgtctgcgatcgcgatcgtctcagcccgacgctgcaacgtcaccgcatccaaaccagcttcattcaacgcttaccagcggcgcaacggcgctatcccacctacctgccgctgatgccctttgctctcgagcaatttgacttgcggggctatgacctggtgatcagtagtgagtctggccctgccaaaggcgtgatcacggatccgaacagtctccatatttgctattgccacagcccgatgcgctacctctgggacttagcgcccagctatcgtcgccaagcaggttggttcaagcgccgggccatggatctgctgttgccgccgctgcgggtttgggatcaggctacagcccagcgcgtcgatcattttttggctaattctcgctttgttgctcagcggattcgcaagtattaccgccgtgaggcgactgtcttgcatccgcccgtccatgccgatcgctttgcgatcgccgaccgtgagccagaggacttttacctctacgtcggccagctcgtgccttacaagcgagctgatttagcggtcgcagcctgttccgcctttgggaagcgactcattgtgattggagatggggaagagcgatcgcgactggaaaaactggcaggacccaccgtgcagtttctcggtcgtcagtccgatgctgcgatcgccagctactaccagcgatgccgcgccttgctgttccctggggttgaagacttcggtatcgtgcccctcgaagcaatggccagcggtcgtccagtgattgcctacggcgatggtggagcgctagaaaccgtgaaagccggtgagacgggcctcttctttcagtccgctaccgttgaagcgctcacgaacgcgatcacccagtttgaagtgcaacagggacagtttgatccagtggccattcgagaacatgccatgggctttgattgcgataccttcaaaacgaacttccagcgcttcctcacgtcggtgctctag

SEQ ID NO: 45445 - protein, 361 aa, Synechococcus elongatus PCC 6301
MRVAIVHYWLVQMRGGERVLEALCDLFPEADLFTHVCDRDRLSPTLQRHRIQTSFIQRLPAAQRRYPTYLPLMPFALEQFDLRGYDLVISSESGPAKGVITDPNSLHICYCHSPMRYLWDLAPSYRRQAGWFKRRAMDLLLPPLRVWDQATAQRVDHFLANSRFVAQRIRKYYRREATVLHPPVHADRFAIADREPEDFYLYVGQLVPYKRADLAVAACSAFGKRLIVIGDGEERSRLEKLAGPTVQFLGRQSDAAIASYYQRCRALLFPGVEDFGIVPLEAMASGRPVIAYGDGGALETVKAGETGLFFQSATVEALTNAITQFEVQQGQFDPVAIREHAMGFDCDTFKTNFQRFLTSVL

SEQ ID NO: 45446 - DNA, 1056 bp, Methanosarcina barkeri str. fusaro
  CDS (1)..(1056): transl_table=11
atggaaattgattatatcaacggtcttaaaacagatgaaaaattcggaatgtcaaagtatcaaagtgagattcacagcaggttaagtgatatcaaattaaatcggatagaatatcccaatgtatcaagaatacccggaattaacaaggttgttgaatggtttgcgtatccgttcattgttaaaaagaaagtagataagaacaatgttaagaatataactcgccaggatctagcgtttcttttagaattaacgggtttagaaaaaaccattgttacttgtcacgatatcatacctatagcatattataatacccaaaatcctctctggaaacttaatgcaaagggattgagaaaagcagagagaataattacggtgtctgaattctctaagcaggatataagtaaatacataaaatatccggaagaaaatatagagattatacctcctgcagtggatcataatctctactatccagatagaagtaaagaatgtttattaaaatataatattggtgacggtgaaaaagtaattttatatgttggagctgaagaacctagaaaaaatatccaatttcttataaattcattcagcaaattaaaaaataaaatatcaaatataaaattattgaaagtagggaccccgaattacctgtttgtaagaaaaagactacttaaacagatagaggttctaaacttacagaatgacgtcatctttacagggtatgtctcagagtccgaactggcagagatatacaatgctgtggatctgtttgtatttccttctttatatgaagggttcgggatgcctcctctagaagcaatggcttgtggaacacctgttataacttcaaatacttcgtctttacctgaagttgtaggagatgcagctatagttgtagatccatatgatgtaaacaagtttgctgaagaaatgtatgagttattaatgaatgatgatctcaaagaagagatgattagaaaaggactgaaaaggtcaaaaatgtttagctgggatacttcggcaaaaaaaacattaaaagtatataaggaattgtga

SEQ ID NO: 45447 - protein, 351 aa, Methanosarcina barkeri str. fusaro
MEIDYINGLKTDEKFGMSKYQSEIHSRLSDIKLNRIEYPNVSRIPGINKVVEWFAYPFIVKKKVDKNNVKNITRQDLAFLLELTGLEKTIVTCHDIIPIAYYNTQNPLWKLNAKGLRKAERIITVSEFSKQDISKYIKYPEENIEIIPPAVDHNLYYPDRSKECLLKYNIGDGEKVILYVGAEEPRKNIQFLINSFSKLKNKISNIKLLKVGTPNYLFVRKRLLKQIEVLNLQNDVIFTGYVSESELAEIYNAVDLFVFPSLYEGFGMPPLEAMACGTPVITSNTSSLPEVVGDAAIVVDPYDVNKFAEEMYELLMNDDLKEEMIRKGLKRSKMFSWDTSAKKTLKVYKEL

SEQ ID NO: 45448 - DNA, 1524 bp, Nostoc punctiforme PCC 73102
  CDS (1)..(1524)
atgcacattggatttctcaaccctcaaggcaattttgattcaaacaatagtcacataaccaaacacccagattttgggggtcaactgatttacgttaagcaagtcgccatagctatagccgaaaagggacacaaagttgatattctcacccgtcaaattattgacccggaatggccagaatttgcccaggcgtttgacacttatccaggaatcgataacgtccgcattatccgcttgccagctgggccaaaagaatttcttcccaaagagtcgttatggactcatctgattagtgattgggtacccaacatcttgaaattctatcaacaacaaggtggcttacccgatgctatgactgctcactatgccgatggagggctgtgtggcgttctaattgaacaggatacaggcataccttttacctttactgctcattctcttggtgcccaaaagatggacaagctggaagtcacttccgagaacttgttagaaatagatgagcaattccattttaaatatcgcatcctagccgaacgcttgagcatgaatcgctcggtcgttaatatcaccagtacacgacaagaacgctttcaacagtattctcatcgagtctatcggagtgcagtagatgtagacaacgacaaccgctttgcggtgattccaccaggagcagatttctcgattttcggtgcaaaggcacgttccgaaaatgagaaagcaactgaagagttcattcaggagcgattggcacgggacattgaagaggcacgtcgagatttgcctgtcatcgtagcatccagtcgattagagcttaaaaaaaacatattagggctagtgcaagccttcgcaattagtccaacacttcaggaacgagctaacttgatgttacttacagggggactggacaatcccttacgagaagaggctagtgatagcatagctgaagaggtattagcccccattcgagaggtggtcaaggaaaacgacttgtggggcaagattagtgcatttggcttgttagatcagtctcaagagtcactggcagcagcctatcggtttatggttaaacgccgctcggtatttgcgctgacagcactttacgaaccctttggacttgctcccttagaagcagcagttgcaggtttaccagtggtagcaaccaagaacggtggtcctagcgaaagcttgcgacagggaaataaggaatatggcatactcgtagacccagaagatcctgctgatattgcacgaggcttggagcgggtgctatgtgatgctcaagagtgggactattttgcccaagctggtcagcaacgggttctgaaaacgtacagttgggaatctactgctgaaaactacctgactttgcttgagcaaattctgtctttaccggaaacccgccctcgcgccgaacttctacccatccatccctactttcgtaatccagaatcgcagaccgatatttctttggaagaattaagcgacctctactttggatctaaccaaaaggtactcagtacatga

SEQ ID NO: 45449 - protein, 507 aa, Nostoc punctiforme PCC 73102
MHIGFLNPQGNFDSNNSHITKHPDFGGQLIYVKQVAIAIAEKGHKVDILTRQIIDPEWPEFAQAFDTYPGIDNVRIIRLPAGPKEFLPKESLWTHLISDWVPNILKFYQQQGGLPDAMTAHYADGGLCGVLIEQDTGIPFTFTAHSLGAQKMDKLEVTSENLLEIDEQFHFKYRILAERLSMNRSVVNITSTRQERFQQYSHRVYRSAVDVDNDNRFAVIPPGADFSIFGAKARSENEKATEEFIQERLARDIEEARRDLPVIVASSRLELKKNILGLVQAFAISPTLQERANLMLLTGGLDNPLREEASDSIAEEVLAPIREVVKENDLWGKISAFGLLDQSQESLAAAYRFMVKRRSVFALTALYEPFGLAPLEAAVAGLPVVATKNGGPSESLRQGNKEYGILVDPEDPADIARGLERVLCDAQEWDYFAQAGQQRVLKTYSWESTAENYLTLLEQILSLPETRPRAELLPIHPYFRNPESQTDISLEELSDLYFGSNQKVLST

SEQ ID NO: 45450 - DNA, 1125 bp, Cytophaga hutchinsonii
  CDS (1)..(1125)
ttgaatattgctgtaaatacacgtttgttattggaggatcgcctggaaggaatcggctggtttacgtatgaaacattgaaacgtataacggaacagaatccacagcatacgttccactttttctttgacagaccctataacgataaatttgttttcgggaaaaatgttgttccgcacgtattgtttccgcaggcaagacatccctttctttggtatattttctttgaatggagtattccgtttatgcttcggaaagtaaaagcggatgcgtttatttcaacagatgggtatatgccgaagtcttcgaaagtaaaagtattaaacgtaattcacgatataaattttgaacaccggcctcaggatttacccaaacgcgtagcaaactattacaaaaagaacatgcccctgttcgctcagaaggcaacaaggcttgcaaccgtttctgagttttccaaacaagatctggtaaaaacatacaacattccggcagataaaattgatgtggtatacaatggctgcaatgcagcattcaagccaattccggaagcagaacaagtaaaggttcgttataaacattcagctggcagaccgtttttcctgtatataggatccatgcatccgcgcaaaaacatcttaaacttaatgaaagcgtttgaggtgtttaagaaaatgacaaactgcgacatgaaattgcttctggttggtaaagccatgtggagcaataaagatattcaatcgttgtatcatacgcttatttacagacacgacatacattttttaggtcacataaaaacagctgaactggccaggattatggcttcggcgcacgcgcttacattcgttccgtattttgaaggatttggtatacctatactggaagcgttgaactgcggcgtccctgttatcacatccaatacaacttcgttaccggaagttgccgggaaagcagccttattagttaatcctgaatcttcagaagctatagcaaatgctatgattcagatctataaagcaccgcatataagagaaaaattacttgcacaaggagttattcagcgtcaaaaattttcatgggacaaaacagccgcattgctttgggcaagttttgaaaaaatgatgcgctaa

SEQ ID NO: 45451 - protein, 374 aa, Cytophaga hutchinsonii
MNIAVNTRLLLEDRLEGIGWFTYETLKRITEQNPQHTFHFFFDRPYNDKFVFGKNVVPHVLFPQARHPFLWYIFFEWSIPFMLRKVKADAFISTDGYMPKSSKVKVLNVIHDINFEHRPQDLPKRVANYYKKNMPLFAQKATRLATVSEFSKQDLVKTYNIPADKIDVVYNGCNAAFKPIPEAEQVKVRYKHSAGRPFFLYIGSMHPRKNILNLMKAFEVFKKMTNCDMKLLLVGKAMWSNKDIQSLYHTLIYRHDIHFLGHIKTAELARIMASAHALTFVPYFEGFGIPILEALNCGVPVITSNTTSLPEVAGKAALLVNPESSEAIANAMIQIYKAPHIREKLLAQGVIQRQKFSWDKTAALLWASFEKMMR

SEQ ID NO: 45452 - DNA, 1995 bp, Mus musculus
  CDS (7)..(1485)
gataagatggcggcggacactgggagctggtgcgtgtacgccgtgctgcggtttttctattcactcttctttcctggactgatgatatgcggagttttgtgtgtatatttggtcattggcctttgggttatcaggtggcatctacagagaaagaagaagtctgtgtcgaccagcaaaaatggaaaagaacaaacggtggttgcatttttccatccatactgtaatgcaggtggcggaggagagagagttctgtggtgtgctttgagagccctgcagaaaaagtatcctgaagcagtttatgttgtatatactggtgacattaatgtcagtggtcaacagatactagatggtgctttcagaaggtttaacatcaagttggctcacccagtgcagtttgttttcttaaggaaacgctaccttgtggaagattcccggtatcctcacttcacattgctaggccaaagtcttggatccattcttctcggctgggaagctctgatgcagcgcgttcctgatgtttacatcgactcaatgggatacgccttcacactccctctctttaagtatgtgggaggttgccgagtcggaagctatgttcactatcccacgatcagcactgacatgctgtctgtggtgaagaatcagaatcctggatttaataatgctgctttcattagcagaaatgctcttctcagcaaagcaaagctcatctattactatttatttgcttttgtttatggccttgttggatcttgcagtgacatagtcatggttaattcttcttggacattaaaccatatcctctcactgtggaaggttgggcattgcactaacattgtctatccaccttgtgatgtgcagacatttctggacatccctttacatgagaagaaggtgaccccagggcatttgctggtttccattggccagttcagacctgaaaagaatcatgctttgcagatcaaagcctttgctaaattgttaaatgagaaagcagctgagttaggccattctcttaaacttgtccttattggagggtgtcgcaacaaagatgatgagtttagagtaaaccaactgagaagtctatctgagaatttgggagttcaagaaaatgtggaatttaaaataaacatttcattcgatgaattgaagaattacttgtctgaagcgaccatcggtctgcatactatgtggaatgagcattttgggattggagttgtcgagtgtatggcagctggcacagttatccttgcacacaactcaggaggcccgaagctggacattgtcattcctcatgaaggacagataactggctttctggctgagagtgaagaaggctatgctgactctatggctcacattctttctctgtctgcagaagagagactccaaatcaggaagaatgctagagcgtctataagcagattctccgaccaggagtttgaagtagcattcctgtgttccatggagaagttacttacttagtgtccagtctgcacagtctgggtattttatacagcatggagctggagctataggtcatgggagaacccgtgcttcgtgtgtgggagtcccgagctccatctccagcaccaaaagtaaaaggaaacaccttcacctgtaaatatttcctaaatttattctttatcataatcaaagcagcctgagcaacattctcagcaatatgtatataggcaaggcagtagttaacaaaaaggcagaattaatctatatggaaaaagtaatctcacgtagcttttttttttttttcttttttttttttttttttctttttgagacagggtttctctgtgtagccctggctgttctagaactcactctgtagaccaggctggccttgaactcatagagatccgcccgcctctgtctcccaagtgctgggactaaaggcgtgccaccacacccagcttcatgtagctcaatgtacagattttactaactgtttgctctcaaaatctgagcagtacagatccc

SEQ ID NO: 45453 - protein, 492 aa, Mus musculus
MAADTGSWCVYAVLRFFYSLFFPGLMICGVLCVYLVIGLWVIRWHLQRKKKSVSTSKNGKEQTVVAFFHPYCNAGGGGERVLWCALRALQKKYPEAVYVVYTGDINVSGQQILDGAFRRFNIKLAHPVQFVFLRKRYLVEDSRYPHFTLLGQSLGSILLGWEALMQRVPDVYIDSMGYAFTLPLFKYVGGCRVGSYVHYPTISTDMLSVVKNQNPGFNNAAFISRNALLSKAKLIYYYLFAFVYGLVGSCSDIVMVNSSWTLNHILSLWKVGHCTNIVYPPCDVQTFLDIPLHEKKVTPGHLLVSIGQFRPEKNHALQIKAFAKLLNEKAAELGHSLKLVLIGGCRNKDDEFRVNQLRSLSENLGVQENVEFKINISFDELKNYLSEATIGLHTMWNEHFGIGVVECMAAGTVILAHNSGGPKLDIVIPHEGQITGFLAESEEGYADSMAHILSLSAEERLQIRKNARASISRFSDQEFEVAFLCSMEKLLT

SEQ ID NO: 45454 - DNA, 1446 bp, Xenopus laevis
  CDS (1)..(1446)
atgttatgtgggatgatgaggctgttgactgccttgttcatcccagtgctgattgccagcgttggtttgtgcctcatctttgtcttgctttttatttgcactcgattgtgggttcagcgaaagaaaaaggtggaaataggaaaagatgggaaaaagaagaaagtggtggcgttttttcacccatactgcaatgctggaggcggaggagagagagtactgtggtgtgcattgagatccctccagaagaggtacaaagatgcgatctacgtcatttatactggtgataaggatgcctctgaggaacagatccttaacggggctgctgcaagatttaacatcaagctgtcccaccccgtaaggttcattttcctggaaaagcgtggacttgtggaagcaagctgttacccccgttttactttgctgggccagagtcttggctccgttgttttaggctgggaagctcttacgaagtgcgtgccggatatatacattgattctatgggctacgcatttacattgcctctcttcaagtatcttggaggatgccatgttggctgctatgtgcactatccgactatcagcatggatatgctttctgttgtgcgcagtcagcatgcaagattcaacaatgctgcttttatctctaacaatcctgttctaagcagactgaaactgatttattattatctgtttgcactattctatggatgggttggttcatgtagtgatgtcatcatggtgaactcaacatggactttctcccacatccttgacctgtggaaatgtagtgaccgtactagtatagtttatcccccatgtgatgttcagacatttttagagatagatataaaccaacacaaagaaaacgaggagcattcagttgtttctatagggcagttcaggcctgagaaggaccaccctctgcaaatacgcgcatttgcagccttgctggagaagaaaaccgctgaacaaagagcgaagctgaaactgatcctaattggagggtgtcgcaacgatgaagatgagctccgtgtgtcagagctgaaaaaactcagctccgaactcggaattcctgtggagttcaaagtaaacgttccatttgaggagctaaagaagcatttaagtgaagctaccattggcttgcacaccatgtggaacgagcactttggaattggcatcgttgagtgcatggctgccggtaccataattctggctcataattctggaggcccaaagctggatattgtggtgcctcatgaagaacaacagacgggcttcttggcagatagtgttgacagttatgcagcagcaatggatcatattctgtctctgacaccagagcagagattatctataaggcaaaatgcacgtctttctgttggcagattttcggatcaggaatttgaagctaatttcctggcttcgtcagagccgctatttaaatga

SEQ ID NO: 45455 - protein, 481 aa, Xenopus laevis
MLCGMMRLLTALFIPVLIASVGLCLIFVLLFICTRLWVQRKKKVEIGKDGKKKKVVAFFHPYCNAGGGGERVLWCALRSLQKRYKDAIYVIYTGDKDASEEQILNGAAARFNIKLSHPVRFIFLEKRGLVEASCYPRFTLLGQSLGSVVLGWEALTKCVPDIYIDSMGYAFTLPLFKYLGGCHVGCYVHYPTISMDMLSVVRSQHARFNNAAFISNNPVLSRLKLIYYYLFALFYGWVGSCSDVIMVNSTWTFSHILDLWKCSDRTSIVYPPCDVQTFLEIDINQHKENEEHSVVSIGQFRPEKDHPLQIRAFAALLEKKTAEQRAKLKLILIGGCRNDEDELRVSELKKLSSELGIPVEFKVNVPFEELKKHLSEATIGLHTMWNEHFGIGIVECMAAGTIILAHNSGGPKLDIVVPHEEQQTGFLADSVDSYAAAMDHILSLTPEQRLSIRQNARLSVGRFSDQEFEANFLASSEPLFK

SEQ ID NO: 45456 - DNA, 2310 bp, Tetraodon nigroviridis
  CDS (1)..(2310)
atggtgcaggtggtgttcatccatccagacctcggcattgggggggccgagcgactggtggtggacgcagccgttgctctgaaatctaaaggatgcagcgtgcagatatggacggcccattacgacccttcacactgcttctctgagactctggacccagaccttcccgtggtgtgtgtgggtgactggctacccaccagtgtgtttggctacttgcatgcgctctgtgcctacctgaggatgacctacgtggcgttgtatctgctcttcctcagcggggtggaatatgacgtcatcttctgcgatcaagtgtcggcgtgtatccctgtgctgcgactgtcccgccgcaggaagaaagtcctgttctattgtcacttcccggaccagctgctgacccagaggcagtcggtcctgaagaggctttaccgggcccccctggactggctggaggaacgcaccaccggcatggctgacatgattctggtgaacagccagtttactgcgggcgtcttcagagagacctttggtggtctggcaggggtccagacagacatcctctatccctccctgaacacgcgccactttgaccagccgcccgccgagacacaggacctgggggggctgctccccgagggcacctcctgcttcttcctctctctgaaccgctacgagaggaagaagaacctgggcctggctctggagtcccttgccgttctgaagagccgccttcctcccggccggggttcaggcgttcacctggtggtggccgggggctacgacgagcgggtgaccgagaacgttcagcatttcaccgagctgagagagctggccgagcagctgcgcctgggcggctgcgtcaccttcctgcgctcgccttccgattcgctgaaggtggccttgctgcggggcagcgcagcggtgctgtacacccccagcagggagcatttcgggatcgtccccgtggaggccatgtactgctgctgccccgtggtggcggtgaactctggggggccgctggagagcgtggcggacggggagacgggctttctgtgcgagcccaccgccgaggccttctcgcaggccatggagaggctggtgagggagccgcagctccgcagggacatgggacaagccgggaggaggagggtgcaggacaggttctccctgcaggccttctcagagcagctgtacgggtcaggggaggaaaactccgtgtgtgtggttcacctcctggcctccactctgccagtggcctgtggtgaggtggctgctcagatcaccgtgcgtctgagtggcagcgataaccggcacccaggaatggtaattgggaaggagggaggggggatgggtggagggtggtggggggctggggcaggtcgcgtccagccccaccgaggagggggcgcttcgaggcggccacggggaacacggggagccggggcaccaggagccgcacaaggactcctacagcacctttgcctccgagttcctggagtccagataccttctgacgacggttatcccttccccaccgctcctccagtggatcctttcgctaggatcaaagtcagcgactgcggcgtgacaaagggctgcataagatacgggaagcccgggtgcgacgccgacacctgcgactacttcctgagttaccgtcgtatcgggacggacgtggagtatgagatgagcgcagacacggacggatgggtggccgtcggtttttcctccgacaaaaaaatggcgagcagcttgacgctctccggaggagatgacgtcatgggctgcgtccatgacgataacggacgtgttcggatacatcatttctacaacgtcggtcagtgggccaaggaaatcaagaggaaccccgccagggacgaagagggcattttcgagaacaaccgggtgacctgccgcttcaagcgtccgctctacgtcccccgggaggagacgctggtggacctacacctgtcctggtactacctgttcgcatggggaccggccatacaaggtgattcacccacccctccgtcaccagttgaattcctcgcggaaggttttaggctcatcctgacctctcctaacaggatccatcaccagacacgacatcgacagcccccccgtcagcgaccacatgataagcatctacaagtacgaggacatcttcatgccgtccacagcctaccagaccttcaactctccgctctgcctgctgctcattgtcgctctcaccttctacttgctgatgggaacgccatgacgaagacgagcagagcagagaggaacggagggaacgtgaccaagcagcaataa

SEQ ID NO: 45457 - protein, 769 aa, Tetraodon nigroviridis
MVQVVFIHPDLGIGGAERLVVDAAVALKSKGCSVQIWTAHYDPSHCFSETLDPDLPVVCVGDWLPTSVFGYLHALCAYLRMTYVALYLLFLSGVEYDVIFCDQVSACIPVLRLSRRRKKVLFYCHFPDQLLTQRQSVLKRLYRAPLDWLEERTTGMADMILVNSQFTAGVFRETFGGLAGVQTDILYPSLNTRHFDQPPAETQDLGGLLPEGTSCFFLSLNRYERKKNLGLALESLAVLKSRLPPGRGSGVHLVVAGGYDERVTENVQHFTELRELAEQLRLGGCVTFLRSPSDSLKVALLRGSAAVLYTPSREHFGIVPVEAMYCCCPVVAVNSGGPLESVADGETGFLCEPTAEAFSQAMERLVREPQLRRDMGQAGRRRVQDRFSLQAFSEQLYGSGEENSVCVVHLLASTLPVACGEVAAQITVRLSGSDNRHPGMVIGKEGGGMGGGWWGAGAGRVQPHRGGGASRRPRGTRGAGAPGAAQGLLQHLCLRVPGVQIPSDDGYPFPTAPPVDPFARIKVSDCGVTKGCIRYGKPGCDADTCDYFLSYRRIGTDVEYEMSADTDGWVAVGFSSDKKMASSLTLSGGDDVMGCVHDDNGRVRIHHFYNVGQWAKEIKRNPARDEEGIFENNRVTCRFKRPLYVPREETLVDLHLSWYYLFAWGPAIQGDSPTPPSPVEFLAEGFRLILTSPNRIHHQTRHRQPPRQRPHDKHLQVRGHLHAVHSLPDLQLSALPAAHCRSHLLLADGNAMTKTSRAERNGGNVTKQQ

SEQ ID NO: 45458 - DNA, 1350 bp, Schistosoma japonicum
  CDS (61)..(1248)
cttgatagccggtttttgaattcgatttattacaagacacttgcttcctaacgcaatacaatgccaaagcatatcatttttctacatccagatcttggtataggtggcgctgaaagactcattgtagattcggcagtcgctttgcagtcatgtggttataatatcagtattatcacaaatcatcacgaccctaatcattgtttcgaagaaacattggagtcaaatttaaatgtaactgtagtagctgattggtttccacgttctctatttggttacatgacagcgttatgtgcatatattcgccttatgcttgcaacactgtatttattgttattttatggaaagaaaccagatgtaacgtttgtcgatcaaatatcagcacccataattctacttcgagctttcggatacaaaacaatattttattgtcactttccagatttacttttaacaagggataaaaatttctttttaaaaaagctgtacagattacctattgattatgttgagcaattatcaactggaatggctaatgttgtccttgttaacagcaagtttacatctaatatattcagagaaacatttacctcacttaatcacgtacaactacgtattttatatccgatcgcaaccacgaggagtttatgcttaccaacatcagaaaagtctgaaagtgatcagtcgaaatatgaataccgtaagcttttgccatcaggaattattcctgtaaaagccaagattgtattcgtatcaattaatcgatatgaacggaaaaaaaatcttacattggctttaaacagtcttgactacttgatcacgcattgggatcaacttattgattcgtcattggaaatacagcctgagaatgttcatttagtcatagctggaggttatgatcgccgtgtagttgaaaatgtcgaatattatgtcgaattagttaacctatcaaaaacattgaagctttcaggaaatgttactttcctacgttcctgttcatctgaaatcaagcctttattaattgcctctagcgatgctgtaatttacactccagataaggaacactttggaattgttcccattgagtcaatgctgttgtctcgagctgttattgcattagattctggtggtccgaaagaaactgtcttacataatatcactggatttttgtgtacagtggagccaacaactcaacttccggaaaacatggctaactatcttagcaagtatgtttcacacaatttcttctagcatattaccaactgtgatcagtcagttttgttgtttatgtgtcaactataaatgatactgagtaaaacaagaatccagtattaattaaaaaaaaaaaaaaaa

SEQ ID NO: 45459 - protein, 395 aa, Schistosoma japonicum
MPKHIIFLHPDLGIGGAERLIVDSAVALQSCGYNISIITNHHDPNHCFEETLESNLNVTVVADWFPRSLFGYMTALCAYIRLMLATLYLLLFYGKKPDVTFVDQISAPIILLRAFGYKTIFYCHFPDLLLTRDKNFFLKKLYRLPIDYVEQLSTGMANVVLVNSKFTSNIFRETFTSLNHVQLRILYPIATTRSLCLPTSEKSESDQSKYEYRKLLPSGIIPVKAKIVFVSINRYERKKNLTLALNSLDYLITHWDQLIDSSLEIQPENVHLVIAGGYDRRVVENVEYYVELVNLSKTLKLSGNVTFLRSCSSEIKPLLIASSDAVIYTPDKEHFGIVPIESMLLSRAVIALDSGGPKETVLHNITGFLCTVEPTTQLPENMANYLSKYVSHNFF

SEQ ID NO: 45460 - DNA, 1479 bp, Homo sapiens
  CDS (1)..(1479)
atggcggccggcgaaaggagctggtgcctgtgcaagttgttgaggtttttttattcattattcttccctgggctcattgtatgtggaactttatgtgtgtgtttggtcattgtcctttggggaatcagactgctgctacagagaaagaaaaaattagtgtcaactagcaaaaatgggaaaaatcaaatggtgattgcattttttcatccatactgcaatgctggtggaggaggagaaagagttttatggtgtgctttaagagccctgcagaaaaagtatcctgaagcagtttatgttgtttataccggcgatgttaatgtcaacggtcaacagatactagaaggtgctttcagaagatttaacatcagattaattcacccagtgcagtttgtttttttaaggaaacgctatcttgtggaagattcactgtatcctcacttcacactgctgggccaaagtctaggatccatttttcttggctgggaagctctaatgcagtgtgttcctgatgtttacattgattcaatgggatacgcttttacgcttcctctgtttaagtatatagggggttgccaagttggaagctatgttcattatcctactatcagcaccgacatgctctctgtagtgaagaatcaaaatattggatttaataatgcagccttcattaccaggaatccttttctcagcaaagtaaagctcatctactactatttatttgcttttatttatggacttgttggttcttgcagtgatgtagtcatggtcaattcttcttggacactaaaccatattctctcactatggaaagttgggaattgcactaacattgtttatccaccttgtgatgtgcagacatttctggacattcccttacatgagaaaaagatgaccccaggacatttgctggtttctgttggccagtttaggccggaaaagaatcatccattgcagatcagagcctttgctaaattgctgaataagaagatggttgagtcacctccttcgcttaaacttgtcctcattggaggttgtcgtaacaaagatgatgaacttagggtaaaccaactgagaaggctgtctgaggatttaggagttcaagaatatgtggaatttaaaataaacattccatttgatgaattaaagaattatttgtctgaagcaacaattggtctgcataccatgtggaacgagcattttgggattggagttgtggagtgtatggcagctggcacaattatccttgcacacaattcggggggcccaaagcttgacattgtggttcctcacgaaggagatataactggctttctggctgagagtgaagaagactatgctgaaactatcgctcacattctttccatgtctgcagaaaagagactccaaatcagaaaaagtgctcgtgcatctgtaagcagattctctgatcaggaatttgaagtgacattcctatcatctgtggaaaagttatttaagtaa

SEQ ID NO: 45461 - protein, 492 aa, Homo sapiens
MAAGERSWCLCKLLRFFYSLFFPGLIVCGTLCVCLVIVLWGIRLLLQRKKKLVSTSKNGKNQMVIAFFHPYCNAGGGGERVLWCALRALQKKYPEAVYVVYTGDVNVNGQQILEGAFRRFNIRLIHPVQFVFLRKRYLVEDSLYPHFTLLGQSLGSIFLGWEALMQCVPDVYIDSMGYAFTLPLFKYIGGCQVGSYVHYPTISTDMLSVVKNQNIGFNNAAFITRNPFLSKVKLIYYYLFAFIYGLVGSCSDVVMVNSSWTLNHILSLWKVGNCTNIVYPPCDVQTFLDIPLHEKKMTPGHLLVSVGQFRPEKNHPLQIRAFAKLLNKKMVESPPSLKLVLIGGCRNKDDELRVNQLRRLSEDLGVQEYVEFKINIPFDELKNYLSEATIGLHTMWNEHFGIGVVECMAAGTIILAHNSGGPKLDIVVPHEGDITGFLAESEEDYAETIAHILSMSAEKRLQIRKSARASVSRFSDQEFEVTFLSSVEKLFK

SEQ ID NO: 45462 - DNA, 1728 bp, Caenorhabditis briggsae
  CDS (1)..(1728)
atggtacgagtcaccattctgcatcctgatcttgggattggaggagccgagcggctgattgtagacgcagcgacaggcctaaaagagcgaggacattcggttcgaatcgttaccaatcagtacgataaaaaccactgttttcaagaaactctcaatctagacatctgcactgttgttaaatggatccctcgctcatttttcggaaaaggccatgccctactcgcctacatcaaaatgatcgtagcagcattctacatagcacttttctaccgagatacagacgtcgttctatcagattcagtttctgccggccaatttgttctcagatatttatcaaatgcgaaactagtcttttattgtcactatccagatcgacttctgacgaaaagaaacggccagttgaaggctgcttaccggatagtgatagattggatagaagaatgttcaacgggactggcggatgtcatctgtgttaacagcaattttacaaaaggagttgttcaggaaacgttcaaatcattgcaatccagagagttgactgttttgtatccatcattaaatacagcgttttttgattcaatccagccttcagaccattttggaaacgattttaacattgatgccaaatacattttcacatctttcaatcggttcgaaaggaagaagaacattgttttggcattggattcttttgcccagctaaagtccaatttttcaacttccgactttgcgaagtttcatttgataattgctggcggatatgataagaataacctggaaaacattgagcactacgacgaattgaaaaaacacgcagaagatctcggtttgacagataaccaggtcacatttctccgatcgccttctgatgaggtgaagataaacattatcagaaagagtcgagcagttttgtacactcctgatcgtgagcattttggaatcgttccagtagaagctatgtatttggggacaccagtaatagcagtcaacactggaggtccacgtgaaactgtgcgaaacaacgaaacaggatatcttgttaatcaaaacgccgaagagtttgcagagaagatgaaggagattctgcaagatgagaagaaatatcaaaaattgagcgaagaaggaccgaaatgggtgcaacggacaaaagcattcattggcaagccagccccacaattcaaaactcaggccgtcatcgacggagagttcgttgatgtctcgctctccgattacaagggaaagtacgtggtgctcttcttctacccacttgacttcaccttcgtgtgcccaactgagattatcgctttctcggaccgtgctgctgagttcagcgccatcaacaccgtcgttctcgctgcttccactgactctgtcttctctcacttggcatggatcaaccagccacgcaagcacggagggctcggagaaatgaacatcccagtgctcgctgacaccaaccatcaaatctctcgtgattatggagttctcaaggaggaagatggaatcgctttccgcggtctcttcatcattgacccacaacagaaccttcgccaaatcaccatcaacgatcttccagtcggacgctctgtcgatgagactcttcgtctcgtccaagccttccaattcgtggagaagcacggagaggtttgcccagctggatggactccaggatctgacaccatcaagccagacgtcaagaagagccaagaatacttcggaaagcactaa

SEQ ID NO: 45463 - protein, 575 aa, Caenorhabditis briggsae
MVRVTILHPDLGIGGAERLIVDAATGLKERGHSVRIVTNQYDKNHCFQETLNLDICTVVKWIPRSFFGKGHALLAYIKMIVAAFYIALFYRDTDVVLSDSVSAGQFVLRYLSNAKLVFYCHYPDRLLTKRNGQLKAAYRIVIDWIEECSTGLADVICVNSNFTKGVVQETFKSLQSRELTVLYPSLNTAFFDSIQPSDHFGNDFNIDAKYIFTSFNRFERKKNIVLALDSFAQLKSNFSTSDFAKFHLIIAGGYDKNNLENIEHYDELKKHAEDLGLTDNQVTFLRSPSDEVKINIIRKSRAVLYTPDREHFGIVPVEAMYLGTPVIAVNTGGPRETVRNNETGYLVNQNAEEFAEKMKEILQDEKKYQKLSEEGPKWVQRTKAFIGKPAPQFKTQAVIDGEFVDVSLSDYKGKYVVLFFYPLDFTFVCPTEIIAFSDRAAEFSAINTVVLAASTDSVFSHLAWINQPRKHGGLGEMNIPVLADTNHQISRDYGVLKEEDGIAFRGLFIIDPQQNLRQITINDLPVGRSVDETLRLVQAFQFVEKHGEVCPAGWTPGSDTIKPDVKKSQEYFGKH

SEQ ID NO: 45464 - DNA, 1215 bp, Xenopus laevis
  CDS (1)..(1215)
atgagaccttcggttctgtttgttcacccagacctcggcattggaggcgctgagagactggtggtggacgctgctttagcattaaagtctcgaggttgccatgttcaggtgtggacgagtcactacgaccctaatcactgcttttcagagactcggaattccggtattcctatacgatgttgtggagactggcttccccggagcttgctcggtagatgccatgcactctgcgcctacatacgcatgatcttcctggcactgtatattgtatttcttagtggggaacaattcgatgtagttttttgtgatcaggtgtcagcttgcattcctttttttaaactggccagaaattcaaagaaagtacttttttattgccattttccagatcagcttctaactcagaggctgtcgtggattaaaaggatgtacagagccccaattgattggttagaagaaaaaactactgggatggctgactgcattctcgtcaacagctattttactgctgctgttttcaaaaaaacatttacttcattagcttacatagagccaactgttctttatccatctctaaacgtgagcaactttgtatcaacagtgtttgaagatgtaagtgacctttttcctgttaaaagacaacatatatttctttcaatcaatcgatttgaaagaaagaaaaatcttaatcttgctctggaatcgatgtttgagcttcgtaagagacttagcttgttggaatgggaacgtgtccatcttgtattagctggaggctatgacgagagagtattggaaaatgtagaacattatcaagaactcaaagacaatgctgccaaatacgacatttgtaaccatgttacatttttaagatccttttctgatgaacaaaaacgtaatctactccatagagccatatgtgttctttatacaccaagcaatgaacatttcggaatagttcctatagaggctatgtacatgcactgtccagtcgtagctgttaattcgggtggtcccttggaatctgttgaaaataatgtaacaggatttttgtgcagtccaaacccaaaggagtttgctgatgcaatggaaaagtttgtgaaaaatcctgatcttaaaaacagaatgggggaatctggacatttacgagttaagaacaaattctccactgaagcattttcggatgagatatatgcccatatttgcaaattaaccaattaa

SEQ ID NO: 45465 - protein, 404 aa, Xenopus laevis
MRPSVLFVHPDLGIGGAERLVVDAALALKSRGCHVQVWTSHYDPNHCFSETRNSGIPIRCCGDWLPRSLLGRCHALCAYIRMIFLALYIVFLSGEQFDVVFCDQVSACIPFFKLARNSKKVLFYCHFPDQLLTQRLSWIKRMYRAPIDWLEEKTTGMADCILVNSYFTAAVFKKTFTSLAYIEPTVLYPSLNVSNFVSTVFEDVSDLFPVKRQHIFLSINRFERKKNLNLALESMFELRKRLSLLEWERVHLVLAGGYDERVLENVEHYQELKDNAAKYDICNHVTFLRSFSDEQKRNLLHRAICVLYTPSNEHFGIVPIEAMYMHCPVVAVNSGGPLESVENNVTGFLCSPNPKEFADAMEKFVKNPDLKNRMGESGHLRVKNKFSTEAFSDEIYAHICKLTN

SEQ ID NO: 45466 - DNA, 987 bp, Homo sapiens
  CDS (1)..(987)
atgcagtgtgttcctgatgtttacattgattcaatgggatacgcttttacgcttcctctgtttaagtatatagggggttgccaagttggaagctatgttcattatcctactatcagcaccgacatgctctctgtagtgaagaatcaaaatattggatttaataatgcagccttcattaccaggaatccttttctcagcaaagtaaagctcatctactactatttatttgcttttatttatggacttgttggttcttgcagtgatgtagtcatggtcaattcttcttggacactaaaccatattctctcactatggaaagctgggaattgcactaacattgtttatccaccttgtgatgtgcagacatttctggacattcccttacatgagaaaaagatgaccccaggacatttgctggtttctgttggccagtttaggccggaaaagaatcatccattgcagatcagagcctttgctaaattgctgaataagaagatggttgagtcacctccttcgcttaaacttgtcctcattggaggttgtcgtaacaaagatgatgaacttagggtaaaccaactgagaaggctgtctgaggatttaggagttcaagaatatgtggaatttaaaataaacattccatttgatgaattaaagaattatttgtctgaagcaacaattggtctgcataccatgtggaacgagcattttgggattggagttgtggagtgtatggcagctggcacaattatccttgcacacaattcggggggcccaaagcttgacattgtggttcctcacgaaggagatataactggctttctggctgagagtgaagaagactatgctgaaactatcgctcacattctttccatgtctgcagaaaagagactccaaatcagaaaaagtgctcgtgcatctgtaagcagattctctgatcaggaatttgaagtgacattcctatcatctgtggaaaagttatttaagtaa

SEQ ID NO: 45467 - protein, 328 aa, Homo sapiens
MQCVPDVYIDSMGYAFTLPLFKYIGGCQVGSYVHYPTISTDMLSVVKNQNIGFNNAAFITRNPFLSKVKLIYYYLFAFIYGLVGSCSDVVMVNSSWTLNHILSLWKAGNCTNIVYPPCDVQTFLDIPLHEKKMTPGHLLVSVGQFRPEKNHPLQIRAFAKLLNKKMVESPPSLKLVLIGGCRNKDDELRVNQLRRLSEDLGVQEYVEFKINIPFDELKNYLSEATIGLHTMWNEHFGIGVVECMAAGTIILAHNSGGPKLDIVVPHEGDITGFLAESEEDYAETIAHILSMSAEKRLQIRKSARASVSRFSDQEFEVTFLSSVEKLFK

SEQ ID NO: 45468 - DNA, 1272 bp, Brachydanio rerio
  CDS (1)..(1272)
atgtcattcaaacagacagacgagtttgtgtcagtaaacgtgaaaggttcctgtcaggacagtatggttcgggtggtgttcctgcaccctgatctgggtataggtggtgcagagcgtctggtggtggacgcggctgtagctctgcgctctcgtggatgtagtgttcagatctggacagcgcattatgacccgcagcactgcttctccgagactctctctcctgacctgccggtggtgtgtgtgggcgattggctgcccaccagtgtgtttggttatttccacgctctctgtgcttacctgcgcatgatctacttaaccatttatctcgtgctctttagtggagaggagtttgatgttgtcttctgcgatcaggtttcagcgtgcattccttttttgcgtttggcacgtcaaaggaagaaagtcttattctactgtcatttccctgaccagctactgacacagcgtcgttctgctctgaagcgcctgtatcgagggccaattgactggttcgaagaactgaccacaggcatggccgatcgcattctagtcaacagccagttcaccgccaaagtcttcaaacagacgtttcccaaactgtccgagatccacactgacgtcctttatccctctctgaactcatcagctttcgatgatgaagtagagggtctcggtggactcctccctgaaggacggagcttcatttatttgtcgatcaaccgctacgaacgcaaaaagaacctgccattggcattacaagcattagcaaacctgaaggaccgactgtcagttggagaatgggagtgtgtgcaccttgtaatggcgggaggttacgacgagcgtgtggttgaaaatgtagagcactatgaagaactgcgctcactcgtgacctctcttggcctggaggaccacgtcaccttcttgcgttcgttttcagacaaacagaaactgtctttgctgcataacagcacttgtgtactctacactcccagcaatgaacattttgggattgtccctattgaatccatgtatttgcgctgccccgttattgctgttaactccggtggaccacttgaatctgtggcgcatgaagaaacgggatttctatgcgaacccacacctgaacgcttttcggaagccatgcagaatttcgtttcagatcctaaactaaagcagagaatgggacaggctggcagagagcgggtacagcagcgcttctcaatgcaggccttcgccgagcagctctatagtcatatcgccagccttaaccaataa

SEQ ID NO: 45469 - protein, 423 aa, Brachydanio rerio
MSFKQTDEFVSVNVKGSCQDSMVRVVFLHPDLGIGGAERLVVDAAVALRSRGCSVQIWTAHYDPQHCFSETLSPDLPVVCVGDWLPTSVFGYFHALCAYLRMIYLTIYLVLFSGEEFDVVFCDQVSACIPFLRLARQRKKVLFYCHFPDQLLTQRRSALKRLYRGPIDWFEELTTGMADRILVNSQFTAKVFKQTFPKLSEIHTDVLYPSLNSSAFDDEVEGLGGLLPEGRSFIYLSINRYERKKNLPLALQALANLKDRLSVGEWECVHLVMAGGYDERVVENVEHYEELRSLVTSLGLEDHVTFLRSFSDKQKLSLLHNSTCVLYTPSNEHFGIVPIESMYLRCPVIAVNSGGPLESVAHEETGFLCEPTPERFSEAMQNFVSDPKLKQRMGQAGRERVQQRFSMQAFAEQLYSHIASLNQ

SEQ ID NO: 45470 - DNA, 1527 bp, Brachydanio rerio
  CDS (1)..(1527)
atggttgtcatatatttggagaagatgtcagcgcacgatcacttttccctttgtctgtgcgatttaataaggttactctggtctcttatgttaccatgcttctatctgagtttcctcctgacaactatccttttcctcttcatcatgggggtgagaagttggctgcagatgaagaggaagaccagaagagttcaggatggccggcctgccgtggcttttttccacccatattgcaatgcaggaggaggaggagaaagagtgctgtggtgtgctttacgggctcttcaaaacaggtaccaagatgtttctttcgtagtctacacgggtgatcagggggtgacggcagaagagattttggatggagcacggagacgatttaacatcagactcccccgacccgttaagtttgtgttcctgaagcatcgtctactggtggaggcaaaactttacccacatttcacccttctggggcagagtgtgggctccatcttcttggggtgggaggcattgactgagtttgttccagatctctatattgactcaatgggcttcgccttcaccttacccgtgttccgctatctgggtggttgtcaagtgggaagctatgtgcactatccaaccatcagcacggacatgctgtctgtggttcgagaaagaaaccccaggttcaacaatgcagactacatctccagcaaccctgtactcagtgccatcaaagtgatttattattgtgtcttcgcactgctgtatggcctggctggctcctgtagtgacgtcatcatggtcaattccacctggactttgggtcacattctggctctgtggcgcactccgaaccgcaccagtgtggtttacccaccatgcgatgttcaggcattcctggatgttccaattggggaagacaatgaagagaaagagcaaaagaagtgtcacagtctggtctctgtgggtcagttccggccagaaaaagaccatcagctgcagatcagggcatttaaaaagcttttggacagaaaggaggcggagcctgcgggaagagaggctgtgaagctggtgctgattggtgggtgtcggaaccaggaggatgaagatcgggttctgatgctgagaggattgtgccaggagctgggcatagcagacagggtggagtttaagctcaatattccattccaggagctgaagaaagatttaacagatgccactatcgggttgcacacaatgtggaatgaacattttggcattggtatagtggagtgtatggctgcaggaacaataattctagctcacaaatctggcggtccaaagttggacattgtagttccatacgatggtggtcccaccggctttctggcagatgatgaagacaattacgcagacgccatggaacgaatcctttctatgagtcctgctactcggttagaaatgcgacgccgggcccgtctgtccgtctcccgcttctcagatcaggagtttgaaggttcatttctgtcagcaatggagcctctgatgtcaacattgagagcgtga

SEQ ID NO: 45471 - protein, 508 aa, Brachydanio rerio
MVVIYLEKMSAHDHFSLCLCDLIRLLWSLMLPCFYLSFLLTTILFLFIMGVRSWLQMKRKTRRVQDGRPAVAFFHPYCNAGGGGERVLWCALRALQNRYQDVSFVVYTGDQGVTAEEILDGARRRFNIRLPRPVKFVFLKHRLLVEAKLYPHFTLLGQSVGSIFLGWEALTEFVPDLYIDSMGFAFTLPVFRYLGGCQVGSYVHYPTISTDMLSVVRERNPRFNNADYISSNPVLSAIKVIYYCVFALLYGLAGSCSDVIMVNSTWTLGHILALWRTPNRTSVVYPPCDVQAFLDVPIGEDNEEKEQKKCHSLVSVGQFRPEKDHQLQIRAFKKLLDRKEAEPAGREAVKLVLIGGCRNQEDEDRVLMLRGLCQELGIADRVEFKLNIPFQELKKDLTDATIGLHTMWNEHFGIGIVECMAAGTIILAHKSGGPKLDIVVPYDGGPTGFLADDEDNYADAMERILSMSPATRLEMRRRARLSVSRFSDQEFEGSFLSAMEPLMSTLRA

SEQ ID NO: 45472 - DNA, 1275 bp, Drosophila melanogaster
  CDS (1)..(1275)
atggttcgagttctgttcctccacccggatttgggcatcggaggagctgagcgactggtggtggatgccgctctggcactcaaggagcggggtcaccaggtcagcttcctaacgaatcaccacgacagcacgcactgcttcaaggagacggcggacggcacttttccggtccacgtagtgggcgactggttgccacgcgggctcttcggaagattctatgccatctgtgcctatctgcgcatgctctatgcggcgatctacgccagtttttttatgccccagcgggagcaagtggacgtggtggtgtgcgacctaatctctgtgtgcattccagttctccgcttcgcccctcatcgtccgaaggttctattctactgccactttccggatcagcttctcagcagccgtgaaggactgctgaagcggctgtaccgcctgcccatcaactggctggaggagcacacgatcggtctagcagacaaggtgctggtcaactccaaatttacgctacgtgtcttccaggacacctttcgccgactgagcacggtgccggatgtgctgtatccttcactgcacacccagtactttgaccagatgcagaaaaagctagaacagcggtctgctttactggacgagccagtgcatccgcgagtaccactcaacgcctttatctatctggacatcaatcgctacgagcgcaagaagaaccacgcccttgccttacattccctgcgccttctgggcgacatgctgcccgccacggaattcaagcgctgtcgcctgatcatcgccgggggttacgacaccagatgcatggaaaatgtggagcacttcgcggagctggagcaccttacggaggagttgaagcttcaggatcacgttgtgctgctacgctcgcctaccgacgaggagaaatgtcgcctgctctttgccgctcactgtctgctgtatacgccagagaacgagcacttcggcattgtgccgctggagggcatgtactgctcgaagccagtcgtggcattgaacagcggcggacccactgaaacggtggtgaacacttcgactggctttctgtgcgaaaagaccgagaagagctttggtggagcaatgctccagcttttccgggacgagcagctgcgtgtgaagatgggagaccagggtcacaaacgggtgcagcaaaagttctctttccaagcattcgcagatcggctcaacggcattattagagatcttgttcctatctccagggagtcgagtgccaagaaaaataaataa

SEQ ID NO: 45473 - protein, 424 aa, Drosophila melanogaster
MVRVLFLHPDLGIGGAERLVVDAALALKERGHQVSFLTNHHDSTHCFKETADGTFPVHVVGDWLPRGLFGRFYAICAYLRMLYAAIYASFFMPQREQVDVVVCDLISVCIPVLRFAPHRPKVLFYCHFPDQLLSSREGLLKRLYRLPINWLEEHTIGLADKVLVNSKFTLRVFQDTFRRLSTVPDVLYPSLHTQYFDQMQKKLEQRSALLDEPVHPRVPLNAFIYLDINRYERKKNHALALHSLRLLGDMLPATEFKRCRLIIAGGYDTRCMENVEHFAELEHLTEELKLQDHVVLLRSPTDEEKCRLLFAAHCLLYTPENEHFGIVPLEGMYCSKPVVALNSGGPTETVVNTSTGFLCEKTEKSFGGAMLQLFRDEQLRVKMGDQGHKRVQQKFSFQAFADRLNGIIRDLVPISRESSAKKNK

SEQ ID NO: 45474 - DNA, 1095 bp, Homo sapiens
  CDS (1)..(1095)
atgtttgtttttttaaggaaacgctatcttgtggaagattcactgtatcctcacttcacactgctgggccaaagtctaggatccatttttcttggctgggaagctctaatgcagtgtgttcctgatgtttacattgattcaatgggatacgcttttacgcttcctctgtttaagtatatagggggttgccaagttggaagctatgttcattatcctactatcagcaccgacatgctctctgtagtgaagaatcaaaatattggatttaataatgcagccttcattaccaggaatccttttctcagcaaagtaaagctcatctactactatttatttgcttttatttatggacttgttggttcttgcagtgatgtagtcatggtcaattcttcttggacactaaaccatattctctcactatggaaagttgggaattgcactaacattgtttatccaccttgtgatgtgcagacatttctggacattcccttacatgagaaaaagatgaccccaggacatttgctggtttctgttggccagtttaggccggaaaagaatcatccattgcagatcagagcctttgctaaattgctgaataagaagatggttgagtcacctccttcgcttaaacttgtcctcattggaggttgtcgtaacaaagatgatgaacttagggtaaaccaactgagaaggctgtctgaggatttaggagttcaagaatatgtggaatttaaaataaacattccatttgatgaattaaagaattatttgtctgaagcaacaattggtctgcataccatgtggaacgagcattttgggattggagttgtggagtgtatggcagctggcacaattatccttgcacacaattcggggggcccaaagcttgacattgtggttcctcacgaaggagatataactggctttctggctgagagtgaagaagactatgctgaaactatcgctcacattctttccatgtctgcagaaaagagactccaaatcagaaaaagtgctcgtgcatctgtaagcagattctctgatcaggaatttgaagtgacattcctatcatctgtggaaaagttatttaagtaa

SEQ ID NO: 45475 - protein, 364 aa, Homo sapiens
MFVFLRKRYLVEDSLYPHFTLLGQSLGSIFLGWEALMQCVPDVYIDSMGYAFTLPLFKYIGGCQVGSYVHYPTISTDMLSVVKNQNIGFNNAAFITRNPFLSKVKLIYYYLFAFIYGLVGSCSDVVMVNSSWTLNHILSLWKVGNCTNIVYPPCDVQTFLDIPLHEKKMTPGHLLVSVGQFRPEKNHPLQIRAFAKLLNKKMVESPPSLKLVLIGGCRNKDDELRVNQLRRLSEDLGVQEYVEFKINIPFDELKNYLSEATIGLHTMWNEHFGIGVVECMAAGTIILAHNSGGPKLDIVVPHEGDITGFLAESEEDYAETIAHILSMSAEKRLQIRKSARASVSRFSDQEFEVTFLSSVEKLFK

SEQ ID NO: 45476 - DNA, 1092 bp, Actinobacillus actinomycetemcomitans
  CDS (1)..(1092): transl_table=11
atgaaagttgctattattcactattggttagtgaatttaagaggtggagagaaagtacttgaagccctatgtgagctttatccgcaagcggatatttttacccatgtttatattcaggaaaagtttcaaaattccgtgatttccaagcataagattactacaacatttatctctaaacttccctgggccgccaaacattatcaattatatttgccattcatgccattagcgttagaagagatggatttatctggttatgatttagtgatttccagtgagtcgggtccggctaagggtgttattgtaccgcccggtgtgccgcatatttgttattgtcattcaccaatgcgctatgcttgggatatgtatggagaatatcgggcgaagatgggaaaaataaagcgatttttggccgcacttttcttgcattacattcgtcgttgggatcaattaactagtcagcaagttactaaatttattgctaacagccaatttgttgccaagcggataaaaagctactatgcacaggaaagcatggttatttatccgccggttcaggtggatgcattcgaattagctcaagacagtgaagattattatttgattttaggacaactggttccttataaaaaaacggatttggccgttcgggcatttaatcaatcgggcaaaaagttagttgttattggagatggtgtacaattagagctgttaaaaaagattgcacaacgtaatgtgaagatattgggctatcaaccctttcaagtagtgaaagaatacttaatgaaatgcaaagcattaattttccccggtgtggaggattttggtattgttcccttggaagcgatggcgtgtggtaagccggtaattgcttttgctcagggaggtgcgttggagacaataaaagaggggattactggttcctttttctataaccagactgaaaatagtttaaactgggctgtttctcattttgaacaaaatttttacgttgaaccgtacataatacgacaacatgctatgctcttttctaaagaaaattttaaagaaaaaattcattcctatataaatcagatcattaccggtaaatag

SEQ ID NO: 45477 - protein, 363 aa, Actinobacillus actinomycetemcomitans
MKVAIIHYWLVNLRGGEKVLEALCELYPQADIFTHVYIQEKFQNSVISKHKITTTFISKLPWAAKHYQLYLPFMPLALEEMDLSGYDLVISSESGPAKGVIVPPGVPHICYCHSPMRYAWDMYGEYRAKMGKIKRFLAALFLHYIRRWDQLTSQQVTKFIANSQFVAKRIKSYYAQESMVIYPPVQVDAFELAQDSEDYYLILGQLVPYKKTDLAVRAFNQSGKKLVVIGDGVQLELLKKIAQRNVKILGYQPFQVVKEYLMKCKALIFPGVEDFGIVPLEAMACGKPVIAFAQGGALETIKEGITGSFFYNQTENSLNWAVSHFEQNFYVEPYIIRQHAMLFSKENFKEKIHSYINQIITGK

SEQ ID NO: 45478 - DNA, 1218 bp, Arabidopsis thaliana
  CDS (1)..(1218)
atggcgaaaaaagaaggttcaaagatgaacatcgccattatacatccagatcttggaataggcggagcagagagattgattgttgatgcggccgttgagcttgcctcgcacggtcataaagttcatatcttcacctctcaccacgacaaatccagatgcttcgaggaaactctttccggtatctttcaagttacggtgtatggatctttcctgccacggcatattttctaccgactacacgcagtgtgtgcatatttgcggtgcttgtttgttgctctctgtgttcttttgggttggtcttcattcgatgttgtactagcagaccaagtttcagtcgtagtcccattgctgaaactcaaaaggtcatctaaggttgttttctactgccatttcccggatctcttgctagctaagcatacaacaacacttagacggatgtatcggaaacccattgatttcattgaagaacaaacaacagggatggctgatatgatccttgttaacagtaacttcacggcatcaacatttgccaatacatttaaaaggctaaatgcacaagggagtcgcccagctgtactttaccccgcagtcaatattgatcagttcattgaaccccacacttataagttgaatttcctctccataaaccgctttgagaggaaaaagaacatcgatctagctgtttcagcttttgctatcctatgcaaacataagcaaaatctgagtgatgttacccttaccgttgcaggcaagtgtggatatgacgagcgattgaaggagaatgttgagtacttggaggagctcagaagtttagccgagaaagaaggagtttctgatcgagttaactttatcacatcttgttcaaccgctgaaagaaatgaacttctctcaagctgcttgtgcgttctctacacccccacggatgaacattttggtattgttccattagaagcaatggctgcatacaaacccgtgatagcctgcaacagtggtggccccgtggagacggtaaagaatggagtaacaggctatctttgtgaaccaactccagaagatttcagttcggcgatggctagattcatcgagaatcctgagttggcgaatagaatgggagctgaagccaggaaccatgtcgttgaatcattctctgtgaagacgtttggacagaagttgaatcagtatctcgttgatgtcgtatcaagtcctaaagaagattga

SEQ ID NO: 45479 - protein, 405 aa, Arabidopsis thaliana
MAKKEGSKMNIAIIHPDLGIGGAERLIVDAAVELASHGHKVHIFTSHHDKSRCFEETLSGIFQVTVYGSFLPRHIFYRLHAVCAYLRCLFVALCVLLGWSSFDVVLADQVSVVVPLLKLKRSSKVVFYCHFPDLLLAKHTTTLRRMYRKPIDFIEEQTTGMADMILVNSNFTASTFANTFKRLNAQGSRPAVLYPAVNIDQFIEPHTYKLNFLSINRFERKKNIDLAVSAFAILCKHKQNLSDVTLTVAGKCGYDERLKENVEYLEELRSLAEKEGVSDRVNFITSCSTAERNELLSSCLCVLYTPTDEHFGIVPLEAMAAYKPVIACNSGGPVETVKNGVTGYLCEPTPEDFSSAMARFIENPELANRMGAEARNHVVESFSVKTFGQKLNQYLVDVVSSPKED

SEQ ID NO: 45480 - DNA, 1416 bp, Schizosaccharomyces pombe
  CDS (1)..(1416)
atgattacaacacttgccattgctcttttcattgctgtggtcgccatccattcacatatacgaagaaaaatatgcaaggaaattggaattcgacttatcaaaaagatagcccctgtgaaagctagtttatacaaacaagtgggcgtggagccgaaactagcaagaaccgtcgggttttttcatccttactgcaatgctggaggcggaggtgaacgagtattatggacagctgtcaaatctgtccaaacggagtttccaaatgttatttctgttgtgtatactggcgacaatgttagtaaagccgaaattctgcgcagagtcaagaatacatttgaaatcgacctggattcttccaaaatagtttttgtttatctaaaacttcgtttccttgtgtccgccactacttggcatcggtttacattgcttggacaatcgctaggaagtatgattttaggtttcgaagctatttatcgatttgcacctgacattttcattgacaccatgggatatgctttcactttttgtgtcgttaaaagcttccaaaatattcctgtcggcgcgtacgttcattatcccacgatttctaccgacatgctaaagtccttaaaacaagtatctctacttgctaaggttaaaatggcttactggagatggttcgctcagttgtattcagatgccggatctcatgcggactatgtgatgactaactcttcatggacgagaaaccacattgcatctctttgggggaaagatattcaactctccgttgttttccccccctgtaacacttcagagcttgaaaagatcgacattaacagaaagcgcgaacccactcttctttatcttgcacaatacagacctgaaaagaatcatgaaaatgtacttcgtagttttgctctctattttgaacagcatcctgattctccagcgaagctattactggtcggtagcgttcgaggtgaagaagacatgtgttttgtgaatcatttgaagacccttgcgactgaactcaacttacaatcaaaagtcaaatttgttgtagatgctccttggcccaaggtagttgagtatctaggtacttgctctataggtgtcaattacatgtggaatgagcattttgggattggtgtcgttgaatacatggctgctggtttaatacctgttgtcaacaattcgggtggcccaaagttcgatatcgtgattccatggattggaaagcctacaggttttcatgctagcaccattagcgaatatgctgaagcctaccataaagctcttacattgagtcctcaagagcaattagagatgagaatcaatgctcgttcagcttgcgctcgttttggcgaacacgtttttatgcgcgattttggaaatgtgtttgccaaactccttcgtgaagattacagtcgtacctaa

SEQ ID NO: 45481 - protein, 471 aa, Schizosaccharomyces pombe
MITTLAIALFIAVVAIHSHIRRKICKEIGIRLIKKIAPVKASLYKQVGVEPKLARTVGFFHPYCNAGGGGERVLWTAVKSVQTEFPNVISVVYTGDNVSKAEILRRVKNTFEIDLDSSKIVFVYLKLRFLVSATTWHRFTLLGQSLGSMILGFEAIYRFAPDIFIDTMGYAFTFCVVKSFQNIPVGAYVHYPTISTDMLKSLKQVSLLAKVKMAYWRWFAQLYSDAGSHADYVMTNSSWTRNHIASLWGKDIQLSVVFPPCNTSELEKIDINRKREPTLLYLAQYRPEKNHENVLRSFALYFEQHPDSPAKLLLVGSVRGEEDMCFVNHLKTLATELNLQSKVKFVVDAPWPKVVEYLGTCSIGVNYMWNEHFGIGVVEYMAAGLIPVVNNSGGPKFDIVIPWIGKPTGFHASTISEYAEAYHKALTLSPQEQLEMRINARSACARFGEHVFMRDFGNVFAKLLREDYSRT

SEQ ID NO: 45482 - DNA, 1647 bp, Saccharomyces cerevisiae
  CDS (1)..(1647)
atgggcagtgcttggacaaactacaattttgaagaggttaagtctcattttgggttcaaaaaatatgttgtatcatctttagtactagtgtatggactaattaaggttctcacgtggatcttccgtcaatgggtgtattccagcttgaatccgttctccaaaaaatcttcattactgaacagagcagttgcctcctgtggtgagaagaatgtgaaagtttttggtttttttcatccgtattgtaatgctggtggtggtggggaaaaagtgctctggaaagctgtagatatcactttgagaaaagatgctaagaacgttattgtcatttattcaggggattttgtgaatggagagaatgttactccggagaatattctaaataatgtgaaagcgaagttcgattacgacttggattcggatagaatatttttcatttcattgaagctaagatacttggtggattcttcaacatggaagcatttcacgttgattggacaagcaattggatcaatgattctcgcatttgaatccattattcagtgtccacctgatatatggattgatacaatggggtaccctttcagctatcctattattgctaggtttttgaggagaattcctatcgtcacatatacgcattatccgataatgtcaaaagacatgttaaataagctgttcaaaatgcccaagaagggtatcaaagtttacggtaaaatattatactggaaagtttttatgttaatttatcaatccattggttctaaaattgatattgtaatcacaaactcaacatggacaaataaccacataaagcaaatttggcaatccaatacgtgtaaaattatatatcctccatgctctactgagaaattagtagattggaagcaaaagtttggtactgcaaagggtgagagattaaatcaagcaattgtgttggcacaatttcgtcctgagaaacgtcataagttaatcattgagtcctttgcaactttcttgaaaaatttaccggattctgtatcgccaattaaattgataatggcggggtccactagatccaagcaagatgaaaattatgttaaaagtttacaagactggtcagaaaatgtattaaaaattcctaaacatttgatatcattcgaaaaaaatctgcccttcgataagattgaaatattactaaacaaatctactttcggtgttaatgccatgtggaatgagcactttggaattgcagttgtagagtatatggcttccggtttgatccccatagttcatgcctcggcgggcccattgttagatatagttactccatgggatgccaacgggaatatcggaaaagctccaccacaatgggagttacaaaagaaatattttgcaaaactcgaagatgatggtgaaactactggatttttctttaaagagccgagtgatcctgattataacacaaccaaagatcctctgagataccctaatttgtccgaccttttcttacaaattacgaaactggactatgactgcctaagggtgatgggcgcaagaaaccagcagtattcattgtataaattctctgatttgaagtttgataaagattgggaaaactttgtactgaatcctatttgtaaattattagaagaggaggaaaggggctga

SEQ ID NO: 45483 - protein, 548 aa, Saccharomyces cerevisiae
MGSAWTNYNFEEVKSHFGFKKYVVSSLVLVYGLIKVLTWIFRQWVYSSLNPFSKKSSLLNRAVASCGEKNVKVFGFFHPYCNAGGGGEKVLWKAVDITLRKDAKNVIVIYSGDFVNGENVTPENILNNVKAKFDYDLDSDRIFFISLKLRYLVDSSTWKHFTLIGQAIGSMILAFESIIQCPPDIWIDTMGYPFSYPIIARFLRRIPIVTYTHYPIMSKDMLNKLFKMPKKGIKVYGKILYWKVFMLIYQSIGSKIDIVITNSTWTNNHIKQIWQSNTCKIIYPPCSTEKLVDWKQKFGTAKGERLNQAIVLAQFRPEKRHKLIIESFATFLKNLPDSVSPIKLIMAGSTRSKQDENYVKSLQDWSENVLKIPKHLISFEKNLPFDKIEILLNKSTFGVNAMWNEHFGIAVVEYMASGLIPIVHASAGPLLDIVTPWDANGNIGKAPPQWELQKKYFAKLEDDGETTGFFFKEPSDPDYNTTKDPLRYPNLSDLFLQITKLDYDCLRVMGARNQQYSLYKFSDLKFDKDWENFVLNPICKLLEEEERG

SEQ ID NO: 45484 - DNA, 1545 bp, Ashbya gossypii
  CDS (1)..(1545)
atgatgacccccttgaatattgccttgattcaccctgatctgggcatcggcggagcagaacgtctagtggtagatgcggccattggccttcaggatcaagggcatcgtgttactatctatactagccactgcgacaagaaccactgttttgaggagatcaaacgcggggatttaaaggtcgttgttgtgggtgacttcctaccgacaaatattcttgggaagttctttatcctgtgcgccaacttgagacagctcgctctggtgttcaagctggtgatcaacggcagcattgataagcacgatttgttcattgtggaccagctttcgacatgcgttccgctactgcacctattcagcgcttccggtcgtgtgttattctactgccattttcccgatcagctgctggcacaacgcaagagtctggtatcgaagctgtaccgggtaccgtttgatctgctagagcagctcacaatgggatgtagcgactcagttgtggtaaattcgtatttcactcgttctgtcttctttgacaccttcaagatactgagattaaacccccgtgtggtatacccatgtgtggccatggacgaacttccaatagaaaagatagatattggattctatgaccagattattgggccaaacaataggtactacctaagcataaatcggtttgagagaaagaaggacattgcgctagcccttaatgccttcaaggcttctaaagagggccatagtagtgatacaaaactaataatatgtggaggatacgacagccgagtggcggaaaatgtggaatatctgagcgaactacagcttatttgcgagaaagcaaatatagcacatgtaactatattctacagcgagtttagcagaactcctgagcattatacttttcctaccggcgtgagggagaagaaggttatatttctggcatctatatcgtcgtcactaaaggaattgctccttaagaaagcccaattattgctgtacacgccctcccgtgagcatttcgggatcgtgccactggaagctatgaagcatggtactcccgtgttggctgtggataacggtggaccgctggaaacagttgttactctcaagagtgataatcaagataccgctaccggatggctgagacgtgcggacgctggaatatgggcagaagctatcgacgagcaggcagagtatgtcaagaaaaatccaggcatcttcgctactaacgggccgaaatgggtcaaagacaagttttcccgtgatgctatgacaagctcatttttgcacaacatagataatattttcatgactgatagagtaattcagccgtgggctgtcatggtgatcctcgctgcgagctacatcctgtggcgttcatctcacgtttttggtgatgcatgtagatacatatatctcctcacaggtggtatccttgttctacgttcgagatatctgcttgccatcttctgggtccttctgttcgtaatgcagccgcagctgtccgttggtgttgacacaataactgccacattgaagccaaaactatag

SEQ ID NO: 45485 - protein, 514 aa, Ashbya gossypii
MMTPLNIALIHPDLGIGGAERLVVDAAIGLQDQGHRVTIYTSHCDKNHCFEEIKRGDLKVVVVGDFLPTNILGKFFILCANLRQLALVFKLVINGSIDKHDLFIVDQLSTCVPLLHLFSASGRVLFYCHFPDQLLAQRKSLVSKLYRVPFDLLEQLTMGCSDSVVVNSYFTRSVFFDTFKILRLNPRVVYPCVAMDELPIEKIDIGFYDQIIGPNNRYYLSINRFERKKDIALALNAFKASKEGHSSDTKLIICGGYDSRVAENVEYLSELQLICEKANIAHVTIFYSEFSRTPEHYTFPTGVREKKVIFLASISSSLKELLLKKAQLLLYTPSREHFGIVPLEAMKHGTPVLAVDNGGPLETVVTLKSDNQDTATGWLRRADAGIWAEAIDEQAEYVKKNPGIFATNGPKWVKDKFSRDAMTSSFLHNIDNIFMTDRVIQPWAVMVILAASYILWRSSHVFGDACRYIYLLTGGILVLRSRYLLAIFWVLLFVMQPQLSVGVDTITATLKPKL

SEQ ID NO: 45486 - DNA, 1377 bp, Candida glabrata
  CDS (1)..(1377)
atggtgcctgcgaagaagttaaagatagcatttgtgcatcccgatttaggaattggtggagcagaaagactagtggttgatgcagcacttggtttacaagaagcaggtcatgaagttatcatatatacaagtcattgtgacaagacacattgtttcgaagaggtcaaaaatggtactttgaaagttgaagtgtttggtgattttctaccgactgatttgggtaaacgattcttcattgtctttgctaatttgagacagttgtatctgacagctaaagtggtgttgtcaggaagatcaaaagacaaagatgtgtttatcattgatcagttatcaacttgtgtcccattttttaagttagcaaataataaagttttgttttattgccattttccagatcaattgttagctataagaacgaactggattaaaagcttatatcgtataccattcgatctactagagcaattcacgatgtactgttcggatgaggttgttgttaactctaactttacaaaatccatgtataaaaaaaccttcaaatacctacagaaaaacccaaacgtcatttatccatgtgttgataccgatactgagactctgattaacgatagggatatgcaaataggaaaccttttggttggaaaatgtccaaatttctacttgagtatcaataggtatgagaggaaaaagaatatagaactagcaatacaagcgtttgccaaagcatcagttgaaaacacaaatttggttgtatgtggtggttatgatccaaggatacacgaaaatgtacagtatttgcaagaattgacatgcctttgcaaagaattggatctttcttatactgttaatcactattctgactttattgaggatagttattctgtgaatgaaattgaaaagttgtttggtgcaaaggttatatttttgacatcaatttcttcttctttgaaggaatttctaattcaaaacatgcaactattattgtatacaccttcatatgaacattttggaatagtaccattggaagctatgaaatacggcaaaccagtgttagctgtcaacaatggtggaccagttgaaactgttgtaagctatcaaaaagaagataatgagaaatcaaccactggttggttgaggtcagctgacgctgatgagtgggcatcggctttgattgaaagtaaagaagttttgaatcaaaatccggaacttttcaaaaataatggccctaaaagggttattgaactattctcaagaaaagctatgacgcaagaatttgaaactaacatcaagttagcgctaaggcatacttccaatataagtatcatatatgttgtatccataatatttgcagtactgctcaaagtatttgttttctaa

SEQ ID NO: 45487 - protein, 458 aa, Candida glabrata
MVPAKKLKIAFVHPDLGIGGAERLVVDAALGLQEAGHEVIIYTSHCDKTHCFEEVKNGTLKVEVFGDFLPTDLGKRFFIVFANLRQLYLTAKVVLSGRSKDKDVFIIDQLSTCVPFFKLANNKVLFYCHFPDQLLAIRTNWIKSLYRIPFDLLEQFTMYCSDEVVVNSNFTKSMYKKTFKYLQKNPNVIYPCVDTDTETLINDRDMQIGNLLVGKCPNFYLSINRYERKKNIELAIQAFAKASVENTNLVVCGGYDPRIHENVQYLQELTCLCKELDLSYTVNHYSDFIEDSYSVNEIEKLFGAKVIFLTSISSSLKEFLIQNMQLLLYTPSYEHFGIVPLEAMKYGKPVLAVNNGGPVETVVSYQKEDNEKSTTGWLRSADADEWASALIESKEVLNQNPELFKNNGPKRVIELFSRKAMTQEFETNIKLALRHTSNISIIYVVSIIFAVLLKVFVF

SEQ ID NO: 45488 - DNA, 1431 bp, Debaryomyces hansenii
  CDS (1)..(1431)
atgtcaaagaaattaggcaataattcgaagaagatcgcgtttgtccatccagatcttggaattgggggagctgaaagattagtcgttgatgcagcagtaggtttacaagaacttgaaaatgaagtcacaatttacacgtctcattgcgataagaagcattgcttcgaagaagttagttccaacttattagacgtagaggtctatggagacttctttccaactaatgttttgaagaggttccacattctatttgctattatcagacaattttatttggtgctagcattaatatttactggtaaaataaaacaatacgactatttcatagttgatcaactatccttttgtattccattattatgctgtttcagtagacctgaatgcaaaattttattctactgtcatttcccagatcagctattagcattaaaaggcggatttcttaagaggttctacaggatgccttttgatctcattgaggaatggactacgggaataagcgatcaaatagtggttaattccaaatttaccaaaggtattttccacaaaacatttaaggggttaaaaaatattgagccgggagttatttatccatgtgttgaccttaattcagcgactgatactgaagaggacaagttgatggatgaagaggtgaatgaattctttaagggcggtaagtttttcctttcagttaatcgatttgaacgaaagaagaatattggtttagctattcaatcatttgctaagtttaaggcacaattacccaaaaatgtttcggaagataatagaataaaaccacgattggtggtcgcaggcggatttgatccaagggtacttgaaaatgtggaatacttgcaagagttgaatggattatctgaactgttgaacttgaaatgtttcactattcgtggcaaattgcttataataccacctgctactgacatattattcttaccatcaattaagtcatcattgaagaaatctttaattaaaaatgctgaattattattatatacgccttcttttgaacattttggaattgttcctgttgaaagtatgctattcaaaactcccgtgttatcggctaataatggtggtccattagagtcgattgttcattttacttctgataatatagcaacagcaactggctactctcaagaacctaatgatgaattgtggtcaaaaacaatgcacacattttacactgaattggacgaagcaacaaagttgaaattgggggaaaatgggttgaccagagttcatgaattatttctgagacaccagatgagtgaagcgtttatgcaaaatttgattcaaagtaattcaaaggatgaagagaagggaattttatatggtatcttaaaaatgtggagaattgaattgttatttgttcttattagttattatttggtgagattatataaatag

SEQ ID NO: 45489 - protein, 476 aa, Debaryomyces hansenii
MSKKLGNNSKKIAFVHPDLGIGGAERLVVDAAVGLQELENEVTIYTSHCDKKHCFEEVSSNLLDVEVYGDFFPTNVLKRFHILFAIIRQFYLVLALIFTGKIKQYDYFIVDQLSFCIPLLCCFSRPECKILFYCHFPDQLLALKGGFLKRFYRMPFDLIEEWTTGISDQIVVNSKFTKGIFHKTFKGLKNIEPGVIYPCVDLNSATDTEEDKLMDEEVNEFFKGGKFFLSVNRFERKKNIGLAIQSFAKFKAQLPKNVSEDNRIKPRLVVAGGFDPRVLENVEYLQELNGLSELLNLKCFTIRGKLLIIPPATDILFLPSIKSSLKKSLIKNAELLLYTPSFEHFGIVPVESMLFKTPVLSANNGGPLESIVHFTSDNIATATGYSQEPNDELWSKTMHTFYTELDEATKLKLGENGLTRVHELFLRHQMSEAFMQNLIQSNSKDEEKGILYGILKMWRIELLFVLISYYLVRLYK

SEQ ID NO: 45490 - DNA, 1251 bp, Homo sapiens
  CDS (1)..(1251)
atggcggaggagcagggccgggaacgggactcggttcccaagccgtcggtgctgttcctccacccagacctgggcgtgggcggcgctgagcggctggtgttggacgcggcgctggcgctgcaggcgcgcgggtgtagcgtgaagatctggacagcgcactacgacccgggccactgtttcgccgagagccgcgagctaccggtgcgctgtgccggggactggctgccgcgaggcctgggctggggcggccgcggcgccgccgtctgcgcctacgtgcgcatggttttcctggcgctctacgtgctgttcctcgccgacgaggagttcgacgtggtagtgtgcgaccaggtgtctgcctgtatcccagtgttcaggctggctagacggcggaagaagatcctattttactgtcacttcccagatctgcttctcaccaagagagattcttttcttaaacgactatacagggccccaattgactggatagaggaatacaccacaggcatggcagactgcatcttagtcaacagccagttcacagctgctgtttttaaggaaacattcaagtccctgtctcacatagaccctgatgtcctctatccatctctaaatgtcaccagctttgactcagttgttcctgaaaagctggatgacctagtccccaaggggaaaaaattcctgctgctctccatcaacagatacgaaaggaagaaaaatctgactttggcactggaagccctagtacagctgcgtggaagattgacatcccaagattgggagagggttcatctgatcgtggcaggtggttatgacgagagagtcctggagaatgtggaacattatcaggaattgaagaaaatggtccaacagtccgaccttggccagtatgtgaccttcttgaggtctttctcagacaaacagaaaatctccctcctccacagctgcacgtgtgtgctttacacaccaagcaatgagcactttggcattgtccctctggaagccatgtacatgcagtgcccagtcattgctgttaattcgggtggacccttggagtccattgaccacagtgtcacagggtttctgtgtgagcctgacccggtgcacttctcagaagcaatagaaaagttcatccgtgaaccttccttaaaagccaccatgggcctggctggaagagccagagtgaaggaaaaattttcccctgaagcatttacagaacagctctaccgatatgttaccaaactgctggtataa

SEQ ID NO: 45491 - protein, 416 aa, Homo sapiens
MAEEQGRERDSVPKPSVLFLHPDLGVGGAERLVLDAALALQARGCSVKIWTAHYDPGHCFAESRELPVRCAGDWLPRGLGWGGRGAAVCAYVRMVFLALYVLFLADEEFDVVVCDQVSACIPVFRLARRRKKILFYCHFPDLLLTKRDSFLKRLYRAPIDWIEEYTTGMADCILVNSQFTAAVFKETFKSLSHIDPDVLYPSLNVTSFDSVVPEKLDDLVPKGKKFLLLSINRYERKKNLTLALEALVQLRGRLTSQDWERVHLIVAGGYDERVLENVEHYQELKKMVQQSDLGQYVTFLRSFSDKQKISLLHSCTCVLYTPSNEHFGIVPLEAMYMQCPVIAVNSGGPLESIDHSVTGFLCEPDPVHFSEAIEKFIREPSLKATMGLAGRARVKEKFSPEAFTEQLYRYVTKLLV

SEQ ID NO: 45492 - DNA, 1512 bp, Kluyveromyces lactis
  CDS (1)..(1512)
atgtctgaagctccagttcaccagcgtaaagtcgcgttcatacacccagatttaggaattggcggcgcagaaagattagtcgtcgatgctgccgctggcctacaaaacgctgggtatgacgtgacgatttatacaagtcattgcgacaagtctcattgttttgaagaggttaagaatggtacacttaaagtagaagttcgtggagacgcattgccaactcatatctttggtaagttctcgatcttatgcgccaacttaagacagttatatttgacatggaatctaatatctacaggaaaaatcgaagaatatgatgtttatatcgtggatcaactatcttcgtgcgttcctttattacatttaaatgctccagactcaaaagtgttgttttattgccatttcccggatcaattgctcgccaggcgggatggcttattgaagaaactgtatagaataccgtttgacatattggaacaatttaccatgggtgtagcagatactattctagttaattctaattttacaaagcaggtatttgccaaaacgttccagtcactagccgttgaccctaaagtggtttacccttgtgtaaacgtagagcaagaagaaatacttcctttagataaagatcttatgaagaagatcttgaagaacaatgaaaagtattatctatctatcaacagatacgaaaggaaaaaaaacattgaattggctatcactgcttttgcacaatcaaaacaacgtacctcccataaactatttatatctggaggttacgatttgaataattccgagaatatcgactatctaaaagaattggaaactttggccactgaattgaaattgaagcacgttcatctttcatatccagaatactccaagagtcctgacaagtgtccatcaagtaacttcgctgatgctcaaatattgtttttgacttctgtgtcatcgtctctcaaggaattactattgcaaagtactgaaatgttgctatacactccttctaacgaacactttggaattgtaccactcgaggctatgaagtatggtgtacctgttttggcagtagatacgggtggtccactagaaacagtggtagattacaatgagacaccttctcatattgatgcaactggttggttacgaccatccgatgctgatgaatggtcaaaagtgttggatcaatccgtagacatatttgaaaagaatcactccttattcgaagttaacggtcctaaacgtattaagtactatttctccagagaagcgatgtccaaaaactttgataataccatcgaccatattatttggaagtcaagaggaacgcgtttatggagcacattagctccagggctactgatgttcactgtccaatatgctacactgttgataacaggcgatgcttcttggccatatttattgctagctgcgatttcttattttgtattaagaagtgtaaaggccactgtgtactggatcatcgttttctgttacctaaactattcaacttaa

SEQ ID NO: 45493 - protein, 503 aa, Kluyveromyces lactis
MSEAPVHQRKVAFIHPDLGIGGAERLVVDAAAGLQNAGYDVTIYTSHCDKSHCFEEVKNGTLKVEVRGDALPTHIFGKFSILCANLRQLYLTWNLISTGKIEEYDVYIVDQLSSCVPLLHLNAPDSKVLFYCHFPDQLLARRDGLLKKLYRIPFDILEQFTMGVADTILVNSNFTKQVFAKTFQSLAVDPKVVYPCVNVEQEEILPLDKDLMKKILKNNEKYYLSINRYERKKNIELAITAFAQSKQRTSHKLFISGGYDLNNSENIDYLKELETLATELKLKHVHLSYPEYSKSPDKCPSSNFADAQILFLTSVSSSLKELLLQSTEMLLYTPSNEHFGIVPLEAMKYGVPVLAVDTGGPLETVVDYNETPSHIDATGWLRPSDADEWSKVLDQSVDIFEKNHSLFEVNGPKRIKYYFSREAMSKNFDNTIDHIIWKSRGTRLWSTLAPGLLMFTVQYATLLITGDASWPYLLLAAISYFVLRSVKATVYWIIVFCYLNYST

SEQ ID NO: 45494 - DNA, 1248 bp, Mus musculus
  CDS (1)..(1248)
atggccgaaaacctgtaccgagcccgttcccgggtttacagcccatctgtgctgtttctgcacccagacatgggtataggcggagccgagcgcctagtgctggacgcggcgctggcgctgcaggagtacggctgtgatgtgaagatatggaccgcgcactacgacccgaaccactgcttcatcgagacccgcgagctctcggtgcaatgcgcaggggactggctgcctcgcagcctgggctggggcggccgcggcgccgccatctgctcctacgtgcgcatggtctttctggcgctctacgtgctgtttctctccggcgaggagttcgacgtggtggtgtgcgaccaggtgtctgcctgtatcccggtgttcaaactggccagacggcgtaagagggtcctattttactgtcacttcccagatctgctgcttactcagagaaattcagctctgaagaagttctacagggcccccatcgactggatcgaggaatacaccacaggcatggcagaccgcatcttggtcaacagccagtacactgcttccgtctttaaagaaaccttcaagaccctgtctcacagaaatcctgatgtgctctacccatctctgaatatcggcagctttgacttggctattcctgaaaagatagatgacctcgtccccaaggggaagcaattcctgttcctctctatcaaccgatacgaaaggaagaaaaatctgcccttggcactgagatccttggtgcagcttcggaatcggttaccatctcaagagtgggataaggttcatctcttcatggccggtggttatgacgataggatcccggagaacgtggagcactataaggagttgaagaaaatggtccaagagtcagaccttgagcgtcatgtgaccttcctgcggtccttctcggacagacagaagatctcactcctccacggctgcttgtgtgtgctctacactccgagcaacgagcactttggcatcgtccctctggaggccatgtacatgcagtgcccagtcatcgctgttaataacggtgggcccctggagtccattgtccacaaggtcacggggttcctgtgtgagccagacccagtgcacttctcagaagccatggagaagttcatccacaaaccatccttaaaagccacgatgggcctcgctggaaaagccagggtggcggagaagttttcagctgatgcatttgcagaccagctgtaccagtatgtcacgaagctggtgtag

SEQ ID NO: 45495 - protein, 415 aa, Mus musculus
MAENLYRARSRVYSPSVLFLHPDMGIGGAERLVLDAALALQEYGCDVKIWTAHYDPNHCFIETRELSVQCAGDWLPRSLGWGGRGAAICSYVRMVFLALYVLFLSGEEFDVVVCDQVSACIPVFKLARRRKRVLFYCHFPDLLLTQRNSALKKFYRAPIDWIEEYTTGMADRILVNSQYTASVFKETFKTLSHRNPDVLYPSLNIGSFDLAIPEKIDDLVPKGKQFLFLSINRYERKKNLPLALRSLVQLRNRLPSQEWDKVHLFMAGGYDDRIPENVEHYKELKKMVQESDLERHVTFLRSFSDRQKISLLHGCLCVLYTPSNEHFGIVPLEAMYMQCPVIAVNNGGPLESIVHKVTGFLCEPDPVHFSEAMEKFIHKPSLKATMGLAGKARVAEKFSADAFADQLYQYVTKLV

SEQ ID NO: 45496 - DNA, 1416 bp, Neurospora crassa
  CDS (1)..(1416)
atggcggcgggcgtcgacgagaaagataaaaagacaatagtcttcctccatcccgacctgggaattggcggcgcagaaagattggttgtcgacgccgccgtaggccttcagaaccgtggccataaggtggtcatcttcaccagccattgcgatcccagacactgttttgatgaagctcgcgatggaaccctcgacgttcgcgtccgcggcaactccatcatccccccttcccttctcggccgcttctccatcctctgcgccatcctccgccaactccacctaatcctccaaattaccctcctaacctccgaactacgcaccctctccccctccgccttcttcgtcgaccaactcagcgccggcctacccctcctcaaacttctcgttccgacctctcccatcttcttctactgccacttccccgacctgctcctcgtccaagggcgccaaacatggtacaagcgcctctaccgccttcccttcgacacctgggaagaatggtccatgggcttcgccgattccatcgccgtcaactcctccttcactaagggtatcgtctcgcacacatggcccagtctcgccagcaagcgcagcctggaagtcgtccacccatgcatcgacgtgcgctctacctccgactccagccaaaaccccaatgacgacgacaaggatgtactcccctggaccaaaacgggcatcatcctatccatcaaccgctttgagcgcaaaaaggacattgccctggccatcaaggccttcgcctctctttctcccgaacaaagggggaaagcaaagttgattatcgcgggggggtatgacaaccgcgtgcacgagaacgtttcgtaccatatggacttggtggacttggccgagggcgctccttaccatctcaagacggcgacagccaagacggtcgtgtcggcactgaatacctcccctgatgtggaagtcctttttctgttgtcggtacctaatacccttaaggaaatcctgttgcggtcagcgaaattgttggtctacacgccaagtaacgaacactttggtatcgtgccgcttgaagccatgttaaggggcgtgccggtgttggcggcgaataatggtggaccgacggagacggtggtggaaggggagacggggtggttgagagacccgaatgacgtaggggagtgggctaaggttatggataaggttttgaatgggatgggggaggaagagttgaagaggatgggaaagaagggggtggagagggtcaagggtaggtttgcggatacgcagatggcggagaggttggaggagattattgaaaggatgcccaaaggggacgcggcgcagagtgggatgattcttttggtggtgggagctgcggtggcggctgttgctggggttatcagtgctgtgtattggaaactttggtga

SEQ ID NO: 45497 - protein, 471 aa, Neurospora crassa
MAAGVDEKDKKTIVFLHPDLGIGGAERLVVDAAVGLQNRGHKVVIFTSHCDPRHCFDEARDGTLDVRVRGNSIIPPSLLGRFSILCAILRQLHLILQITLLTSELRTLSPSAFFVDQLSAGLPLLKLLVPTSPIFFYCHFPDLLLVQGRQTWYKRLYRLPFDTWEEWSMGFADSIAVNSSFTKGIVSHTWPSLASKRSLEVVHPCIDVRSTSDSSQNPNDDDKDVLPWTKTGIILSINRFERKKDIALAIKAFASLSPEQRGKAKLIIAGGYDNRVHENVSYHMDLVDLAEGAPYHLKTATAKTVVSALNTSPDVEVLFLLSVPNTLKEILLRSAKLLVYTPSNEHFGIVPLEAMLRGVPVLAANNGGPTETVVEGETGWLRDPNDVGEWAKVMDKVLNGMGEEELKRMGKKGVERVKGRFADTQMAERLEEIIERMPKGDAAQSGMILLVVGAAVAAVAGVISAVYWKLW

SEQ ID NO: 45498 - DNA, 1368 bp, Rhizomucor pusillus
  CDS (1)..(1368)
atgacgtctaaatcgttaaacgttgcattcatacaccctgatctcggcataggtggagccgaacgtttggtcgttgacgctgcagtgggcattcagaaaaaaggccatcaggtcatcttttatacaagtcatcacgacccaaaccattgctttgaggaaacacgagatggaacattaaaagtgcaagtacgcggcgattggttgccacggacgatttttggacgtttttatattctatgcgccatcttgcgacaattcgttcttgttgcttcgctgatactttgggaacgacactcgtacgatatcttctttgtcgaccaactgagcgcctgcgtgcctttgctgaaatggtttacaacagctaaaatccttttttactgccattttccggacaaactattaacgcaacgcaattctaccatcaaaaagctgtacagagcacctgtggataaaatggaagagttgactactggcatgtcagatctaattgcagtcaacagcgggttcactgctggcatgtttaagaaatcatttccatcagtccatcaaacacctcaaatactatatccacctatcaatttcgacgcatatgatcgacctgtagatcgaaacgatcctaccgttaaaatactagaaacagacaagcgggtgctgttatcaattaaccgtttcgagcgcaaaaagaatgtagaactggcgttgcgagctttcgctgcattgaaaatcaagaacatggtacctaaagatgtatttgcaaattacagacttgtgcttgcaggcggttacgacaaacgtgttagagaaaatgtcgaatatttagaagaattagatcaactggcgactgaagagtttggactacagacatttacgatccacccttcaagcgcggcggcggacgtccctgcagatgcccaagttgttttcctttgctccttcaacgatgctcaacgaacatttttactcgatcaagccaagcttttgctgtacaccccatcaaacgaacatttcggtattacgccggtcgagggcatgtatgcgtctgtacctgtcattgcagtcaacacaggtggtcctgtagaaactgtcaagaacaaagaaacgggactcttgctaccgtctgacccggacgtatgggcagagggcatccgcgactttatcatagagaaatacaatggcaaacagatgggtcagcacgggcgccagcacgtccaatccaagttttctttgcctgcctttgcagatcggctggaagcgatgatgatcgagcttgagacgagcacgcccgaccaatcaagcagcggtgctgtgtacttgcttggagccatcggtgtattatttgcatgcataatttattgcataaaacaataa

SEQ ID NO: 45499 - protein, 455 aa, Rhizomucor pusillus
MTSKSLNVAFIHPDLGIGGAERLVVDAAVGIQKKGHQVIFYTSHHDPNHCFEETRDGTLKVQVRGDWLPRTIFGRFYILCAILRQFVLVASLILWERHSYDIFFVDQLSACVPLLKWFTTAKILFYCHFPDKLLTQRNSTIKKLYRAPVDKMEELTTGMSDLIAVNSGFTAGMFKKSFPSVHQTPQILYPPINFDAYDRPVDRNDPTVKILETDKRVLLSINRFERKKNVELALRAFAALKIKNMVPKDVFANYRLVLAGGYDKRVRENVEYLEELDQLATEEFGLQTFTIHPSSAAADVPADAQVVFLCSFNDAQRTFLLDQAKLLLYTPSNEHFGITPVEGMYASVPVIAVNTGGPVETVKNKETGLLLPSDPDVWAEGIRDFIIEKYNGKQMGQHGRQHVQSKFSLPAFADRLEAMMIELETSTPDQSSSGAVYLLGAIGVLFACIIYCIKQ

SEQ ID NO: 45500 - DNA, 1536 bp, Schizosaccharomyces pombe
  CDS (1)..(1536)
atgtcacaagaaaattcggtgcatcgtagttctactaaaaagactccaattaaaattgctttcatccatccggatttaggaattggtggtgctgagaggcttgttgtagacgctgctgttggattacaatcactagggaaagaagttgtagtatttacgtctcattgtgataaaaaacattgtttcgaagaaatacgcgatggtactataaaggtaaaggtatatggtgattggcttccttcttctatatttggcaggctcagcattttctgcagctctctcagacaagtctacttgacgatgatccttctgacgaattacatgcactttgacgctattattgtagatcagctttcaacatgtgttccatttcttcttttggctagccagatgatccttttttattgtcattttcctgacaaatatcttgctaaacgcggtggaatccttaaaaagttgtatcgtattccttttgatacggttgaagcagagtctgttcgacttgcagatcgaattgttgttaatagcaagtttacagcttccgtcttcaaaaaagcatttccaaaaattcgtaagccccttcgaatcgttcatccttgcgttgatatagaggcagctagcaagcctttggagtttcaactccctgaaaaaattctgtatttacgttatagtcaacgaaagcttttaatttccgtcaaccgatttgaaaggaagaaggatattcgacttgcaatcgatgcttttagtgcattgcgcgatctttctgctaaccgatttcctgaatacttgcttttagtagccggtggctacgatattcgtgtttcagaaaatcgtcgatatttaaaagaattgcaggaattttgtgaacaaaaggatctttcttatacgactgtaaaagataattgggataacataactgttgctccttctaccaatgtattgtttttattatcagttccttcaaaggttcgggatgctttaatttcttcttctagaatattgctctacactcctgaaaatgaacattttggtattgtccctttggaagccatgcttcgtaaagttccagtattagcccaaacgaatggtgggcccttggaaacggttatagatggaaagaatggttggcttcgtcctagagacgcgaaaatttggggaaatgttatatatgaagcgactactagtactacatatgatactgctgccatgggtgaagcagggagtgaatgggtgaagaatgaattttctacagatgcaatggctcgaaaattcgaatcggaaataatgtctggaatacgatcaatcacgcccgaaaaaagattaatgagacgcgtgaatggactgttggctgtctttgttctatttatgctattttgggggacatgcattatcgctgcaactgttcccttcgccataatcaaattgtatttcgctcaaacgtattcaagcgtaaaactcggatttatgctaggaacttgtatagtttcagtgtcatttctaactttcactgtctatgcaaagctaacgaatctttaa

SEQ ID NO: 45501 - protein, 511 aa, Schizosaccharomyces pombe
MSQENSVHRSSTKKTPIKIAFIHPDLGIGGAERLVVDAAVGLQSLGKEVVVFTSHCDKKHCFEEIRDGTIKVKVYGDWLPSSIFGRLSIFCSSLRQVYLTMILLTNYMHFDAIIVDQLSTCVPFLLLASQMILFYCHFPDKYLAKRGGILKKLYRIPFDTVEAESVRLADRIVVNSKFTASVFKKAFPKIRKPLRIVHPCVDIEAASKPLEFQLPEKILYLRYSQRKLLISVNRFERKKDIRLAIDAFSALRDLSANRFPEYLLLVAGGYDIRVSENRRYLKELQEFCEQKDLSYTTVKDNWDNITVAPSTNVLFLLSVPSKVRDALISSSRILLYTPENEHFGIVPLEAMLRKVPVLAQTNGGPLETVIDGKNGWLRPRDAKIWGNVIYEATTSTTYDTAAMGEAGSEWVKNEFSTDAMARKFESEIMSGIRSITPEKRLMRRVNGLLAVFVLFMLFWGTCIIAATVPFAIIKLYFAQTYSSVKLGFMLGTCIVSVSFLTFTVYAKLTNL

SEQ ID NO: 45502 - DNA, 1383 bp, Yarrowia lipolytica
  CDS (1)..(1383)
atgagagtagcatttattcaccctgatctgggaattggcggagctgaacgatgggttgttgacgcagcagtgggtctgcagaacctgggccatgaagtcgacatctacacgtcgtactgcaacaagagccactgctttgatgaggtccgtgacggcctgctcaaggtgaccgtgctgggcgacaccatctgcccccacaccatcaagggcaagtttgcaatcttttgcgccacttttcggcaactgcacctggcctacgagctgaagaagggcccgggaagcaaggtggacgtgtttgtcgtggaccagctgagtgcatgtgttcccttgctcaagctgtggttccccaaggctcgagtccttttctacggccatttccctgatcagctgctggtgcagaacagaaaccaaatgtcgctggtcaagaaggcctaccgatacccctttgacaagttcgaggaaatcaccaccgcctcggccgaccgactggtcgtcaactctcatttcacaaaggacatgttcgaaaagactttccctgccaccaagaaccctctggtgatctacccttgcgtcgacacagacatcaaggagcagcagcagggtctcgacagagacatgatcacagctgcctcccagtacaccttcttgctgtccatcaaccggtttgagcgcaagaagaacatattgctggctattgaggcatttggggaagcccagaagaaatcgtccaacctcaaactggctgtggctggaggctatgatttcagagttaatgagaacgttgagtatctccaggaactcatcctggcctgtgagaagctcaagctgtcacacatctctatcaccgctgataagtacgccaagctgttggaaaaggacacccctgctgccgtctggacgtccatcttcaagaacgacgtcatcttcttcccttcggcgtctaactcgttcaaaaacactcttcttcacatctccaagcttctgctatacacacctcaaaatgagcactttggcatcgtgcctctggagggtatgctgtggaagacgcctgtgttggccaccaactcgggaggacctcttgagaccgtcaaggacaatgtgggatggacagttgagggcaagagcgaactatgggctcctgtgattgataaggtggttcatatgaatgcatctgactatgctgtgcttcagacagagtgtgtcaattgggtgaaccgattttcgcaggacaccatggccagtgagctggaggaggctatggaggaggttcgaaagaaggctcccaccgagaacgtgggatgggactacattcgtcttggcatgtggtacagcgtacttatgaccttgactttgtctattgtcctgctggccatttggccctga

SEQ ID NO: 45503 - protein, 460 aa, Yarrowia lipolytica
MRVAFIHPDLGIGGAERWVVDAAVGLQNLGHEVDIYTSYCNKSHCFDEVRDGLLKVTVLGDTICPHTIKGKFAIFCATFRQLHLAYELKKGPGSKVDVFVVDQLSACVPLLKLWFPKARVLFYGHFPDQLLVQNRNQMSLVKKAYRYPFDKFEEITTASADRLVVNSHFTKDMFEKTFPATKNPLVIYPCVDTDIKEQQQGLDRDMITAASQYTFLLSINRFERKKNILLAIEAFGEAQKKSSNLKLAVAGGYDFRVNENVEYLQELILACEKLKLSHISITADKYAKLLEKDTPAAVWTSIFKNDVIFFPSASNSFKNTLLHISKLLLYTPQNEHFGIVPLEGMLWKTPVLATNSGGPLETVKDNVGWTVEGKSELWAPVIDKVVHMNASDYAVLQTECVNWVNRFSQDTMASELEEAMEEVRKKAPTENVGWDYIRLGMWYSVLMTLTLSIVLLAIWP

SEQ ID NO: 45504 - DNA, 27 bp, Artificial sequence
  Primer sequence
atgattgaaaaggataaaagaacgatt

SEQ ID NO: 45505 - DNA, 26 bp, Artificial sequence
  Primer sequence
ttatatttcttcataagggtaggaga

SEQ ID NO: 45506 - protein, 581 aa, Artificial sequence
  Consensus
  Variant (2)..(7): Xaa in position 2 to 7 is any amino acid
  Variant (8)..(8): Xaa in position 8 is any or no amino acid
  Variant (10)..(15): Xaa in position 10 to 15 is any amino acid
  Variant (17)..(22): Xaa in position 17 to 22 is any amino acid
  Variant (23)..(28): Xaa in position 23 to 28 is any or no amino acid
  Variant (30)..(46): Xaa in position 30 to 46 is any amino acid
  Variant (47)..(49): Xaa in position 47 to 49 is any or no amino acid
  Variant (51)..(51): Xaa in position 51 is any amino acid
  Variant (53)..(55): Xaa in position 53 to 55 is any amino acid
  Variant (57)..(63): Xaa in position 57 to 63 is any amino acid
  Variant (64)..(72): Xaa in position 64 to 72 is any or no amino acid
  Variant (74)..(76): Xaa in position 74 to 76 is any or no amino acid
  Variant (78)..(79): Xaa in position 78 to 79 is any amino acid
  Variant (80)..(81): Xaa in position 80 to 81 is any or no amino acid
  Variant (83)..(85): Xaa in position 83 to 85 is any amino acid
  Variant (87)..(93): Xaa in position 87 to 93 is any amino acid
  Variant (94)..(186): Xaa in position 94 to 186 is any or no amino acid
  Variant (188)..(189): Xaa in position 188 to 189 is any amino acid
  Variant (190)..(210): Xaa in position 190 to 210 is any or no amino acid
  Variant (212)..(213): Xaa in position 212 to 213 is any or no amino acid
  Variant (215)..(220): Xaa in position 215 to 220 is any amino acid
  Variant (222)..(227): Xaa in position 222 to 227 is any amino acid
  Variant (228)..(228): Xaa in position 228 is any or no amino acid
  Variant (231)..(231): Xaa in position 231 is any or no amino acid
  Variant (233)..(234): Xaa in position 233 to 234 is any or no amino acid
  Variant (237)..(237): Xaa in position 237 is any or no amino acid
  Variant (240)..(241): Xaa in position 240 to 241 is any amino acid
  Variant (242)..(246): Xaa in position 242 to 246 is any or no amino acid
  Variant (248)..(252): Xaa in position 248 to 252 is any amino acid
  Variant (253)..(265): Xaa in position 253 to 265 is any or no amino acid
  Variant (270)..(285): Xaa in position 270 to 285 is any amino acid
  Variant (286)..(315): Xaa in position 286 to 315 is any or no amino acid
  Variant (319)..(320): Xaa in position 319 to 320 is any amino acid
  Variant (322)..(324): Xaa in position 322 to 324 is any amino acid
  Variant (326)..(328): Xaa in position 326 to 328 is any amino acid
  Variant (330)..(330): Xaa in position 330 is any amino acid
  Variant (332)..(332): Xaa in position 332 is any amino acid
  Variant (334)..(336): Xaa in position 334 to 336 is any amino acid
  Variant (338)..(339): Xaa in position 338 to 339 is any amino acid
  Variant (340)..(364): Xaa in position 340 to 364 is any or no amino acid
  Variant (368)..(368): Xaa in position 368 is any or no amino acid
  Variant (371)..(374): Xaa in position 371 to 374 is any amino acid
  Variant (375)..(376): Xaa in position 375 to 376 is any or no amino acid
  Variant (378)..(378): Xaa in position 378 is any amino acid
  Variant (379)..(384): Xaa in position 379 to 384 is any or no amino acid
  Variant (386)..(393): Xaa in position 386 to 393 is any or no amino acid
  Variant (395)..(424): Xaa in position 395 to 424 is any or no amino acid
  Variant (426)..(426): Xaa in position 426 is any amino acid
  Variant (428)..(439): Xaa in position 428 to 439 is any amino acid
  Variant (441)..(445): Xaa in position 441 to 445 is any amino acid
  Variant (446)..(450): Xaa in position 446 to 450 is any or no amino acid
  Variant (454)..(456): Xaa in position 454 to 456 is any amino acid
  Variant (462)..(463): Xaa in position 462 to 463 is any amino acid
  Variant (466)..(466): Xaa in position 466 is any amino acid
  Variant (468)..(472): Xaa in position 468 to 472 is any amino acid
  Variant (476)..(478): Xaa in position 476 to 478 is any amino acid
  Variant (482)..(484): Xaa in position 482 to 484 is any amino acid
  Variant (486)..(487): Xaa in position 486 to 487 is any amino acid
  Variant (488)..(518): Xaa in position 488 to 518 is any or no amino acid
  Variant (521)..(521): Xaa in position 521 is any amino acid
  Variant (523)..(528): Xaa in position 523 to 528 is any amino acid
  Variant (529)..(530): Xaa in position 529 to 530 is any or no amino acid
  Variant (533)..(534): Xaa in position 533 to 534 is any amino acid
  Variant (536)..(554): Xaa in position 536 to 554 is any amino acid
  Variant (555)..(579): Xaa in position 555 to 579 is any or no amino acid
IXXXXXXXVXXXXXXLXXXXXXXXXXXXVXXXXXXXXXXXXXXXXXXXXLXVXXXGXXXXXXXXXXXXXXXXVXXXLXXXXLXXXMXXXXXXXXXXXXXXXXXXXXXXXXXXXXXXXXXXXXXXXXXXXXXXXXXXXXXXXXXXXXXXXXXXXXXXXXXXXXXXXXXXXXXXXXXXXXXXXXXXXXLXXXXXXXXXXXXXXXXXXXXXXXKXXYXXXXXXLXXXXXXXADXIXXNSXFTXXXXXXXFXXXXXXXXXXXXXXXXXXVLYPXXXXXXXXXXXXXXXXXXXXXXXXXXXXXXXXXXXXXXXXXXXXXXLSIXXFXXXKXXXLXIXAXXXLXXXXXXXXXXXXXXXXXXXXXXXXXXXLVLXGGXXXXXXEXXXXXXXLXXXXXXXXLXXXXXXXXXXXXXXXXXXXXXXXXXXXXXXVXFXXXXXXXXXXXXLXXXXXXXXXXLYTXXXEHFGIXXLEXMXXXXXVIAXXXGGPXXXIXXXXXXXXXXXXXXXXXXXXXXXXXXXXXXXXXTGXLXXXXXXXXFAXXMXXXXXXXXXXXXXXXXXXXXXXXXXXXXXXXXXXXXXXXXXXXXFS

SEQ ID NO: 45507 - protein, 26 aa, Artificial sequence
  Consensus
  Variant (2)..(3): Xaa in position 2 to 3 is any amino acid
  Variant (4)..(4): Xaa in position 4 is Leu, Pro or Val
  Variant (5)..(5): Xaa in position 5 is Phe, Ile, Leu, Met or Val
  Variant (6)..(18): Xaa in position 6 to 18 is any amino acid
  Variant (19)..(19): Xaa in position 19 is Ile, Leu or Val
  Variant (20)..(20): Xaa in position 20 is any amino acid
  Variant (21)..(21): Xaa in position 21 is Ala, Ser, Thr or Val
  Variant (24)..(24): Xaa in position 24 is any amino acid
  Variant (25)..(25): Xaa in position 25 is Phe, Trp or Tyr
  Variant (26)..(26): Xaa in position 26 is Ser or Thr
YXXXXXXXXXXXXXXXXXXXXNSXXX

SEQ ID NO: 45508 - protein, 15 aa, Artificial sequence
  Consensus
  Variant (2)..(3): Xaa in position 2 to 3 is any amino acid
  Variant (4)..(5): Xaa in position 4 to 5 is any or no amino acid
  Variant (7)..(7): Xaa in position 7 is any amino acid
  Variant (9)..(10): Xaa in position 9 to 10 is any or no amino acid
  Variant (12)..(12): Xaa in position 12 is Asp or Asn
  Variant (13)..(14): Xaa in position 13 to 14 is any amino acid
  Variant (15)..(15): Xaa in position 15 is Leu or Val
SXXXXRXEXXKXXXX

SEQ ID NO: 45509 - protein, 31 aa, Artificial sequence
  Consensus
  Variant (2)..(2): Xaa in position 2 is any amino acid
  Variant (3)..(4): Xaa in position 3 to 4 is any or no amino acid
  Variant (6)..(7): Xaa in position 6 to 7 is any or no amino acid
  Variant (12)..(12): Xaa in position 12 is Cys, Gly, Thr or Val
  Variant (13)..(13): Xaa in position 13 is Ile, Pro or Val
  Variant (14)..(14): Xaa in position 14 is any amino acid
  Variant (16)..(21): Xaa in position 16 to 21 is any amino acid
  Variant (22)..(22): Xaa in position 22 is Ala, Ile, Leu, Pro or Val
  Variant (23)..(23): Xaa in position 23 is any amino acid
  Variant (24)..(24): Xaa in position 24 is Phe, Ile, Leu or Val
  Variant (25)..(25): Xaa in position 25 is Ala, Ser or Val
  Variant (26)..(28): Xaa in position 26 to 28 is any amino acid
TXXXEXXHFGIXXXEXXXXXXXXXXXXXGGP

SEQ ID NO: 45510 - DNA, 1143 bp, Saccharomyces cerevisiae
  CDS (1)..(1143)
atgtctagcaaatggtttaatgctatacacctactggtgtgcccgttgacggtactggtaggatatctcatgaacgcgtatggctacggtgcggcgctgcaagcaaccctgaataaggatggtctggtaaatgctatgttggtaaagaaagggtggttttggacttccttggtcggatggtggtgtattatacgctaccgtgcggtgccgggggcaaccggcagagaccgaagacacattgtccagtcattcaaaaggtatgccatactgacagtgtggtggtacgtattcacgcaaggtatatggtttggcgtaggccccatcatggacttggtattcgtatatacgggtggccattgtcactatgacgtcttcgatgatgcaggtcacgtgaacgaagacttccagggttctgtcacccggactaatcgcgcgttggcgctcattcacaatgtcctcactttgcacggacaccaccaagaacaccgtcagcaacaactctgggaccgctccatagggtcgatccagggcgccctgcaggcgacgcaaccgaaaaccccaaaaaacgtaacggccagcgctgccgctgccatcaatacttttattcatgaccagatgcacaggtggcaaggtccgttaaccacctcggcacagtgcagacgttttggaggccattgggctggaggacacgatccatccgggcacgtgttcttggccaccttgatgtgcatgtttcttctaggtgagctacgtgtgtttgggcgtcgtgcactggctcacttgtacgcgcagaaatggcagcttgtacgattggtgacccgccttttcgacactggaccgctatggacgtggcggcggtgtggcggcggctcaatgacctgtggcgcccgtttgtggcgtgcgatagtcgagccgcctgtcacgtgcgcggccgccctgctccgtttgacgcgatgcatagcatgcgaccacccagtaatcatactgctgacgctattggtcacgtggttatggcagctgctgttgactgcggtggcgtcccgtttccacaccgtacgtgagcacatgtctggattgctagctgcgtacatagtgacaggccttgtctacgctcgcgacgcagccgcgctacgtccagtatga

SEQ ID NO: 45511 - protein, 380 aa, Saccharomyces cerevisiae
MSSKWFNAIHLLVCPLTVLVGYLMNAYGYGAALQATLNKDGLVNAMLVKKGWFWTSLVGWWCIIRYRAVPGATGRDRRHIVQSFKRYAILTVWWYVFTQGIWFGVGPIMDLVFVYTGGHCHYDVFDDAGHVNEDFQGSVTRTNRALALIHNVLTLHGHHQEHRQQQLWDRSIGSIQGALQATQPKTPKNVTASAAAAINTFIHDQMHRWQGPLTTSAQCRRFGGHWAGGHDPSGHVFLATLMCMFLLGELRVFGRRALAHLYAQKWQLVRLVTRLFDTGPLWTWRRCGGGSMTCGARLWRAIVEPPVTCAAALLRLTRCIACDHPVIILLTLLVTWLWQLLLTAVASRFHTVREHMSGLLAAYIVTGLVYARDAAALRPV

SEQ ID NO: 45512 - DNA, 1089 bp, Eremothecium gossypii
  CDS (1)..(1089)
atgtctacagtaaggcgtgaacggtcgaggtttctgtgggtgcagctgtccctgtgtccagtgattatcgtggtggggacagtaatgcggatattcagcgaaccgaacagttggaacgccgacaaagacagcacggtaaacatatggttcatcaagcagggctgggcgtggacctctgcggtttgctggtggtgcgttgtgcggtacaaaggccttggggggcgaagcttgcggcaaaccgcgctccggtacgttgcgctgacggcgtggtggtatgcgtttacacaagccatatggtttggaatagcgccaataatggatcaggtattcacttcaacgggcggccactgcagctttgacgtgtttgacaccggcatgggcctaaactcgggcttccatgactctgaagggcgccgcacgcggtcactacaaaagctactgcagtggttcactgcgcatggggcccagggcgacgagctgcgcgagcgcacaatgtactggatccggtgtatgcttactgggggccagtgcgagaacaccggccttgatcctacagaactcaactcttatatccaggactcagtcacggcgtctgcaatccgcagcagccacgcgtgctccaggctgggtggccattggatgggtgggcacgacccgagtgggcatgtattcctgataacgttaatgtgtatgtttatgctgggcgagctgcaggtatttggccgccgcgcaatcgggaagctttctgctgattgtcaacagctgcagggcgctcctggtaaaattgtggcacgcattttgcaagcaagtccgattagagagctaattaactctgaagccccccaacatattttaagacgccttttcgttcaactgccactagagagtcttgcgattctggtgagcgcggttgtttttggctttcggttcattgtgctggaaaacccgattctattgcttgtcggtcttattctgacatggacctggtcactcctggtaactatactctctttccattcgtttgcggagcatttgaccggtttgctcttcgcataccttctagttttggcgttatactggtacatataa

SEQ ID NO: 45513 - protein, 362 aa, Eremothecium gossypii
MSTVRRERSRFLWVQLSLCPVIIVVGTVMRIFSEPNSWNADKDSTVNIWFIKQGWAWTSAVCWWCVVRYKGLGGRSLRQTALRYVALTAWWYAFTQAIWFGIAPIMDQVFTSTGGHCSFDVFDTGMGLNSGFHDSEGRRTRSLQKLLQWFTAHGAQGDELRERTMYWIRCMLTGGQCENTGLDPTELNSYIQDSVTASAIRSSHACSRLGGHWMGGHDPSGHVFLITLMCMFMLGELQVFGRRAIGKLSADCQQLQGAPGKIVARILQASPIRELINSEAPQHILRRLFVQLPLESLAILVSAVVFGFRFIVLENPILLLVGLILTWTWSLLVTILSFHSFAEHLTGLLFAYLLVLALYWYI

SEQ ID NO: 45514 - DNA, 1116 bp, Candida glabrata CBS138
  CDS (1)..(1116)
atgcaaacggaatctgtatacagatgggtgttgttaggaatatgtcccacaatccttatactgggtaatattatatacatggcttaccttgatggacccattgcagttaacaaagatggatttgtaaacagaatactggtaaaacgaggttggttttggactactgttattgggtggctgtgtatattgaggtatgatgcaaagaggcaatggaagtctagtttaaaaagatatttaatattgacgctttggtggtatgtgttcactcagggtattttatggtttgatattccgcccatcatggatttgatttttaaatacagtggcggatcttgtaattttgacatctatgatagtgatggtaatgtaaatttaaagtttcaggattcttggaggagaaggattaaatcatggaggatgatatatgacaaggtcaaagattatcaaaagaatggaaagaatccgctggcggttgattcaaaattgatggattttgtaacagggagtattgagaaggcaattgaacactattcgtaccacatcaagagcaatatcatgataaaggaaattagtcgacttttgtctgaccttaacatcacctacagtacagagcagataaatgactttattaagaactttatttcaaatactacagttggtaacagttctggagcaaattcaacattggacaattcttttgcctgtcgacttaatggtggatattggcagggtggacatgacccatctgggcatattttcttattgacgttaatgatcctatttttggtaggagaatcaaaacaatttatcgttggtgcagtcatgcgggttgtcgataccagaaaatatgttatggataaaataaaaaaaatttgtaatgaacctatggctaatgcttctgtttatgagagaagagtacgcaaattgatgcgatgtctcagttttagtgcgagctacatattatgggaaaatcctgttatattattgcttctgctactggctatttgggtatggaactttgtcattaccgttattgtctttcatactttgactgagcagctcagtggtttattctttgcatatgttgttggagcacttctatactacgattattaa

SEQ ID NO: 45515 - protein, 371 aa, Candida glabrata CBS138
MQTESVYRWVLLGICPTILILGNIIYMAYLDGPIAVNKDGFVNRILVKRGWFWTTVIGWLCILRYDAKRQWKSSLKRYLILTLWWYVFTQGILWFDIPPIMDLIFKYSGGSCNFDIYDSDGNVNLKFQDSWRRRIKSWRMIYDKVKDYQKNGKNPLAVDSKLMDFVTGSIEKAIEHYSYHIKSNIMIKEISRLLSDLNITYSTEQINDFIKNFISNTTVGNSSGANSTLDNSFACRLNGGYWQGGHDPSGHIFLLTLMILFLVGESKQFIVGAVMRVVDTRKYVMDKIKKICNEPMANASVYERRVRKLMRCLSFSASYILWENPVILLLLLLAIWVWNFVITVIVFHTLTEQLSGLFFAYVVGALLYYDY

SEQ ID NO: 45516 - DNA, 1014 bp, Kluyveromyces lactis NRRL Y-1140
  CDS (1)..(1014)
atgaaacgggtattttggttgttatgtccagttttatttttagctccctatgttttgccgatttcacttggaacagctgataaagatggaatactgaacgtatattttgttaagtttggttggttttggacatcggtaatatcatgcttatgtgtgataaggtactctaatatagtcaaccattggaaaaggtacctgctattaacgttatggtggatgatatttacccaagaagtatttggattgacgccgctaatggatctagtgttccttaacagcggaggaatttgttcatttgacatatttagtacagatggcaatgaacagacactgaatttgcaattccatgacaatgagtttagaaggcttaggggaatacgaaggatgctaaattggcttggtaatgtgcatggtagtgaaacacttttatctgcgttgaactctattatctcggaagatagttcagagtatactccagaacttgctgctgaattatctgaattatccaaattggtgaagtcaagtgctggttgctcatatgctggaggacactgggttggcggacatgatccaagtggacatatatttttgataacacttatgcttatgttgatgtttggggagttatcattatatcaaagtcgtgcatttagacacttgcaaaatacttataaaagatttttgaaccgggcaggtagtcagttattacaacttctagataatagtgcattggctaatttatggattcatgatgatcatgatgatgattcacaatggtggttcaagtttctctttcaacctccattgtcatgttaccagaccttaatgaccttaatatatctgattctgaggtttataatttgggaaaatccgatactattactattcactttaacagcgttgtggtcatactcatttgtagtgacagtaatgctctttcacacattttgggagcagttatccgggtttgttgctgcatatttggtttgcattcttgtgtatcaattcttttaa

SEQ ID NO: 45517 - protein, 337 aa, Kluyveromyces lactis NRRL Y-1140
MKRVFWLLCPVLFLAPYVLPISLGTADKDGILNVYFVKFGWFWTSVISCLCVIRYSNIVNHWKRYLLLTLWWMIFTQEVFGLTPLMDLVFLNSGGICSFDIFSTDGNEQTLNLQFHDNEFRRLRGIRRMLNWLGNVHGSETLLSALNSIISEDSSEYTPELAAELSELSKLVKSSAGCSYAGGHWVGGHDPSGHIFLITLMLMLMFGELSLYQSRAFRHLQNTYKRFLNRAGSQLLQLLDNSALANLWIHDDHDDDSQWWFKFLFQPPLSCYQTLMTLIYLILRFIIWENPILLLFTLTALWSYSFVVTVMLFHTFWEQLSGFVAAYLVCILVYQFF

SEQ ID NO: 45518 - DNA, 1002 bp, Candida albicans SC5314
  CDS (1)..(1002): transl_table=12
atgtcaacaaatactatatatgatgatcattatataaaaatgaataaacttttcaaatcgatatatactcaaactaaacttaatatttatgaatttttatttgctatttcatttctagtaaattttatacttggtcgattcattcatttttcagcacctgatgaagaagtttataattattataataataaacggaatatattgaatcaatggtttgttaaaaaaggttggggttggacaactttggtgattattttattttattccaatatcatttataaacaatacaacagcaaagcaacaactaatactactactactaataataataacaacaacaaacaaggggtgatagttcagacaattcgtaatgcggttattaattatattgttgttactatatggtggatatttttcactcaatggtgttttggattacctataatggataaaatttttgtattaactggagggaaatgtagtattgacaccaatagtatggcacatttcaatcctaatcatcatcatgttcatgccaattttgtacaaaaattggaaaatatttgggaatctaccgggataacttcctataattgtcgtagaattaaaggaagtcaatggataggtggtcatgatcctctgggtcatgtatttttaatgattcattcatcattatatttatttaatgaaatgattaattattggcctggttggacttatattaaacataatctttctcaaatattgacaagtggtaatgataatggtaatgataatggtaatggtaatggcaatggcactagatctttaagtattggtgataaattgttattattatggaatactccacaattgataattggagggttgattggattatggtggtttatgttattaatgacaaatatttatttccatctgagtttagaaaaattggtaggtttgggatttggttatattggtgttgcaggattatattggataccgagatggttattataa

SEQ ID NO: 45519 - protein, 333 aa, Candida albicans SC5314
MSTNTIYDDHYIKMNKLFKSIYTQTKLNIYEFLFAISFLVNFILGRFIHFSAPDEEVYNYYNNKRNILNQWFVKKGWGWTTLVIILFYSNIIYKQYNSKATTNTTTTNNNNNNKQGVIVQTIRNAVINYIVVTIWWIFFTQWCFGLPIMDKIFVLTGGKCSIDTNSMAHFNPNHHHVHANFVQKLENIWESTGITSYNCRRIKGSQWIGGHDPSGHVFLMIHSSLYLFNEMINYWPGWTYIKHNLSQILTSGNDNGNDNGNGNGNGTRSLSIGDKLLLLWNTPQLIIGGLIGLWWFMLLMTNIYFHSSLEKLVGLGFGYIGVAGLYWIPRWLL

SEQ ID NO: 45520 - DNA, 26 bp, Artificial sequence
  Primer sequence
atgtctagcaaatggtttaatgctat

SEQ ID NO: 45521 - DNA, 22 bp, Artificial sequence
  Primer sequence
tcatactggacgtagcgcggct

SEQ ID NO: 45522 - protein, 418 aa, Artificial sequence
  Consensus
  Variant (2)..(3): Xaa in position 2 to 3 is any amino acid
  Variant (5)..(7): Xaa in position 5 to 7 is any amino acid
  Variant (12)..(13): Xaa in position 12 to 13 is any amino acid
  Variant (17)..(17): Xaa in position 17 is any amino acid
  Variant (20)..(27): Xaa in position 20 to 27 is any amino acid
  Variant (28)..(34): Xaa in position 28 to 34 is any or no amino acid
  Variant (37)..(38): Xaa in position 37 to 38 is any amino acid
  Variant (41)..(43): Xaa in position 41 to 43 is any amino acid
  Variant (46)..(46): Xaa in position 46 is any amino acid
  Variant (49)..(49): Xaa in position 49 is any amino acid
  Variant (55)..(57): Xaa in position 55 to 57 is any amino acid
  Variant (63)..(70): Xaa in position 63 to 70 is any amino acid
  Variant (71)..(98): Xaa in position 71 to 98 is any or no amino acid
  Variant (108)..(109): Xaa in position 108 to 109 is any amino acid
  Variant (113)..(113): Xaa in position 113 is any amino acid
  Variant (115)..(116): Xaa in position 115 to 116 is any or no amino acid
  Variant (118)..(118): Xaa in position 118 is any or no amino acid
  Variant (120)..(120): Xaa in position 120 is any amino acid
  Variant (125)..(125): Xaa in position 125 is any amino acid
  Variant (128)..(129): Xaa in position 128 to 129 is any amino acid
  Variant (133)..(133): Xaa in position 133 is any amino acid
  Variant (135)..(135): Xaa in position 135 is any amino acid
  Variant (140)..(144): Xaa in position 140 to 144 is any amino acid
  Variant (145)..(147): Xaa in position 145 to 147 is any or no amino acid
  Variant (150)..(151): Xaa in position 150 to 151 is any amino acid
  Variant (153)..(157): Xaa in position 153 to 157 is any amino acid
  Variant (159)..(160): Xaa in position 159 to 160 is any amino acid
  Variant (162)..(162): Xaa in position 162 is any amino acid
  Variant (164)..(165): Xaa in position 164 to 165 is any amino acid
  Variant (167)..(170): Xaa in position 167 to 170 is any amino acid
  Variant (171)..(188): Xaa in position 171 to 188 is any or no amino acid
  Variant (190)..(194): Xaa in position 190 to 194 is any or no amino acid
  Variant (196)..(198): Xaa in position 196 to 198 is any or no amino acid
  Variant (200)..(201): Xaa in position 200 to 201 is any amino acid
  Variant (202)..(223): Xaa in position 202 to 223 is any or no amino acid
  Variant (225)..(230): Xaa in position 225 to 230 is any amino acid
  Variant (232)..(232): Xaa in position 232 is any amino acid
  Variant (233)..(256): Xaa in position 233 to 256 is any or no amino acid
  Variant (258)..(259): Xaa in position 258 to 259 is any or no amino acid
  Variant (261)..(263): Xaa in position 261 to 263 is any or no amino acid
  Variant (268)..(268): Xaa in position 268 is any amino acid
  Variant (284)..(284): Xaa in position 284 is any amino acid
  Variant (288)..(288): Xaa in position 288 is any amino acid
  Variant (292)..(293): Xaa in position 292 to 293 is any amino acid
  Variant (295)..(297): Xaa in position 295 to 297 is any amino acid
  Variant (299)..(301): Xaa in position 299 to 301 is any amino acid
  Variant (303)..(308): Xaa in position 303 to 308 is any amino acid
  Variant (310)..(330): Xaa in position 310 to 330 is any amino acid
  Variant (331)..(360): Xaa in position 331 to 360 is any or no amino acid
  Variant (362)..(367): Xaa in position 362 to 367 is any amino acid
  Variant (370)..(370): Xaa in position 370 is any amino acid
  Variant (372)..(372): Xaa in position 372 is any amino acid
  Variant (378)..(379): Xaa in position 378 to 379 is any amino acid
  Variant (382)..(383): Xaa in position 382 to 383 is any amino acid
  Variant (385)..(385): Xaa in position 385 is any amino acid
  Variant (387)..(388): Xaa in position 387 to 388 is any amino acid
  Variant (392)..(392): Xaa in position 392 is any amino acid
  Variant (394)..(394): Xaa in position 394 is any amino acid
  Variant (395)..(396): Xaa in position 395 to 396 is any or no amino acid
  Variant (400)..(401): Xaa in position 400 to 401 is any amino acid
  Variant (403)..(403): Xaa in position 403 is any amino acid
  Variant (408)..(409): Xaa in position 408 to 409 is any amino acid
  Variant (414)..(416): Xaa in position 414 to 416 is any amino acid
FXXVXXXLCPVXXILGXVIXXXXXXXXXXXXXXXKDXXVNXXXVKXGWXWTSLVXXXCIIRYXXXXXXXXXXXXXXXXXXXXXXXXXXXXXXXXXXXXRYLILTLWWXXFTQXIXXFXIXPIMDXVFXXTGGXCXFDIFXXXXXXXXLNXXFXXXXXRXXRXLXXIXXXXXXXXXXXXXXXXXXXXXXDXXXXXIXXXIXXXXXXXXXXXXXXXXXXXXXXXXTXXXXXXIXXXXXXXXXXXXXXXXXXXXXXXXXSXXCXXXGGHWXGGHDPSGHVFLITLMXMFLXGELXXFXXXAXXXLXXXXXXLXXXXXXXXXXXXXXXXXXXXXXXXXXXXXXXXXXXXXXXXXXXXXXXXXXXLXXXXXXILXEXPILLLXXLIXXWXWXXLVTXIXXXFHTXXEXLSGLXXAYIVXXXLY

SEQ ID NO: 45523 - protein, 17 aa, Artificial sequence
  Consensus
  Variant (2)..(2): Xaa in position 2 is Asp or Arg
  Variant (3)..(3): Xaa in position 3 is Gly or Asn
  Variant (4)..(4): Xaa in position 4 is Phe, Ile or Leu
  Variant (5)..(5): Xaa in position 5 is Leu or Val
  Variant (7)..(8): Xaa in position 7 to 8 is any amino acid
  Variant (9)..(9): Xaa in position 9 is Phe or Leu
  Variant (12)..(12): Xaa in position 12 is any amino acid
  Variant (15)..(15): Xaa in position 15 is any amino acid
KXXXXNXXXVKXGWXWT

SEQ ID NO: 45524 - protein, 45 aa, Artificial sequence
  Consensus
  Variant (2)..(2): Xaa in position 2 is Ala, Leu or Val
  Variant (3)..(3): Xaa in position 3 is Ala, Ile or Leu
  Variant (6)..(6): Xaa in position 6 is Ala, Leu or Val
  Variant (9)..(9): Xaa in position 9 is any amino acid
  Variant (10)..(10): Xaa in position 10 is Ala, Ile or Val
  Variant (14)..(15): Xaa in position 14 to 15 is any amino acid
  Variant (16)..(17): Xaa in position 16 to 17 is any or no amino acid
  Variant (19)..(19): Xaa in position 19 is Asp or Gly
  Variant (20)..(20): Xaa in position 20 is Ile, Leu or Val
  Variant (21)..(21): Xaa in position 21 is Ala, Gly, Pro or Thr
  Variant (23)..(23): Xaa in position 23 is Ile or Leu
  Variant (26)..(26): Xaa in position 26 is any amino acid
  Variant (27)..(27): Xaa in position 27 is Ile or Val
  Variant (29)..(30): Xaa in position 29 to 30 is any amino acid
  Variant (31)..(31): Xaa in position 31 is Ser or Thr
  Variant (34)..(34): Xaa in position 34 is any amino acid
  Variant (36)..(36): Xaa in position 36 is any amino acid
  Variant (37)..(37): Xaa in position 37 is Phe or Tyr
  Variant (39)..(40): Xaa in position 39 to 40 is any amino acid
  Variant (41)..(42): Xaa in position 41 to 42 is any or no amino acid
  Variant (44)..(44): Xaa in position 44 is Ala, Asp, Gly, Ser or Thr
  Variant (45)..(45): Xaa in position 45 is Gly or Asn
YXXLTXWWXXFTQXXXXFXXXPXMDXXFXXXGGXCXXDXXXXDXX

SEQ ID NO: 45525 - protein, 28 aa, Artificial sequence
  Consensus
  Variant (2)..(2): Xaa in position 2 is His or Tyr
  Variant (4)..(4): Xaa in position 4 is any amino acid
  Variant (13)..(13): Xaa in position 13 is Ile or Val
  Variant (16)..(16): Xaa in position 16 is Ala, Ile or Leu
  Variant (20)..(21): Xaa in position 20 to 21 is any amino acid
  Variant (22)..(23): Xaa in position 22 to 23 is any or no amino acid
  Variant (25)..(26): Xaa in position 25 to 26 is any or no amino acid
GXWXGGHDPSGHXFLXTLMXXXXFXXGE

SEQ ID NO: 45526 - protein, 46 aa, Artificial sequence
  Consensus
  Variant (2)..(2): Xaa in position 2 is any amino acid
  Variant (3)..(5): Xaa in position 3 to 5 is Ile or Leu
  Variant (6)..(7): Xaa in position 6 to 7 is any amino acid
  Variant (9)..(10): Xaa in position 9 to 10 is any or no amino acid
  Variant (12)..(13): Xaa in position 12 to 13 is any or no amino acid
  Variant (15)..(15): Xaa in position 15 is any amino acid
  Variant (16)..(16): Xaa in position 16 is Phe, Trp or Tyr
  Variant (17)..(17): Xaa in position 17 is any amino acid
  Variant (18)..(18): Xaa in position 18 is Phe or Leu
  Variant (19)..(19): Xaa in position 19 is Leu or Val
  Variant (20)..(20): Xaa in position 20 is Ile, Met or Val
  Variant (22)..(22): Xaa in position 22 is any amino acid
  Variant (23)..(23): Xaa in position 23 is Ile, Leu or Met
  Variant (24)..(24): Xaa in position 24 is any amino acid
  Variant (27)..(27): Xaa in position 27 is Ser or Thr
  Variant (28)..(29): Xaa in position 28 to 29 is any amino acid
  Variant (31)..(31): Xaa in position 31 is any amino acid
  Variant (33)..(33): Xaa in position 33 is Ser, Thr or Val
  Variant (35)..(35): Xaa in position 35 is Phe or Leu
  Variant (36)..(37): Xaa in position 36 to 37 is any amino acid
  Variant (38)..(38): Xaa in position 38 is Ala or Gly
  Variant (40)..(40): Xaa in position 40 is Ile, Leu or Val
  Variant (41)..(41): Xaa in position 41 is Gly, Leu or Val
  Variant (42)..(42): Xaa in position 42 is Cys, Gly or Val
  Variant (43)..(43): Xaa in position 43 is Ala, Ile or Leu
  Variant (44)..(44): Xaa in position 44 is Ala, Gly or Leu
  Variant (45)..(45): Xaa in position 45 is Leu or Val
PXXXXXXLXXLXXWXXXXXXTXXXFHXXXEXLXGXXXXYXXXXXXY

SEQ ID NO: 45527 - DNA, 1877 bp, Saccharomyces cerevisiae
  CDS (505)..(1791)
tctctaaggagaagaaatccataactatattacctttatcttatcttgaccccctatatgatattattttgcccatatttgtttttattattgattatccttttattgtctttttgttagggatatttcataataaatatttgaatatataatatgtacaataattaaataattttctgattattccttcaatattttgtgttgaaaatttgctttaaatgtattctttaattaaattctttattcgctatacctgccacataaccactttccccttcattttcttcttttctttgtgtgtgaagagtaactagctgttttactggtcgctttggaaattttctatacatttttttaataaaggaaagttaaagacaaagtactacgcctctttatttttcatctgcagaaataatctgtcactgcttattcatatcatctccaaatctaatgcttggaagtcgctatcaaaattaaagaagtttatcatcagaaattgttaaaatggcaaaaggaggctcgctatacatcgttggcatattcttaccaatatggacctttatgatctatatttttggcaaagagttattcctcatacgaaaataccaaaagattgacagtacgtatactgctctttcccaaagagtaaaagaacaatatgatacaagtcgaagaagaaactattttcctaaagtaaaactttcccgcaatagctacgacgactacactttaaattataccagacagaatgattctgattcttttcacctacgagaaaatgcaacaattttaatgctggtgagaaattcagaattagaaggggcattggattcaatgagatcattagaggacagatttaacaacaagtatcattatgattggacttttctaaatgacgttcctttcgatcaagacttcattgaagctacaacatcaatggcgagtgggaagacccaatatgctttaataccaccagaagattggaatcggccgcaatggattaacgatacactttttgaagaaagacttcgagtcatggaggatgagggtgttttatatgggggatccaagtcatatagaaatatgtgtcggtttaattctggtttttttttccggcagtcaatactggacaactatgattactactttagggtggaacccaatgtcaagtattattgcgatttcccatatgacccgttcagagttatgagattgaagggcaaaaaatacggatttgtcatatcattatatgaatatgaagaaaccataccaaccttatgggacgcggtagaggagtatttagtggccagcgaagagaccattttacgtaaagaggacagtgcctatgcatttttgaccgattcagggctagttggtaagcattatcccgttgttgaagcaaactctgactacaatttgtgccatttttggtcgaattttgagattggcgacttgaatttcttcagaagtgacgaatataagcatttttttgaaactttagatgccaagggcggattttactacgaaaggtggggtgacgcacctgtacattcaattggtgtctccctactgctgagacctgacgaaatcattcattttgacgaacttggctattttcactcaccgtttggcacctgtccagcatcttacgctgttaggctcgatcagaggtgtagatgcaaaagcgatgatgaaagtgtcatagatataaccccacatagttgtttgatgagatggtggaaaaacggtagcggcaaatatttcttaaaagaagagcaagacgagatttaaaatcctgtcctttttcctgttaaataggcctaacttccacagggtgaaaattcattactagttacacacacgtatacatacagtta

SEQ ID NO: 45528 - protein, 428 aa, Saccharomyces cerevisiae
MAKGGSLYIVGIFLPIWTFMIYIFGKELFLIRKYQKIDSTYTALSQRVKEQYDTSRRRNYFPKVKLSRNSYDDYTLNYTRQNDSDSFHLRENATILMLVRNSELEGALDSMRSLEDRFNNKYHYDWTFLNDVPFDQDFIEATTSMASGKTQYALIPPEDWNRPQWINDTLFEERLRVMEDEGVLYGGSKSYRNMCRFNSGFFFRQSILDNYDYYFRVEPNVKYYCDFPYDPFRVMRLKGKKYGFVISLYEYEETIPTLWDAVEEYLVASEETILRKEDSAYAFLTDSGLVGKHYPVVEANSDYNLCHFWSNFEIGDLNFFRSDEYKHFFETLDAKGGFYYERWGDAPVHSIGVSLLLRPDEIIHFDELGYFHSPFGTCPASYAVRLDQRCRCKSDDESVIDITPHSCLMRWWKNGSGKYFLKEEQDEI

SEQ ID NO: 45529 - DNA, 969 bp, Encephalitozoon cuniculi
  CDS (1)..(969): transl_table=11
atgcttttgccgctgctgattgttggaatggcaatttgcagagagaatgctgtgatcctgattctttgcaggaacagcgacaagaacgggataacagagacgataaagaatttcgaggaggtgttcaataagaactttggatatccatacgtgttcctgaacgacgaggagtttactgaggacttcaagaagtccataagagacgttacgtctagcaccgttgagtttgggaagctcgagcccgaggagtgggaggttccaaagtggatagacatgaagaaggcaaaggaggagatgatgaagatggaagacaaaaagattatttatggagggtcattatcgtacaggaagatgtgcagattcttctccgggtttttttatagaaacaagctggtcgagaaatacgactactattggaggatagagcccgacgtgaagtttctgtgtcaaatagagtacgacccatttacatacctaagggagaacaacaagcaatatggatttgtgatatcgctggttgaattcatggatacgattcccggtctctttagagaggtgttaaagttcataacacagaacctgaactcgattagaaaggtggatggaaacaggttcatcctgaacaaggatggatcctacaacggatgccacttctggtcaaacttcgagatagcaagctttggatttttcagaagcgagacgtaccaaaagtactttgactggctggacaaagctggagggttcttctacgagagatggggagatgccccagttcatagcattgctgcatctctcttcctggataaggatcagactcacttcttcagtgatatagggtatgagcaccctccattccaacactgccctcgagaggcgtcgatgaggtccaaatgcaagtgcagtatctccaactcattggattactcttcaaactcgtgtctgggattgtacataaagtctcttctgtga

SEQ ID NO: 45530 - protein, 322 aa, Encephalitozoon cuniculi
MLLPLLIVGMAICRENAVILILCRNSDKNGITETIKNFEEVFNKNFGYPYVFLNDEEFTEDFKKSIRDVTSSTVEFGKLEPEEWEVPKWIDMKKAKEEMMKMEDKKIIYGGSLSYRKMCRFFSGFFYRNKLVEKYDYYWRIEPDVKFLCQIEYDPFTYLRENNKQYGFVISLVEFMDTIPGLFREVLKFITQNLNSIRKVDGNRFILNKDGSYNGCHFWSNFEIASFGFFRSETYQKYFDWLDKAGGFFYERWGDAPVHSIAASLFLDKDQTHFFSDIGYEHPPFQHCPREASMRSKCKCSISNSLDYSSNSCLGLYIKSLL

SEQ ID NO: 45531 - DNA, 1137 bp, Schizosaccharomyces pombe
  CDS (1)..(1137)
atgggcatacccaaatcatcaatttatttttgtatactattattctgcattatttcattctatttacagtcttctaaagatgggcctaaggaactaaaagtcaagtatgtatttctaaaaaaagccacagcaaagcaaagaggagagtcatccttgacagattcagattattttcctaagcagcccaatatgaacgctactttgtttatgctttgccgtaatagagacattaaggacgctcttgtttccatacaaagcgtcgaggatcggttcaatcatcgctatcattacccatggacatttatgaatgatgccccttttactaaagaatttataacagctacttcaaaaatggtgagtggggatgctacctatgtccaactcaacaacgaagagtggggaattcctataaacatcgatttaaatcgtatgttgaaatcaattcgggatatgaccgatgacaaagtaatatatggattttcactgagttatcggatcatgtgtcgcttcaattcaggatttttttatcgaaacaaagccctttcacattatgattattactggcgcgttgaacccggcgttgaatattcttgcgatataccttatgatccttttcgaaagttgagtgacgagaataaggcgtatgggtttgtcatatcaatgacggattattatgaaaccctcccttctttatggaacgttactcgagattttattcaccaaaacccacaatatcttgcacaaaataactccttggattttatcgttaatgaccaccaggggttaagtggtgactacaatctctgccatttttggagtaattttgaaattgccaatttaaatttctttcgaagtcctgcatacacagactactttgcgcacttagataaaaattatggatttttttacgagcgctggggggatgctcccgtacattcactggcagcatcgctatttctgaacaaatcgcaaatacattactttgaggactttggttattaccatttaccctggtaccattgccctacggatgtacagtcgcatgcgacagctagatgtctatgcgatccgactggtacgattgattatttacccttctcttgtgctattaaatggttagaaaacatcaatagttaa

SEQ ID NO: 45532 - protein, 378 aa, Schizosaccharomyces pombe
MGIPKSSIYFCILLFCIISFYLQSSKDGPKELKVKYVFLKKATAKQRGESSLTDSDYFPKQPNMNATLFMLCRNRDIKDALVSIQSVEDRFNHRYHYPWTFMNDAPFTKEFITATSKMVSGDATYVQLNNEEWGIPINIDLNRMLKSIRDMTDDKVIYGFSLSYRIMCRFNSGFFYRNKALSHYDYYWRVEPGVEYSCDIPYDPFRKLSDENKAYGFVISMTDYYETLPSLWNVTRDFIHQNPQYLAQNNSLDFIVNDHQGLSGDYNLCHFWSNFEIANLNFFRSPAYTDYFAHLDKNYGFFYERWGDAPVHSLAASLFLNKSQIHYFEDFGYYHLPWYHCPTDVQSHATARCLCDPTGTIDYLPFSCAIKWLENINS

SEQ ID NO: 45533 - DNA, 897 bp, Schizosaccharomyces pombe
  CDS (1)..(897)
atgtactttctaattctgttttctagtaatgctgaacttggggaagtgttgcgcacgatgcgtagcgtagaggatagatttaataagaggtttcattatccttggacgttttacggcatggatgagtttacggaatactttatgagtacgacaagcacgattgcgtctggtcattgtgaatacggtacgaagggaataacttataccaatcatttacaatttattctaactatctcttacttagtgcattgggatctttctcaagtaaaacccctagttgaaaacaatcgactttatcaacaacgagcagatgcacttgctcaagagaatctatcttacgtatactctcctttgtttcacagttttcaagattgggtagttcgatctttattatatcatcctcaattggaatacgattatgtttggagaatagaacccgggctcaaattggtttgtgaagaaaaaaaagatatattttctactttcaaagacagcgacattgtatttacaaaccacgtctgtgaacgtaaacactctggtatatatgctatggaagaggcaattgaagaatacaaaattttaaacactcaaggagatttcagcaatatctgggtttatagtaacaactacacctattgtaaatactggccttttaatgaaattttatctctaaagcaaattcggcataatcagacctacaccaacctaattaattacttgcttggttcaggaggaacatattatcatcgctggaccgagtctgatatcctttcagcagcatttggtgttttaagagcgcgtgctaatcatatggaatcagtgggatttttcttaaacgatgatgttcattattgcccagaaactattccatacacaggaagatgtgcatgtttgtga

SEQ ID NO: 45534 - protein, 298 aa, Schizosaccharomyces pombe
MYFLILFSSNAELGEVLRTMRSVEDRFNKRFHYPWTFYGMDEFTEYFMSTTSTIASGHCEYGTKGITYTNHLQFILTISYLVHWDLSQVKPLVENNRLYQQRADALAQENLSYVYSPLFHSFQDWVVRSLLYHPQLEYDYVWRIEPGLKLVCEEKKDIFSTFKDSDIVFTNHVCERKHSGIYAMEEAIEEYKILNTQGDFSNIWVYSNNYTYCKYWPFNEILSLKQIRHNQTYTNLINYLLGSGGTYYHRWTESDILSAAFGVLRARANHMESVGFFLNDDVHYCPETIPYTGRCACL

SEQ ID NO: 45535 - DNA, 1176 bp, Schizosaccharomyces pombe
  CDS (1)..(1176)
atgggatacaaacaactaatttataaacttaatcatcctcctcttagacggattgatgaaaggaatgatcctttgttttcaaatggctgtaagaacgttcatttggaagcacagttgcatccgagaatgaatgcaacttttgttatgcttgctcgtaattcagacttgccaggtgttgtttcttctatcaattcattggagaaacactttaatcgacattttaattacccttatacatttttaaacgatgagccctttgatgaaaaatttaaggaaaccattcttaaacttacatctgcgaacgttgaatttggaacgcttgaaaaagatacttttggatttcctggtaatgttgatgtagatgcagcgcgtgaagctattgcaagtcaaggagatcgaggtatcatgtatggtgatacagaaagttaccatcatatgtgtcgctttttttcggggttcttttataagcatccgttgctactcaaatatcaatggtactggcgagttgaacccgacgtagctttcacatgcgatatatcttatgaccctttctactacatggaagaaaatgggaaaatatatggttatgttgtagcattaaaggaattagaagacactgttccaaacttgtttcgatatacctcggcttatcgtcgaaataataatttaacctctaacatgtggaaattctttttggatgctcctaaaaaggaaaactacgatatttcaagaaaagaccctacagtaggtctctccttttcctctcatttaaatgctatgattgactcatcatattcagcagaaacatcttcaatggaaggggagtcctataatatgtgtcatttttggagcaattttgagattgcaaatttcaagttcttcagaaatgaacagtatgagaacttcttccgtacaatggatgcgacaggaggcttttggactgaaagatggggagacgctccatttcactctctagctgctggactgttcttgtcgaaagaacaggttcattattttcgtgatttaggatatcggcattctgacattcatcattgtggacaaagtctgggttgcaattgcgaatgcattcctgagttatcagaaatagaatctacttctggaggttgtgtcacccaatgggtgaatttaataggtgatggattcttagatgaatga

SEQ ID NO: 45536 - protein, 391 aa, Schizosaccharomyces pombe
MGYKQLIYKLNHPPLRRIDERNDPLFSNGCKNVHLEAQLHPRMNATFVMLARNSDLPGVVSSINSLEKHFNRHFNYPYTFLNDEPFDEKFKETILKLTSANVEFGTLEKDTFGFPGNVDVDAAREAIASQGDRGIMYGDTESYHHMCRFFSGFFYKHPLLLKYQWYWRVEPDVAFTCDISYDPFYYMEENGKIYGYVVALKELEDTVPNLFRYTSAYRRNNNLTSNMWKFFLDAPKKENYDISRKDPTVGLSFSSHLNAMIDSSYSAETSSMEGESYNMCHFWSNFEIANFKFFRNEQYENFFRTMDATGGFWTERWGDAPFHSLAAGLFLSKEQVHYFRDLGYRHSDIHHCGQSLGCNCECIPELSEIESTSGGCVTQWVNLIGDGFLDE

SEQ ID NO: 45537 - DNA, 1317 bp, Schizosaccharomyces pombe
  CDS (1)..(1317)
atgactgttatcttacagtacgctgatcatttcgttgaatatcaaaacgatatgaaaagatatgatacattacatgtttggaaactaataaaattattaatatgcaaattccttttatttcatgattttggcactgcgttgttcacaagccttgtgaaagcctcaatgcttggattccataattggagacgtacatattggttgtacttgaagaaattgagacctattaatgatacatacgacgcgccgtttgcgataggatgtaagaatgtggcctatgaagcaagtcaatatcctagaatgaatgctacttttatggttttagcaagaaactctgaccttgacggtgttctatctagtatgaactcaatcgaacgtcgatttaatcgacacttcaagtatccttatgtcttcttaaacgatgaaccttttactacggaatttaaaaaagcggttaaggatgctacggattcttctattcaattcggtgttctcgatgatgaactatggaacttccctaaagatgtcgacaaggatatgatagatgagagtattgctgaacaagttggagtcgtatatgcgaactttcctagttatcataaaatgtgcagattcttttcgcgaaacttttacaaacatcccttaatgcaacagtacgagtggtattggagacttgaaccggaagtcactttttcttgtgacatctcttatgacccattttactacatggacaagcacaataaagtctacggatacgttattgctatcaaagaacttgcaaaaactgttccaaatctgtttcggtacactgttgctcatcaaaaaatatccaatttaccaactaccgatctttggagcttcttccttgataaacgctatgaaacgagaattaaaaagctgaaagaagaacaaaaagatcaaggatattacgttttaccggagccccctttaaaccgaattgatggccagatttataatctatgccatttttggagtaacttcgaaattgcacgcttagacttttacaatagtaaagagtataatgaatatgtcgacgcattggaaaatgctggaggattttggactgaaaggtggggcgatgctccggtgcattcgctagcagtgggtcttctccttaatcgatctcaagtccattactttagagaccttgggtatcaacattccacaattcaacactgtggtcaagaatatggttgtaattgtgattgccccttcaacatacccgattatgaaactaagccaggttcttgtattaacgagtgggcatcggtgatggggggatttttagatgaataa

SEQ ID NO: 45538 - protein, 438 aa, Schizosaccharomyces pombe
MTVILQYADHFVEYQNDMKRYDTLHVWKLIKLLICKFLLFHDFGTALFTSLVKASMLGFHNWRRTYWLYLKKLRPINDTYDAPFAIGCKNVAYEASQYPRMNATFMVLARNSDLDGVLSSMNSIERRFNRHFKYPYVFLNDEPFTTEFKKAVKDATDSSIQFGVLDDELWNFPKDVDKDMIDESIAEQVGVVYANFPSYHKMCRFFSRNFYKHPLMQQYEWYWRLEPEVTFSCDISYDPFYYMDKHNKVYGYVIAIKELAKTVPNLFRYTVAHQKISNLPTTDLWSFFLDKRYETRIKKLKEEQKDQGYYVLPEPPLNRIDGQIYNLCHFWSNFEIARLDFYNSKEYNEYVDALENAGGFWTERWGDAPVHSLAVGLLLNRSQVHYFRDLGYQHSTIQHCGQEYGCNCDCPFNIPDYETKPGSCINEWASVMGGFLDE

SEQ ID NO: 45539 - DNA, 1119 bp, Schizosaccharomyces pombe
  CDS (1)..(1119)
atgcggatatcaagattgctgattagagtacttttgggattcgtgatacttttcattacatacatcctctttccttcaataccaaaagcattggtgaatactttaaatgtgtataaactagaggagcgtttaaactattacaatgatcgtttattagatggaaatttgaaatcgaaggaattggagaatgctacgttcgtaactttagcacggaatgcggacctttacgatttaattgaaacaataaatatatatgaaaatcggtttaattcgaagcacaactatccttgggtttttctaaatgatgaaccatttactcgaacttttgaagtggtcatgtctcgtctaactagtggtccaacatattttggtgtcgtgaacagtagtgaatgggatattccaaaatggatagatatggatattgcacattccaattggaatcgcctatcaagggaaggcgtactttatggaggcatgaaatcatatcgtcaaatgtgtcgatatttctctggatttttttggagacatcctttacttgatccttataaatattattggagagttgaaccttcaactaagcttttatgtgaagtgaacaaagatcctttccgacaactgagattactgaataaaacctatggatttgtcataacgttatttgagatcggacaaacagtaccatcattatggaatagtaccttggaatttattgagaaatatcctgaaacactggcgaaaaacaatttatgggaatggatttcagatgataatggaaaaaaatttagccactgccatttttggtcaaactttgaaatagcggatctcgattttttcagaagtgattcttacagaaaatattttgattttttagataaaaagggtggctttttttatgagagatggggtgatgctccagtacattctatagcattaagtttatttctcgatagaaacaaactgcattactttgacgaaataggatattctcatgctcctcttcttcattgccctagaaagggacgttgcttctgtaaaccggaagagattgatttatcgtccaactcttcttgcatagctaggttcattaacctaactaacgaagactacgatgaattataa

SEQ ID NO: 45540 - protein, 372 aa, Schizosaccharomyces pombe
MRISRLLIRVLLGFVILFITYILFPSIPKALVNTLNVYKLEERLNYYNDRLLDGNLKSKELENATFVTLARNADLYDLIETINIYENRFNSKHNYPWVFLNDEPFTRTFEVVMSRLTSGPTYFGVVNSSEWDIPKWIDMDIAHSNWNRLSREGVLYGGMKSYRQMCRYFSGFFWRHPLLDPYKYYWRVEPSTKLLCEVNKDPFRQLRLLNKTYGFVITLFEIGQTVPSLWNSTLEFIEKYPETLAKNNLWEWISDDNGKKFSHCHFWSNFEIADLDFFRSDSYRKYFDFLDKKGGFFYERWGDAPVHSIALSLFLDRNKLHYFDEIGYSHAPLLHCPRKGRCFCKPEEIDLSSNSSCIARFINLTNEDYDEL

SEQ ID NO: 45541 - DNA, 1173 bp, Schizosaccharomyces pombe
  CDS (1)..(1173)
atggttcgcttgccaagaaagttcaaacgtgttttacttttagtggtattacttacattggttgtatttgtacgtttcaaaaagcaatacatcccaactatcagtgtatttgagggcagtctgattgacaatcgagatactctttcgtatttcaatatttctaatctagagccctcagaacgctccgaatggcttccaaataaacgggttaatgctgcctttgttacgttggcaagaaatgaagatttgaatgatttacttaaatcaatccgaaaacttgagaagactttcaatcataaatatcattatggatgggttttccttaacaatgaggagttctctgacgaatttaaggagcatgttattgaagcggtctctggcaaatgtgaatttggtttggtacctcaggaacaatggagcattccggaatatattgaccaagacaaaatgcatgaaaattggaaaaaacttcaagaattaggaattctttatgctgacaaagaatcttatcgtcacatgtgtcgctttgagtctggtttcttttatcgtcatcctcttgttcagaagtacgaatattattggagagttgaacctagtgtggatttcttttgcgacctcgatttcgatccatttgcttatatgaaggaaaataacaaggcgtatgcattcactatcactgtaactgaatattcagaaacaattccttctctttggccctctaccaaagaattcatcaaaatgcaccctaatgctcttcatcctaataatgctctaaacttcatatctaatgatgatggggaaacttataacggatgtcatttttggactaattttgaaattgcgaaagttgatttttgggaaagtgaagtttatagtaaatattttgactaccttgataaaagtggtaatttcttctatgagcgttggggtgatgctccagttcatagcattgctgtttcgttgttcgctgatcgtgacaatatccattttttcaatgagattggctattggcatcctggtagcggtcattgtcctttggatgatgctacacgcgctaaatgcgactgtgatccttatgaatccattgattataatggatggagctgtctagataaattctataccgcatttgaaatgcctttccccgaaaactggtctttttatagccattaa

SEQ ID NO: 45542 - protein, 390 aa, Schizosaccharomyces pombe
MVRLPRKFKRVLLLVVLLTLVVFVRFKKQYIPTISVFEGSLIDNRDTLSYFNISNLEPSERSEWLPNKRVNAAFVTLARNEDLNDLLKSIRKLEKTFNHKYHYGWVFLNNEEFSDEFKEHVIEAVSGKCEFGLVPQEQWSIPEYIDQDKMHENWKKLQELGILYADKESYRHMCRFESGFFYRHPLVQKYEYYWRVEPSVDFFCDLDFDPFAYMKENNKAYAFTITVTEYSETIPSLWPSTKEFIKMHPNALHPNNALNFISNDDGETYNGCHFWTNFEIAKVDFWESEVYSKYFDYLDKSGNFFYERWGDAPVHSIAVSLFADRDNIHFFNEIGYWHPGSGHCPLDDATRAKCDCDPYESIDYNGWSCLDKFYTAFEMPFPENWSFYSH

SEQ ID NO: 45543 - DNA, 1239 bp, Eremothecium gossypii
  CDS (1)..(1239)
atgagaaatagatggtcacatctgctcttggttctgttcgccggtgcaaccatcctcgcacttttgggcagactgaaaaatgtgggcgagcgttcgctggaccaatggtacgcagcgaggtcgtacgagatattgcacaagttcgacaacgtgaggcgatatgaccagttgttccgtccgccgaagatgtcgaccaattcctacgtagacctgctggagttccgacctctagtcgccgacggcccacgcgaaaatgcgaccttgctcatgctctgtcgcaattgggagcttcccggggtgctgagctccatgcgctccctcgaggatcggtttaacagccgcttccactacgattgggtgttcctgaacgacgtgccgtttgacgtggacttcgtggaggccaccagcgcgatggccagcggccggaccttctacgggctggtgcccgacgaggactggaacacgccccgctggatcgacccgctgcgctacgaggagtgcctgcaggatatgctcgcgaaggacgtcccgtacggtggctcacggtcgtaccgcaacatgtgcagattcaactccgggttcttcttccggcaagagttgctggacaactacgactactacttccgcgtggagccaaacgtcgaatacttctgtgacttcccgtatgaccccttccgcgtcatgcgcgagcaccgcaagaagtacggcttcgtcatcacgctgacggagtacgagcagaccgtgcctacgctgtggcaggccgtgcgcgcgttcgcagccgagcacccggagctcgtggacctcgccaccaacctgcacgagttcgtcaccagcgggcccgcggccccctccgccctcgcagacctcgaatacaacctgtgtcacttctggtccaacttcgaaatcggcgacctcaacttcttccgcagcccggcgtacctgaccttcttcgagcacctcgaccgcgccggcggcttctactacgagcgctggggcgacgcgcccgtccactccctcgccgccgcgctgctcctgcgcgccgacgaggtgcaccacttcgaggagatcggctacttccacgtgccctacggcacgtgcccgtccgcgcacgtcgcgcgtctcgcgcagcgctgcgtctgcaacttcggccgcgaggccgtcgacatcgagcacacatcgcactcctgtctcgaccactggtggcgccgcggcggcggcaagttcttcctgtctatgtag

SEQ ID NO: 45544 - protein, 412 aa, Eremothecium gossypii
MRNRWSHLLLVLFAGATILALLGRLKNVGERSLDQWYAARSYEILHKFDNVRRYDQLFRPPKMSTNSYVDLLEFRPLVADGPRENATLLMLCRNWELPGVLSSMRSLEDRFNSRFHYDWVFLNDVPFDVDFVEATSAMASGRTFYGLVPDEDWNTPRWIDPLRYEECLQDMLAKDVPYGGSRSYRNMCRFNSGFFFRQELLDNYDYYFRVEPNVEYFCDFPYDPFRVMREHRKKYGFVITLTEYEQTVPTLWQAVRAFAAEHPELVDLATNLHEFVTSGPAAPSALADLEYNLCHFWSNFEIGDLNFFRSPAYLTFFEHLDRAGGFYYERWGDAPVHSLAAALLLRADEVHHFEEIGYFHVPYGTCPSAHVARLAQRCVCNFGREAVDIEHTSHSCLDHWWRRGGGKFFLSM

SEQ ID NO: 45545 - DNA, 1263 bp, Eremothecium gossypii
  CDS (1)..(1263)
atgcaacccggattcggggaacccgcactccgccaccattgccggagatctgcgcttgcggtgacgatgtacaagaacacgaggaagaggctgatgcccaagtcagcggtgcttgtgcggcggtatgagcgacagatcaagacggtgtttgtggcgtttctggcggcgctcatgatcatgtttctggcgcgggagccctaccttggcataggctcgggcacgcgcagcgacgccaagctgcagccagccgcggccgagcggctgcagggcgtcagggtgctggaggacgctggcgagcccgtgcgcgcggcattcgtggtgctcgcgcgcgaggaggacctgtggtcgctggtgacctcgatccggcacgtggaggaccgcttcaacgcgcgctaccactacgactgggtcttcgtcggggcgacgcccctgtcggagaagttccagacggtgacgcgcagcctcgtgagcgggcgcgcacgcttctgcgtggcgcaggcggcggcgcgcgagtacccccccgcggtggagaaggagcgcgcgggcaaggcgaccacagcgctggccgagagcggcgtttcgatcgaacaagtcctgctctggcgcttccacgcgggctacctcgcgctgctgcccgagatgcaggagtacgaatactactggtatgtcgagcccgacatcgagctgtactgcgacatcaactacgacatattccgcttcatgaaggcccaccgcaagcagtttggcttcatcctggccaccgaggacccgtccgactactcggccctgtggacggaggccaccgcgttcgcaaagcagcgcgcggacctcctggcgcacgacaacctgcgcaacttcgtgtctaacgacggcgacaccttcaacggctgcgtcttccgcgcgggcttccaggtctcctcacttgacttctggcgctccgacgccttccgggccttcttcgaagccctcgacgcgagcggcggcttcttctacaacctctggactgacgtcgcggtccagacgctcgccgtcgcgctgctcatggacagaagagacgttcactttttcgatagcatcggcctctaccaccgtgagatgcgctcctgccccttcgagcagacgatcaggcgccagaacaagtgcatctgcaacccggagcaggacctgacctgggaaaccgggtatgtctgcacccgcaggttcatgcaggcccgtggactccagctgccgaaaggaatacgccgcgctgcacgcgctgtatag

SEQ ID NO: 45546 - protein, 420 aa, Eremothecium gossypii
MQPGFGEPALRHHCRRSALAVTMYKNTRKRLMPKSAVLVRRYERQIKTVFVAFLAALMIMFLAREPYLGIGSGTRSDAKLQPAAAERLQGVRVLEDAGEPVRAAFVVLAREEDLWSLVTSIRHVEDRFNARYHYDWVFVGATPLSEKFQTVTRSLVSGRARFCVAQAAAREYPPAVEKERAGKATTALAESGVSIEQVLLWRFHAGYLALLPEMQEYEYYWYVEPDIELYCDINYDIFRFMKAHRKQFGFILATEDPSDYSALWTEATAFAKQRADLLAHDNLRNFVSNDGDTFNGCVFRAGFQVSSLDFWRSDAFRAFFEALDASGGFFYNLWTDVAVQTLAVALLMDRRDVHFFDSIGLYHREMRSCPFEQTIRRQNKCICNPEQDLTWETGYVCTRRFMQARGLQLPKGIRRAARAV

SEQ ID NO: 45547 - DNA, 1362 bp, Eremothecium gossypii
  CDS (1)..(1362)
atgctatgcttgagaaagtgccttagacggcctatccttctcctggctattgcgctgactggtattgtgtgtttcctcatatatcgtatcaaccatatcctagaagttcgggcctacttcgcaaacacagttgaatctgtcggcgccaccctatctgatatagctagcaaaactacacatgctgatagagccagcgagtttgatgcactaatagaaaagctcactactccgctacattctggagcggagttgtcgggcgctacaagagaagaagggctacgggcgtatgcacgcttcatggaccagcccatcgatgagccgaaaggaactcccctggtgcggcctggcacagatgcagcagggaaggcgccggcgaccattttatgcctagtgaggaacaaagatcttgaaggaataaggagctcgattaccgagctcgaaaaagcgtttaatggcaagttcaagtacccgtatacttttttgaacgatgaaccgtttactccagagttcaaggaggctattcagaagcttattcctgagcatgaatcggaatttgcaactattgacaaggagttctggtctataccggaggccatcaatcgtgagaaatatgatgttcaaaagctaaagcttttaaccctcaaagtgggccatgcagaggaggattcctatcacctcatgtgtaggttttactctcgatacttctacaaagtgccagaacttgcaaagtaccgctatgtatggcggcttgaaccgaacgtcaacttccacagcgaactaaactacgatgtgttccagtttatgaaggctgcaaataaaatttatgggtttacaataagcctatatgacaacccatggtccgtggagtcgttatgggaccatactatggattttgtccgcgctcatccccactatctcaaccaggccggcgccaccgactggctacgggaaaacatccagaagtccgaaaacttcaaaatcacccgcggatacagcacttgccacttttggagcaatttcgagatcattgacttggagttcttacgcagtgaagcttacgaacaatttgttgaataccttgatcagacaggcgggttcttctacgagcgttggggcgatgcacctgtaagaagcctcgcgctggccctctttgcaaacgcttctgatattcattggtttcgtgacattgcatacaatcacttgccatactttaactgtcccacctttctcccggattctcgaaggtctttcggtacctgtaaatcggggaagttttccaattgggacgagctaaacgtggagaattgtgcgggcaactggatactccacgccatgacggatgcagatcgcgctgcctactga

SEQ ID NO: 45548 - protein, 453 aa, Eremothecium gossypii
MLCLRKCLRRPILLLAIALTGIVCFLIYRINHILEVRAYFANTVESVGATLSDIASKTTHADRASEFDALIEKLTTPLHSGAELSGATREEGLRAYARFMDQPIDEPKGTPLVRPGTDAAGKAPATILCLVRNKDLEGIRSSITELEKAFNGKFKYPYTFLNDEPFTPEFKEAIQKLIPEHESEFATIDKEFWSIPEAINREKYDVQKLKLLTLKVGHAEEDSYHLMCRFYSRYFYKVPELAKYRYVWRLEPNVNFHSELNYDVFQFMKAANKIYGFTISLYDNPWSVESLWDHTMDFVRAHPHYLNQAGATDWLRENIQKSENFKITRGYSTCHFWSNFEIIDLEFLRSEAYEQFVEYLDQTGGFFYERWGDAPVRSLALALFANASDIHWFRDIAYNHLPYFNCPTFLPDSRRSFGTCKSGKFSNWDELNVENCAGNWILHAMTDADRAAY

SEQ ID NO: 45549 - DNA, 1284 bp, Eremothecium gossypii
  CDS (1)..(1284)
atggccgttctactgtcgaagaaggtgattcgagtggcactgctatcctctgtggtgctcctgttcttggggctcctctcggggcaccaggatgtgcaggaatacatgcccgatagcgtgagggacatgcactcgagcgttaagggctcgttgacgggggtctggggcggcaggaccgaggccgttgttgaggagacgaagagcgatgcgggcgtggcgcatgcagacagtggcgcggagcgctcgaaggcgccagcgaaggccaaggagcctgcagaggagtggatgcggaagccggcgccggtgcaggcggacggtaaggtgcgcgcgtcgtttgtctcgcttgtgcgaaactcgcagctggagggcatcattccggcgatcaagctggtcgagcagcgcttcaaccacaagtaccactacccctggctcttcctcaacgacgagcccttcaacgaggagttcaagaccgagattaggaaggttgtgagctctgaggcacgcttcgagaccatccccaaggagcactggagcttccccgagtggatcgaccaggataaggcggccgagacccgcgagaagatgaagggcatcatctatggtgactccgtgtcctacaggcacatgtgccgcttcgagtccggcttcttctggcgccatcccgcgttggaggactacgactggtattggcgtgtcgagcccgacaccaagctcttctgtgacatcgactacgacgtcttccgctggatgcaggacaacgacaaggtctacggcttcaccatctccatccacgagttccaggccaccatcccgaccctctgggagaccaccaccaacttcatcaagaagcaccccgagtatgtcgccaaggacaacatgcagggctttatttcggacgacaacggcaagacctacaacctgtgccacttctggtccaacttcgagatagcctcattgaacttctggcgctccaagccttaccgtgagtactttgactacctcgaccaggccggtggctttttctacgaaagatggggtgatgcccctgtgcacagtatcgctgcgtccttgttcttgccgaaagataagatccactttttcaacgacattgcatactaccatgggcccttcacccactgcccgattgaaaaggacgtgttccagaaagggaactgcgactgtaacccggatgatgactttacgttccagggctacgcatgcggacataagtattatgaggtcaacagcatgaagaagcctcctggatatgagcgcttccagtga

SEQ ID NO: 45550 - protein, 427 aa, Eremothecium gossypii
MAVLLSKKVIRVALLSSVVLLFLGLLSGHQDVQEYMPDSVRDMHSSVKGSLTGVWGGRTEAVVEETKSDAGVAHADSGAERSKAPAKAKEPAEEWMRKPAPVQADGKVRASFVSLVRNSQLEGIIPAIKLVEQRFNHKYHYPWLFLNDEPFNEEFKTEIRKVVSSEARFETIPKEHWSFPEWIDQDKAAETREKMKGIIYGDSVSYRHMCRFESGFFWRHPALEDYDWYWRVEPDTKLFCDIDYDVFRWMQDNDKVYGFTISIHEFQATIPTLWETTTNFIKKHPEYVAKDNMQGFISDDNGKTYNLCHFWSNFEIASLNFWRSKPYREYFDYLDQAGGFFYERWGDAPVHSIAASLFLPKDKIHFFNDIAYYHGPFTHCPIEKDVFQKGNCDCNPDDDFTFQGYACGHKYYEVNSMKKPPGYERFQ

SEQ ID NO: 45551 - DNA, 1305 bp, Neurospora crassa
  CDS (1)..(1305)
atggcccgcctccgcccctccctacggctattccccttgggtctaccgcgccttgcactcagccgccacacgcgattcgcgctcctcctcatcctgacagctgccctcatcgaagtcttccttcacacacaacgatgggccgtccgacaacccgagcacgagctcgacgagcccttttacacgtcatgtcaagaacccgccattgaccaaccgcgcgagaaggcagcgatggtgatgctggtccgcaaccaggagctgatgaaggcgctcaagacggtgcagagcattgagaaacacttcaatcagtggtttcactaccccatcgtcttcctgaacgatgagccgttcagcaaggagttcatcagcgccatgaacgcgactgtgagtggggaagcgaggttcgagctcgtgccgaagaaggaatggctgtttcccgagtggatggatgtggcggatgcgaaggcatctatcaaagcacagggggaggcggggatcctgtatgctgggttggaaacttatcaccacatgtgtcggttttactctggcaaattctacaccctcgaagcactcaaagactacgcctggtactggcggatcgagccagacgtcgagttctactgttccattacctacgacccttttgtcgaaatggccaagcacgacaaagtgtacggtttcaccatcgctctgccagaggagccgcggacgtgcccaagcctcttccgcaagatggccgactacaaggagttgaacaacattccgaccacggagctgtggaaggccacgatagctgcttcatgggtgccttggccactccgccccttcatgggttggtttcggcaccgcgaccgctctggcgatgggtggagtttgtgtcattactggtccaactttgaaattgccaacctggacttttttcggggaaaggactatcagcggttgtttgagtatcttgataagactgggggattttactacgagcggtggggtgacgcagccgtccattctcttgctttgcacatgcttcttccttcccacaaagttcaccactttgaagactttggttaccgccacgactggtattaccaatgtccagccaatgcaccaaatggtcaactgttcgagtcgaagctacttcctgatggtccatatagcccagaacgtgaaggcggtattggatgccggtgcgagtgtgacgggcggaggactcggaactttccagcgtattgcacgaataagctcaaagaacctaatacggccaggcgtctgagtatggtagaatcggttcgcagctggttcccatga

SEQ ID NO: 45552 - protein, 434 aa, Neurospora crassa
MARLRPSLRLFPLGLPRLALSRHTRFALLLILTAALIEVFLHTQRWAVRQPEHELDEPFYTSCQEPAIDQPREKAAMVMLVRNQELMKALKTVQSIEKHFNQWFHYPIVFLNDEPFSKEFISAMNATVSGEARFELVPKKEWLFPEWMDVADAKASIKAQGEAGILYAGLETYHHMCRFYSGKFYTLEALKDYAWYWRIEPDVEFYCSITYDPFVEMAKHDKVYGFTIALPEEPRTCPSLFRKMADYKELNNIPTTELWKATIAASWVPWPLRPFMGWFRHRDRSGDGWSLCHYWSNFEIANLDFFRGKDYQRLFEYLDKTGGFYYERWGDAAVHSLALHMLLPSHKVHHFEDFGYRHDWYYQCPANAPNGQLFESKLLPDGPYSPEREGGIGCRCECDGRRTRNFPAYCTNKLKEPNTARRLSMVESVRSWFP

SEQ ID NO: 45553 - DNA, 1512 bp, Neurospora crassa
  CDS (1)..(1512)
atggacctcctccgtcagctcggggggctcctccccggcggcagaccgccccagcttcccctcggccagggcgaaaaggacaagccacggaggacactggcacagcgccttcagtatcttaggagacccctcaggttacgaggcaactcgagcatatccgtgcctctgggcgtggtcattctcttcccctgcatagtcgtcatcctcatcctcgtcctcttcgtcaggcacccaagctcccccggccgcatcttgatgcccgccggtgccccgcccggcatcaggaaaatcagcgaaaagtacgacaaggtcttcgtcaccggctgccttgagcccgacaccagcaagccccgcgccaatggcgccttcgtcgtcctcgcgagaaacaaggagctggacggtgtcatccagtccatcaagtccatcgagcgccacttcaaccgctggtaccactacccctacgtcttcctgaacgatggcgactttgacgacaccttcaaggacaccgtcaagaactacacctctgctcccgtcgagttcggcaaggttggcccggacatgtggggattccccgactgggtcgaccccaaggtcgccaaggagggtatcgccaagcagggtgatgccgctgtcatgtacggtggcatggaaagttaccactccatgtgcagattctactctggcttcttctacaagcacgagctcctccagaagtacgagtggtactggcgcttggagcccgagatcaagtacttctgcgacatcacctatgaccccttcctcaagatgatcgagaacaacaagacctacggcttcaccattgcggtcaaggaactccgcgagaccgtccccaacattttccgctatgcctccgcctacaagcgtctcaacaacattacctcgcagggtctgtgggaaatgtttgtcgagccccagcccgagaagaagcccgaagcccccgagcccggccttcctgaggagatcctgcgctccgaccccggcgctaacaagctccccgatatcgaccccgaggcgatggagggcgagaagtacaacatgtgccatttctggtccaactttgagattgcccgcttggatttcttccggtccaaggcgtacgaggatttcttccagatgatggatcacagcggtggcttttggatggagcgttggggtgatgccccgattcactccctcgctgccggtgccctcttgggcccccgcgacatccattacttccgcgacttcggttaccgccacaccaccattcagcactgccccgccaacgcgcccgcccgccagctgccccgcgagccctacctcgagaagaccacgctggacgaaaagaagcgcatcgaggaggacaagtactgggatgaatacgacacccccaaggagaacggcgttggatgccgctgcaggtgcgacacggacattgtcgacgtcgagggcaaggaaggttcttgcttggccgagtgggtggatgttgcgggtggctgggccagtccttag

SEQ ID NO: 45554 - protein, 503 aa, Neurospora crassa
MDLLRQLGGLLPGGRPPQLPLGQGEKDKPRRTLAQRLQYLRRPLRLRGNSSISVPLGVVILFPCIVVILILVLFVRHPSSPGRILMPAGAPPGIRKISEKYDKVFVTGCLEPDTSKPRANGAFVVLARNKELDGVIQSIKSIERHFNRWYHYPYVFLNDGDFDDTFKDTVKNYTSAPVEFGKVGPDMWGFPDWVDPKVAKEGIAKQGDAAVMYGGMESYHSMCRFYSGFFYKHELLQKYEWYWRLEPEIKYFCDITYDPFLKMIENNKTYGFTIAVKELRETVPNIFRYASAYKRLNNITSQGLWEMFVEPQPEKKPEAPEPGLPEEILRSDPGANKLPDIDPEAMEGEKYNMCHFWSNFEIARLDFFRSKAYEDFFQMMDHSGGFWMERWGDAPIHSLAAGALLGPRDIHYFRDFGYRHTTIQHCPANAPARQLPREPYLEKTTLDEKKRIEEDKYWDEYDTPKENGVGCRCRCDTDIVDVEGKEGSCLAEWVDVAGGWASP

SEQ ID NO: 45555 - DNA, 1446 bp, Neurospora crassa
  CDS (1)..(1446)
atgggttaccaccaccgcacatcttcccggctgggcacgctgcctctcgcgtttgacctgccggcgcgagtaggacagatcttcatgttgcaatttcgacgacttcggcgctcagggcgcaatggacgccgaatcaagctccttctcaagttcgcattaccgctcctggtcctataccttatcgatctgcccattcatctctaccgcacgcgcgttgcgcgccctcatcaggatctcgaccagccgttcgcgacaggatgtctggacccgtcggttaccgccgcgcagccgcgcgagaacgccacttttgtcatgctggcgcggaatagcgaaattgaaggtgcaaaagcaacagtggcgaatatcgaacggcagttcaaccggtggtttcactacccgattatgttcctgaacgacgctccgtggtcagaggaattcaaggatgtactaagcagggctgtgagcaatgggactgaggtcaggttcgaggtcatcgagaagggaaagtgggggtttcctgaggaaatgaatgagaaggaaaagacaaaggccagattgcagatgaagaagcagggtgagcgaggtgtgggctatggtgacatggagagttatcatcacatgtgtcggttttactctggcgagttctacaatctcgaagccctgaggccctacaagtggtactggcgcctcgagccaagtgtacgctacagctgtgccctcacatacgacccttttgcggaaatggctcgtcacgacaaggtctacggctggacgatagcgctctgggaggttggcgacacctgcccgtccctattcaagaccaccgacgactaccgaatcgaaaagggtattccccggacgcccacctggaacgccttgttacaagtgatgtggttccccgcgcccgtccgttggtttctcggcttgtttcgggtacgggagcacgacaactccggcaacaagtggaacatgtgccactactggagcaactttgagattgccaatctggacttcttccgcggccgcgagtaccaggattacttccgctacctggacagcaaaggcggcttctactcggagcgctggggcgatgcgccggtgcacacgctcgccgtgcacatgcttctcccgcccgagaagattcatcacttttcggatattggctacgagcatgacacgctgtggcagtgtccgggaaatgcaccgatggaccagcaactcctcggtaacaaggcgctgcgtgacatgggcaggatgacactgccgtcggagggagggacaggatgcaggtgcaaatgccaggagaataagaggaggaggaatatcaatagtcagtgcacgagcgagctgacgaggccagtggcgtttcataggccaagctggtgggagaggcacaatggagtgtatcactatgctgtaaataacccaaataatccgaggaagtga

SEQ ID NO: 45556 - protein, 481 aa, Neurospora crassa
MGYHHRTSSRLGTLPLAFDLPARVGQIFMLQFRRLRRSGRNGRRIKLLLKFALPLLVLYLIDLPIHLYRTRVARPHQDLDQPFATGCLDPSVTAAQPRENATFVMLARNSEIEGAKATVANIERQFNRWFHYPIMFLNDAPWSEEFKDVLSRAVSNGTEVRFEVIEKGKWGFPEEMNEKEKTKARLQMKKQGERGVGYGDMESYHHMCRFYSGEFYNLEALRPYKWYWRLEPSVRYSCALTYDPFAEMARHDKVYGWTIALWEVGDTCPSLFKTTDDYRIEKGIPRTPTWNALLQVMWFPAPVRWFLGLFRVREHDNSGNKWNMCHYWSNFEIANLDFFRGREYQDYFRYLDSKGGFYSERWGDAPVHTLAVHMLLPPEKIHHFSDIGYEHDTLWQCPGNAPMDQQLLGNKALRDMGRMTLPSEGGTGCRCKCQENKRRRNINSQCTSELTRPVAFHRPSWWERHNGVYHYAVNNPNNPRK

SEQ ID NO: 45557 - DNA, 1311 bp, Neurospora crassa
  CDS (1)..(1311)
atggcggcgggcagcgcacgctacgtgcgctacatcctccttgccttttttgttatcgccgttctttacttcatctctacgccgtcatccgtcgtgacccccctaaaagataactttggcaaattccaacaatccaccggaaactcgaagccatcgactggaagtactaccggaagcactgccggaagtaccaccggaggcaccaccgaagtcgcccacgatgaaaagacacccgctaagagcaatggcgccgactacgatcctgcccagtacccgttggccatgactccgaatgacccgggctggaacgacttgtctggggttaagggcggccctcgcatgaacgcgacctttgtcaccttggctcgcaacggcgatgtgtgggaaattgcaaagtcgatccgctcggtcgaggaccgcttcaaccgccgctacaactacgactgggtcttcctcaacgacaagccatttgacgaaaccttcaagaaggttacctcctcgcttgtgtccggcaagacgtactatggcgagattccgaccgagcactggtcgttcccgcctcacattgaccaggagaaggccaaaaaggttcgcgaggacatgagacagcgcaagatcatttacggtgacagtatcagctaccgccacatgtgccgctttgagtccggcttcttcttccgccagcccctcatgatgaactacgactactactggcgcgttgagccgagcgtcgagttccactgcgacatccactacgatcctttccgcttcatgcacgagaataacaagaagtacagcttcgtgctcagcctttacgagtacttcgagactatcccgaccctctgggacagcgttaccaagttcatcaagaaccaccccgagcacattgctgagggcaactccatggctttcctcagtgacgatggtggcaagacctacaacaagtgccacttttggtccaactttgagattggtagcctcaactggcttcgctccaaggcctacaccgactacttcgagtctctggatcaggatggtggtttcttctatgagcgctggggcgatgccccggtccactctattgccgccggcttgatgttgaagaaggaggaaatccacttcttcaacgacattgcctactaccacgttcccttcactcactgccccaccggagagcagttccgtctcgaccgcaagtgccactgcaaccccaaggagaactttgactggaaggggtattcttgcacttcgaggtactacgagcttaatggtcttccgaagccagaaggctggcaagatcagtcggattag

SEQ ID NO: 45558 - protein, 436 aa, Neurospora crassa
MAAGSARYVRYILLAFFVIAVLYFISTPSSVVTPLKDNFGKFQQSTGNSKPSTGSTTGSTAGSTTGGTTEVAHDEKTPAKSNGADYDPAQYPLAMTPNDPGWNDLSGVKGGPRMNATFVTLARNGDVWEIAKSIRSVEDRFNRRYNYDWVFLNDKPFDETFKKVTSSLVSGKTYYGEIPTEHWSFPPHIDQEKAKKVREDMRQRKIIYGDSISYRHMCRFESGFFFRQPLMMNYDYYWRVEPSVEFHCDIHYDPFRFMHENNKKYSFVLSLYEYFETIPTLWDSVTKFIKNHPEHIAEGNSMAFLSDDGGKTYNKCHFWSNFEIGSLNWLRSKAYTDYFESLDQDGGFFYERWGDAPVHSIAAGLMLKKEEIHFFNDIAYYHVPFTHCPTGEQFRLDRKCHCNPKENFDWKGYSCTSRYYELNGLPKPEGWQDQSD

SEQ ID NO: 45559 - DNA, 1182 bp, Neurospora crassa
  CDS (1)..(1182)
atggcgattgctcgcccagtacgagccctggccctggcggctgcgctcgtctggtgtttcttcatatggcagcttctgtcgccatcgggaaccgccatgaccaaagacaaatacttgtcctttgagcgggatcccaacctggaccctacgggagaacccgaagggaagctcatacgcgcttccgaagactatgcgccgggcgcaaagaactcggccagaatcaatgccactctgctggcgctggtgcgaaacgaggagctggaaggcatgctgcaggcgatgcgcgacctcgagcggacatggaaccacaagttcaactacccctggacctttttcaacgacgtgcccttttccgatgagttcaagaagagaacgcgcgcggtaacgaaggccgaggtcagatacgaacttatccccaaggagcactgggaaatgccatcatggattaaccaggacctgtaccacgagtcggtcaagatcctcgaagaaaagaagattcagtatgccgacaaaatttcgtaccaccagatgtgccggtggaacagcggcatgttctacaagcacccggccctggccaacacgcagtactactggcgcgtcgagcccaacgttcacttcttttgcgatgtcgactatgacgttttccgctacatgcacgataacaacaagacgtacggcttcaccatcaacctgtacgacgccccggcgtccatcactactctgtggcccgaaaccgaaaagttcttggccgagcaccccgaatatgtgcacgagaacagcgccatgaattggctgacggacaagacccgccgtcccgaccacacaaaggatgccaacggttattcgacatgccacttttggagcaactttgagattggcgatatgaacttctggcgcagcaaggcgtacgaggattatttcaaccacttggaccgtgccggtggctttttctacgagcgttggggtgacgcacctgttcacagtattgccctgggtctcttcgaagactctagcaagattcattggttccgcgatattggctatcagcacattcccttcttcaactgtcccaactcccccaagtgcaagggctgcgttaccggccgtttcaccgatggcgaggcctggctcaacagggaagactgcagacccaactggttcaagtacgtcggcatgggctaa

SEQ ID NO: 45560 - protein, 393 aa, Neurospora crassa
MAIARPVRALALAAALVWCFFIWQLLSPSGTAMTKDKYLSFERDPNLDPTGEPEGKLIRASEDYAPGAKNSARINATLLALVRNEELEGMLQAMRDLERTWNHKFNYPWTFFNDVPFSDEFKKRTRAVTKAEVRYELIPKEHWEMPSWINQDLYHESVKILEEKKIQYADKISYHQMCRWNSGMFYKHPALANTQYYWRVEPNVHFFCDVDYDVFRYMHDNNKTYGFTINLYDAPASITTLWPETEKFLAEHPEYVHENSAMNWLTDKTRRPDHTKDANGYSTCHFWSNFEIGDMNFWRSKAYEDYFNHLDRAGGFFYERWGDAPVHSIALGLFEDSSKIHWFRDIGYQHIPFFNCPNSPKCKGCVTGRFTDGEAWLNREDCRPNWFKYVGMG

SEQ ID NO: 45561 - DNA, 1185 bp, Magnaporthe grisea 70-15
  CDS (1)..(1185)
atgttccgaaggctcagacgcatgccacggcggctgcacccgcttttcgtcgcggcaatgtggctcgccatcccgctcgcgctcgagagcatatatcaccagcgcagctacaacgtgccgatcccggagcgcgagatggactctgcctttttcggcagcgagggctgcctggacccggaggagatggccaaggggccgcgcgagaaggcggcgctcgtcatgctggcgcgcaactcagagctggagcaggccaagcacacggtcgagtcggtcgagcgccgcttcaaccgctggttccactaccccgtggtgtttttcaacgacgaggagtgggacccagagtttgtgcgccagctgaatgctacggtcagcggagaggcaaggtttgagatcataccgagggacgtgtggtatttcccgagctggatggatgcggacaaggcaaaggctagcatcaaggatcagggtgataggggggtctcgcatgagcccgacgtcgactttacgtgctcgataacctacgacccctttgtcgaaatggccaagcgcaacaagaaatatggctttacgatatcgctctgggaggagcgcgacacgtgcccaaccttgtttcgccacatggccgactggaaggaggccaacgacgtcccgaccaacaacctctggaaggcagccgtctcggcctcgtgggtgccctggccgttccgcaacctcgtcgcctggctgtcgcacagggacaggttcggcgacatgtggagcggctgccactactggagcaactttgaaattgccgacatggactttttccgtgggaaaaggtaccaggacatgtttgagtacctggacaagaagggcgggttctactttgagcggtggggcgatgctgcagttcactccatcgcggtcgccatgctcctggacccatcccaggtccaccactttgacgacataggctaccggcacgatcagctgtaccagtgtcccgtcaactcccccggcagccagctccccgacaaccccagcctggggacggacaagaactgggctccctcggccgaggggggagtcgggtgccgctgcgagtgcgacggcaggacgacgccgcgcaaccacccagggtactgtctaaacaagctcaaggcgcccaacaccaggagccggccctggttcacgtggttattgtga

SEQ ID NO: 45562 - protein, 394 aa, Magnaporthe grisea 70-15
MFRRLRRMPRRLHPLFVAAMWLAIPLALESIYHQRSYNVPIPEREMDSAFFGSEGCLDPEEMAKGPREKAALVMLARNSELEQAKHTVESVERRFNRWFHYPVVFFNDEEWDPEFVRQLNATVSGEARFEIIPRDVWYFPSWMDADKAKASIKDQGDRGVSHEPDVDFTCSITYDPFVEMAKRNKKYGFTISLWEERDTCPTLFRHMADWKEANDVPTNNLWKAAVSASWVPWPFRNLVAWLSHRDRFGDMWSGCHYWSNFEIADMDFFRGKRYQDMFEYLDKKGGFYFERWGDAAVHSIAVAMLLDPSQVHHFDDIGYRHDQLYQCPVNSPGSQLPDNPSLGTDKNWAPSAEGGVGCRCECDGRTTPRNHPGYCLNKLKAPNTRSRPWFTWLL

SEQ ID NO: 45563 - DNA, 1176 bp, Magnaporthe grisea 70-15
  CDS (1)..(1176)
atggctaggcccgtaagggtgttggcgactgtcgccatcttcatgtggtgtgtctttctgtacatgatctttagaccatcatcgccgttattagtcgccgatgaattttccaactttcagagggatccgatgcacgatccaactggcgagcccgaaggcatcttaaggcgcgtatcgcccgagtatgcaccagacgccaaccctaccgagcggattaacgcgaccctgctggcgctggtgaggaacgaggagctagacggcatgctgcaagccatgggcgacttggagcgcacatggaacagcaagttcaactacccctggacattcttcaacgacgttcctttctcgaaagagttcaagcagaagacccaagccatgacaaaggccaagtgcaactacgaaattatcccaaaggaacattgggacatgccttcatggattaacaaggacatctacgatgagtcggtcaagatcctcaaggagaacaagatccaatacgccgacaaaatctcataccatcagatgtgccgatggaacagcggtctcttctacaaacaccccgccctgaaggacgtgcaatattattggcgagtggagcccaaggtgcacttcttctgcgacatcgactacgacgtcttccgctttatgcaggacaacaacaagacttacggcttcaccatcaacctctacgatgcgccggagtcgatcccgaccctgtggcccgagactgaaaagttcttggctgagcacccccagtacaagcatcccaacaacgcgctcgactggctcacagacaaggagaagcgccctgagcataaccgcaaggcgaacggctactcgacatgccacttctggagcaactttgaggtcgcagacatgaacttctggcgcagtaagacctacgaagactacttcaaccaccttgaccgcgccggtggctttttctacgagcgctggggtgacgcccccgtacacagcattgctcttggtctctttgaggatgccagcaagattcattggttccgtgacatcggatatcagcacatcccattcttcaactgccccaactcgcccaagtgcaagggttgcgtcgctggacgcttcaccgacggtgagaagtggcttcaccgtgaggactgcaggccgaactggttcaagatgcacggcatgggctga

SEQ ID NO: 45564 - protein, 391 aa, Magnaporthe grisea 70-15
MARPVRVLATVAIFMWCVFLYMIFRPSSPLLVADEFSNFQRDPMHDPTGEPEGILRRVSPEYAPDANPTERINATLLALVRNEELDGMLQAMGDLERTWNSKFNYPWTFFNDVPFSKEFKQKTQAMTKAKCNYEIIPKEHWDMPSWINKDIYDESVKILKENKIQYADKISYHQMCRWNSGLFYKHPALKDVQYYWRVEPKVHFFCDIDYDVFRFMQDNNKTYGFTINLYDAPESIPTLWPETEKFLAEHPQYKHPNNALDWLTDKEKRPEHNRKANGYSTCHFWSNFEVADMNFWRSKTYEDYFNHLDRAGGFFYERWGDAPVHSIALGLFEDASKIHWFRDIGYQHIPFFNCPNSPKCKGCVAGRFTDGEKWLHREDCRPNWFKMHGMG

SEQ ID NO: 45565 - DNA, 1317 bp, Magnaporthe grisea 70-15
  CDS (1)..(1317)
atggcggccggtagcgctcgctacgtgcgatatctcttgatcgcctttttcgttctcgctgtattctatttcgtttcacactcttcttacgatgtaaggccagatcagtatcccggcgggagcggcgacatccaacagaaccagcccgctgcgcaacaacctgccaaggttgacaccccaaaggtggacacacccaagctcgatgatgcccccaagaaagatcagacctcccacaagcctgccgttgggaaggttgactcgggcaaggcggctgagcacccgatggctatgaagcccggccagcccgaatgggaggatctcgtgagcgtagcaccaggcccgcgcatgaatgcaacatttgtcacgcttgcccgtaactcggatatttgggagatcgccgactcgatccgccaggtcgaggatcgcttcaacaagcgctacaactacgattgggtcttcttgaacgacgcaccttttgatgacgaattcaaaacaatcaccacttcgctagtctctggcaagacgcactacggcgagattcccaaggagcactggtcattccctgagtggatcgatgaagaaaaggccgccaaggtgcgcgaggacatgaaggagaagaagatcatctacggagactctgtcagctatcgccacatgtgccgcttcgaatcgggtttcttctttcgccagccactcatgatgaactacgactactattggcgcgttgagcccagcgtcaagctcttctgtgacatccactacgaccctttccgttacatgaaggagaacaagaagaagtacagcttcgtcctgagcttgtacgagtacgtcgagacgatcccgacgctctgggacagcaccaagaagtttatgaagaaccaccctgagcacattgtggagggcaacaccatgcagttcctgagtgacgatggcggcgagacctacaacaagtgccacttttggtccaacttcgagattggcgacctgaactggctacgttccaaggcctacattgacttcttcgagtctctcgacaaagacggtggtttcttttacgagcgctggggagatgcccctgttcactccattgctgccggacttatgctcaagaaggaagaggttcacttcttcaacgacattgcctactggcacgttcccttcacacactgccctactggcgacaaactccgcgaaaagctcaagtgcacatgcaaccccaaggataactttgactggaagggctattcttgtacttcgcgcttcttcgaggccaatggaatggagaagcctgagggttgggagaagcagacagactag

SEQ ID NO: 45566 - protein, 438 aa, Magnaporthe grisea 70-15
MAAGSARYVRYLLIAFFVLAVFYFVSHSSYDVRPDQYPGGSGDIQQNQPAAQQPAKVDTPKVDTPKLDDAPKKDQTSHKPAVGKVDSGKAAEHPMAMKPGQPEWEDLVSVAPGPRMNATFVTLARNSDIWEIADSIRQVEDRFNKRYNYDWVFLNDAPFDDEFKTITTSLVSGKTHYGEIPKEHWSFPEWIDEEKAAKVREDMKEKKIIYGDSVSYRHMCRFESGFFFRQPLMMNYDYYWRVEPSVKLFCDIHYDPFRYMKENKKKYSFVLSLYEYVETIPTLWDSTKKFMKNHPEHIVEGNTMQFLSDDGGETYNKCHFWSNFEIGDLNWLRSKAYIDFFESLDKDGGFFYERWGDAPVHSIAAGLMLKKEEVHFFNDIAYWHVPFTHCPTGDKLREKLKCTCNPKDNFDWKGYSCTSRFFEANGMEKPEGWEKQTD

SEQ ID NO: 45567 - DNA, 1551 bp, Magnaporthe grisea 70-15
  CDS (1)..(1551)
atggatctcttccggcgagcccgacggctcgtcccccaacaaacacctgcgcagctgccttcggccagcgagaagagcaaacctcagggccccaaccgcttgacgtcgcggttggccttcttcaggaggccgctccggttacgcggtaactcgagcgtgtctgtgcctctgggagttgtcatactattcccatgcatagttgtcatcctcattttggtgctctttgttcgccatcccagctcgccaggcaggatattgatgccggctggggcaccgccagcaatcagaaaaattagcgaaaagcatgacaaggtttttgtcaacggttgcctcgaccccaagactgaggcagataaggctcctcgcgccaacgccgcctttgtcgtccttgcacgcaacaaggagctggatggtgtcatccagtccatcaagtcgattgagcgtcacttcaaccgctggttccactacccttacgtcttcctcaacaacggcgacttcaatgagaccttcaaggagactgtgcgaaaccacacttcggcccccgtcgagtttggctttgtcggtcccgacatgtggggataccccgactggatcgatgagaaggttgccaaggagggaattgccaagcagggcgacgctgccgtcatgtacggtggtctcgagagctaccactccatgtgtcgcttttattctgggttcttttacaagcaccctcttctggcgaaatatgagtggtactggcgtttggagcctgaaatcaagtacttctgtgacatcacctacgatcctttcctgaagatgattgaatcaaacaagacatacggattcaccattgccgtcaaggagcttcgcgagactgttcccaacatcttccgctacgcctcggcttacaagcgcctcaagaacatcaccactcaaggtctgtgggagatgttcgtcgagcccactcaggagaaggagcctgagaaggagcagttgcctgaggatgaccccaactacaagccacctttgcctgaagaggtgacccgcaacgacccgaaccgcaatacccccatcgagatcgatcccgaggcgatggagggtgagaagtacaacatgtgtcacttctggtcgaatttcgagattgcccgtctgagctggttccgtagcaaggagtacgaagacttcttccagatgatggacaggagtggtggcttctggatggagcggtggggtgacgcacctatccactcgctcgccgccggtgttcttctcgcaccgcgcgacatccactacttccgtgactttggctaccgccacaccacgatccagcactgtccggccaacgcgccttcacggcagctggctcgcgagcccttcctggagaagacgacgcttgacgagcgcaagaggcacgaggaggatcaatactgggagcagttcgacgcccccaaggagaatggcgttggttgccgctgccgctgtgacaccgatatcgttgatgtcgagggcaaggacggtagctgcctggccgaatgggtagacgttgccggtggttgggctagcccttga

SEQ ID NO: 45568 - protein, 516 aa, Magnaporthe grisea 70-15
MDLFRRARRLVPQQTPAQLPSASEKSKPQGPNRLTSRLAFFRRPLRLRGNSSVSVPLGVVILFPCIVVILILVLFVRHPSSPGRILMPAGAPPAIRKISEKHDKVFVNGCLDPKTEADKAPRANAAFVVLARNKELDGVIQSIKSIERHFNRWFHYPYVFLNNGDFNETFKETVRNHTSAPVEFGFVGPDMWGYPDWIDEKVAKEGIAKQGDAAVMYGGLESYHSMCRFYSGFFYKHPLLAKYEWYWRLEPEIKYFCDITYDPFLKMIESNKTYGFTIAVKELRETVPNIFRYASAYKRLKNITTQGLWEMFVEPTQEKEPEKEQLPEDDPNYKPPLPEEVTRNDPNRNTPIEIDPEAMEGEKYNMCHFWSNFEIARLSWFRSKEYEDFFQMMDRSGGFWMERWGDAPIHSLAAGVLLAPRDIHYFRDFGYRHTTIQHCPANAPSRQLAREPFLEKTTLDERKRHEEDQYWEQFDAPKENGVGCRCRCDTDIVDVEGKDGSCLAEWVDVAGGWASP

SEQ ID NO: 45569 - DNA, 1527 bp, Gibberella zeae PH-1
  CDS (1)..(1527)
atggacctgatcagaagggccaccagggtggctcccagcaaacctcccctacaactgcccctcgatgagaagcgagactccaaacacaacaaggccgtcgacaatcgcatggccttcttccgtaggccgctacgattaaaggggaattcgacgatttctgtacctctgggcgtggtcatcttttttcctatgcttgttttaatccttatttttattcttttcgttagccatcccagttctcccggcaggggtttccttataccaggaggcgctgcccctaaaatgcggaaaatcagcgaaaagtacgacaaggtgttcgtcgagggctgtgcccagcccgacaccagcaaacctcgagccaatgctgcttttgtgatattggcgagaaacaaggagcttgatggtgtgttgcaatccatcaagtcggtcgagagacacttcaacaggtggtacaactacccctatgtgttcctcaatgatggcgatttcgacgaaaacttcaaagaggccattcgaaaccacacttcgggtgaagtcgagtttggaaaggttggaccagacatgtggggtttccctgattggatcgatcccaaggttgtcaaagagggcattgcaaagcagggtgatgctgctgtcatgtacggaggtttggagagttaccacaagatgtgtagattctactctggcttcttcttcaaccatcctctactactcaagtatgagtggtattggcgagtcgagccagagatcagctatttctgcgacatcacatacgaccccttccaaaagatgatcgaacacaacaaaacatatggcttcacaattgccgtcaaagagcttcgcgagactgtccccaacatcttccgatacgcctccgcgtacaagcgactcaataacatcacatccaagggcctatgggaaatgtttgtcgagccaccagaggacgaggaggaggactctcccaaggaaagcgatacctctccaaacgataacagtttctgggatacccttacagggaagaagaagaacactattgaccccgagtcaatggagggagaggcctacaacatgtgccatttttggtctaatttcgagattgccaaactcagctggttccgcagcaaggagtatcaggatttctttgaaatgatggaccgcagtggtggcttttggatggaacgatggggcgatgctcccatccactcccttgccgctggcgctctgcttggaccccaggacatccattacttccgagactttgggtaccgacacacgacaatccagcattgtcctgctaacgcacccggcaagcaactcgctcgtgagccttacctcgagaagacgacatttccagaatataagcgcttcgaggaagacgactactgggagcagtgggacgacgtgcaagaaggtggcattggctgccgttgcaggtgtgacacagatgttgtcgatgttgagggcaaggaaggatcttgtctggctgaatgggtcgacgttgctggcggctgggctcatccatattaa

SEQ ID NO: 45570 - protein, 508 aa, Gibberella zeae PH-1
MDLIRRATRVAPSKPPLQLPLDEKRDSKHNKAVDNRMAFFRRPLRLKGNSTISVPLGVVIFFPMLVLILIFILFVSHPSSPGRGFLIPGGAAPKMRKISEKYDKVFVEGCAQPDTSKPRANAAFVILARNKELDGVLQSIKSVERHFNRWYNYPYVFLNDGDFDENFKEAIRNHTSGEVEFGKVGPDMWGFPDWIDPKVVKEGIAKQGDAAVMYGGLESYHKMCRFYSGFFFNHPLLLKYEWYWRVEPEISYFCDITYDPFQKMIEHNKTYGFTIAVKELRETVPNIFRYASAYKRLNNITSKGLWEMFVEPPEDEEEDSPKESDTSPNDNSFWDTLTGKKKNTIDPESMEGEAYNMCHFWSNFEIAKLSWFRSKEYQDFFEMMDRSGGFWMERWGDAPIHSLAAGALLGPQDIHYFRDFGYRHTTIQHCPANAPGKQLAREPYLEKTTFPEYKRFEEDDYWEQWDDVQEGGIGCRCRCDTDVVDVEGKEGSCLAEWVDVAGGWAHPY

SEQ ID NO: 45571 - DNA, 1434 bp, Gibberella zeae PH-1
  CDS (1)..(1434)
atgacaaaggccccttgctccactctctggtgggtagggacacttgctctcttttacttcactctgatcgtgtttggatctacgttgtctttgtctgctgattctccgatcaaggcagctttggtggctttggttaaggataacgacatcaacgctacgcttttcagcatcaagcagttcgatgacaagttcaacaaggactacctccatgattgggtcttcttcagtatccaggatctcccagaggctttcaagaactcggtttccaacgctaccaacgcaacttgcatcttcgaggtcattcccgaagagaactggaacgacccacgatgggttgattcgttccagcattccatgtctcaggatgccagcctggataaaagctctgcaactctcaagactatcgccaacatccaccagatgaaccgatggatctcggctccttttgccaaagagcaacgtctccaggactatgaatggtttctgaaagttgatccaggcgctcaactagcccaaaacatccctttcgatgtatttcgcttcatgcgagacaatggcatcgcttatgggtctagtcgagctttttttggtcaggccaaactgtctcggctctctccccgagtcaagtccttctttgagaaaaacccggagctgctccacaaggaagccgatgtcgcatggcttattgagaacgtcactggcctcctcatgaaatctggtccactggatgacggttttgaagacttggttgacgagggcaatgacaagctgaggtcgcggaaccaggcgtctcaggttcccggagcccaagatgaaggcgagagatcatggcttagcgagtgctttgcatcttggctagctgacattcatggaagcagtctctccccatcattcgagattggatcactcgcttttttccgcagccttaaccaggttgcattctttgatcatcttgacaatgcgggcgactttcagtttcggcgagtgggcgatgcaccactgcacagtctaagtgccagcatgctcctgcctcgagagagcgtttggaacttccgcaccaaggaaaccaagctcggctctcaacacgacggcgaacacactcaagctgagcgccagtacagtgagatgtgcatgaataactttgacacctctaacttgaacggcagtgcgaagtcgaagggggatgcctacgaggcgatgacggcgctattcaaggcttgggacttgatggcccaggacgtgggtgcgcagagcaagagccccaagttgatttcgggtaacacttggatgggcaaaatgaacggggatgctggatgctcatttttttggttttggcgaaagacactatctgcagatctaggatttggatgggaggaggtcgatttgagttgcttgcatgacgggatgaagggtcaggtaatgatcaaggtctaa

SEQ ID NO: 45572 - protein, 477 aa, Gibberella zeae PH-1
MTKAPCSTLWWVGTLALFYFTLIVFGSTLSLSADSPIKAALVALVKDNDINATLFSIKQFDDKFNKDYLHDWVFFSIQDLPEAFKNSVSNATNATCIFEVIPEENWNDPRWVDSFQHSMSQDASLDKSSATLKTIANIHQMNRWISAPFAKEQRLQDYEWFLKVDPGAQLAQNIPFDVFRFMRDNGIAYGSSRAFFGQAKLSRLSPRVKSFFEKNPELLHKEADVAWLIENVTGLLMKSGPLDDGFEDLVDEGNDKLRSRNQASQVPGAQDEGERSWLSECFASWLADIHGSSLSPSFEIGSLAFFRSLNQVAFFDHLDNAGDFQFRRVGDAPLHSLSASMLLPRESVWNFRTKETKLGSQHDGEHTQAERQYSEMCMNNFDTSNLNGSAKSKGDAYEAMTALFKAWDLMAQDVGAQSKSPKLISGNTWMGKMNGDAGCSFFWFWRKTLSADLGFGWEEVDLSCLHDGMKGQVMIKV

SEQ ID NO: 45573 - DNA, 1185 bp, Gibberella zeae PH-1
  CDS (1)..(1185)
atgacagttgcgcggcctgtccgggcgttgatcgccggaggatgcatcatctggtgtttctttatgtggcagatatttgctccttcttggggtctaagtggtcccggcgatcggtactccaattttgaacgagatcctatgctagatcctaccgacgagccagaaggaaaactacaccgcacgagtccacgatacgcccacgatgcgcaaaagaccgaacgtatagatgctacgctgttggcccttgtaaggaacgaggaggtggacgctatggttatgtctatgcgtgacctcgaaaggacatggaactcaaagttcaactatccctggacatttttcaacgacaagccttttacggaagagtttaagaggaaaacgagggcggcgacaaaagcaaagatcaactacgaaatcatccccgacgaacattggaagatgccatcctggattgacgaacaaatatttgaagagtcagccaagattttggagaagaacggtgttcaatacgcaagcaagatctcataccaccaaatgtgtcgatggaatagcggtctcttctacaagcatccagccctcaaggatatccgctactactggcgtgtggagccaaatgtgcacttcttctgcgatgtcgactacgacgtcttccgctacatgcacgacaacaacaagacatacgggtttacgatcaacctttacgacgacccaaagacccttccttcgctgtggcctgaaacggtcaagttcctggccgagcacccaggatacattcatcaaaacagtgctgttggctgggtcactgatgatattcgtcgaccacaatcgaatagaaaggctcaggggtattcgacgtgccatttctggagcaattttgagattggagacatggagttttggcgaagcaagacctacgaagactactttaatcaccttgaccgtgcgggtggtttcttttatgaacgatggggcgatgcccccgttcatagtattgctctcggtctgtttgaagatcagagcaagatccactggttccgtgatatcggatatcagcatattcccttcttcaactgtcccaactctccaaagtgcaaaggctgcgtcactggccgtctcacagacggtgaagcctggctgcaccgagaagactgtcggcccaactggttcaagtatgtcggtatgggttga

SEQ ID NO: 45574 - protein, 394 aa, Gibberella zeae PH-1
MTVARPVRALIAGGCIIWCFFMWQIFAPSWGLSGPGDRYSNFERDPMLDPTDEPEGKLHRTSPRYAHDAQKTERIDATLLALVRNEEVDAMVMSMRDLERTWNSKFNYPWTFFNDKPFTEEFKRKTRAATKAKINYEIIPDEHWKMPSWIDEQIFEESAKILEKNGVQYASKISYHQMCRWNSGLFYKHPALKDIRYYWRVEPNVHFFCDVDYDVFRYMHDNNKTYGFTINLYDDPKTLPSLWPETVKFLAEHPGYIHQNSAVGWVTDDIRRPQSNRKAQGYSTCHFWSNFEIGDMEFWRSKTYEDYFNHLDRAGGFFYERWGDAPVHSIALGLFEDQSKIHWFRDIGYQHIPFFNCPNSPKCKGCVTGRLTDGEAWLHREDCRPNWFKYVGMG

SEQ ID NO: 45575 - DNA, 1311 bp, Ustilago maydis 521
  CDS (1)..(1311)
atggcttctggattcctcgacgcccttttgcgtcgcccgcagaggctgattctgctcgtcaccctcttccttttcgtcctcgtcttttcgacctacgtctccttctctgcaaatggcgttcaaaatttccgcgatcgcttgaactcgcttcctgccttcgccagcccatggcaggcttccagcaaaggcacaccgtctttcccggcaccgagttcggtcgctgatatgtacactcacaaccctggtacgccttcctcgattgacgagttgtcgaaatgggcgcagaagggagacgacggcaacctgtatcctcctacatttatcccacagatggctaaccaaggtccacgcgccaaagctggctttatcgtcctcgttcgaaacgccgaactcttaggcatgcgcgaatctatgcgagacgttgaagaaaagttcaatcgcaagtatggctacccttggatctttctcaacaacgagcccttcaccgaagaattcaagcgaggtgttcgccagatgacccgcagcgaatgtcgattcggcttgatcctcaaggagcactggggctatcccgactggatcagccaggagaaggccgcagagactcgcgtcaagatgaaagatgtcatctacggctcatcggaaagctaccgccacatgtgccgataccagtctggattcttcttccgccacaacctcacgctcgatctggactactattggcgtgtcgagccaggtatcaagctctattgcgatctcgactacgatcctttcgtctttatgcagatgaacaacaagacttatggcttcaccatggcgctctacgagtacaaagagactgtgccgacattgtggtccgagacgcagaagttcttcgcccagcatcccgagcacctcgccaaggatccaagttatcacttcttgggcgaccacccggagcaaggcattcaagatacatgggtcggcgcccactattggtccaactttgaaatcggcgaccttcgtttctggcgatccaagacgtacctcgactattttgaatggctcgacaaagcaggaggattcttctacgagcgatggggagacgcgcccgttcattccattgctgtttctctcctcctcgatcgaagccgacttcactttttcgatgatattggctacttccacaatccgtggaatcactgtcccgccaatcgcaaaaagtaccatgacacgggtcgatgcaattgtgatcccaagcagtcgtttgataatgagggatactcttgtctgcccaggtggtggaaaggctctccggagggctatccaaagtga

SEQ ID NO: 45576 - protein, 436 aa, Ustilago maydis 521
MASGFLDALLRRPQRLILLVTLFLFVLVFSTYVSFSANGVQNFRDRLNSLPAFASPWQASSKGTPSFPAPSSVADMYTHNPGTPSSIDELSKWAQKGDDGNLYPPTFIPQMANQGPRAKAGFIVLVRNAELLGMRESMRDVEEKFNRKYGYPWIFLNNEPFTEEFKRGVRQMTRSECRFGLILKEHWGYPDWISQEKAAETRVKMKDVIYGSSESYRHMCRYQSGFFFRHNLTLDLDYYWRVEPGIKLYCDLDYDPFVFMQMNNKTYGFTMALYEYKETVPTLWSETQKFFAQHPEHLAKDPSYHFLGDHPEQGIQDTWVGAHYWSNFEIGDLRFWRSKTYLDYFEWLDKAGGFFYERWGDAPVHSIAVSLLLDRSRLHFFDDIGYFHNPWNHCPANRKKYHDTGRCNCDPKQSFDNEGYSCLPRWWKGSPEGYPK

SEQ ID NO: 45577 - DNA, 1188 bp, Ustilago maydis 521
  CDS (1)..(1188)
atgaacctcaccttgcgctacgtcgcgctggtgctggtcacacttctctcgctgcactacctggccagctacacatccaccgcatatcacaaccaggtggacacgctgcgctcttcatggtcctcttcttcgtcgaaagctgtcgacctaatcgcatatgcaaacacgcccaaagccaacgcaaccttcgttattctttgtcgtgaaggagagctcaatggaatcctcgctagtcttcaactgctcgagagcaccttcaacgatcgaccacatcatcgatatccctatgtttttttgaacgaccaacctttctcggaaaagttcaagctgcacgtcacccgagccgtctcgtcgagcgtcgaattcggccaagtgcccgcagagcattgggacatcccttcgagcattgacctgggcaaagcacagaaatcatgggaccgagcaaagaagaccggtatgccctacggaggctccaagtcgtataggcaaatgtgcaggtttcagtctggtttctttttcagacatccactcttgctcaggtacaagtactattggagggtcgagcccgacgttaaatacttttgcgatttgaccgactacgacccgtttcgttttatgcaacagaacaagaaaaagtacggctttgtgctggcgatgcacgatatcccaggcacggttcgaacgctctgggtacatgtgcgccagtggtatgaaaagaatcctggcctactcgttcccaacaacatgtttggttttgtcactgacaacaacggacgcggatacaacatgtgccactactggtccaacctagagatcgctgatatggacttttaccgctccgaagcctatctttcctactttgatcacctcgatcaagccggaggtttcttctacgagcgatggggcgatgcgcctgttcattctatcgctgcctcgctcctgctcgacaaatccgaggtgcactattttgacaacatcggctacctccaccatcccatcctgcattgtccaaaggtgtccaagcagaacgcaatctcgccgcacaccggaaagtcacgatgctactgtgcgcacgaaacgtcgtttgcttttgatgacggtcgccattcctgtctatacaactttctcgaggtcaacggtaggaattcgactgcggccagagatgagttcagaaaagccgacgattga

SEQ ID NO: 45578 - protein, 395 aa, Ustilago maydis 521
MNLTLRYVALVLVTLLSLHYLASYTSTAYHNQVDTLRSSWSSSSSKAVDLIAYANTPKANATFVILCREGELNGILASLQLLESTFNDRPHHRYPYVFLNDQPFSEKFKLHVTRAVSSSVEFGQVPAEHWDIPSSIDLGKAQKSWDRAKKTGMPYGGSKSYRQMCRFQSGFFFRHPLLLRYKYYWRVEPDVKYFCDLTDYDPFRFMQQNKKKYGFVLAMHDIPGTVRTLWVHVRQWYEKNPGLLVPNNMFGFVTDNNGRGYNMCHYWSNLEIADMDFYRSEAYLSYFDHLDQAGGFFYERWGDAPVHSIAASLLLDKSEVHYFDNIGYLHHPILHCPKVSKQNAISPHTGKSRCYCAHETSFAFDDGRHSCLYNFLEVNGRNSTAARDEFRKADD

SEQ ID NO: 45579 - DNA, 1497 bp, Aspergillus nidulans FGSC A4
  CDS (1)..(1497)
atgggcgtcgttcaacgagttcgaaaatggttgccctcaacaccgagtcttccccttgatgactcgccgtacgaaaaaggccacaaatcctcgagatttgcatttttcaggcgcaggatacggttgaagggcaactcctctgtctcgatacccttggggtttgttttattatttccatgcattgtaatagttctcattttactacttttcgtccgacatccgtcatccccaggaggtatattaatacccgcgggcacaccgccgtctataaggaaaataagtgagaaatacgacaaagttttcgcgacgggctgtcagcccatcaacaccgatacaccccgagcgaacgcggctttcgtcgtgctcgcaagaaataaggaaatcgatggcgttatccagtcaatgaagtcgatcgagcgacacttcaaccgctggtaccgctacccttatgtttttctaaacgacgccgagttcgacgataacttcataaatactgtgaagaactatacaagtgcgcccgttgagtttgggaagatcgatgagacaatgtggggttaccctagttgggtcgaccacgaggttgctaaagaaggcatccggaaacaaggagatgccgcaatcatgtatggaggtatggagagctaccatcacatgtgccgcttctactctgggttcttctacaagcacccgctcctcctgaagtacgagtggtattggcgtttggagcccgagatcaagtacttctgcgacatcacctatgatcctttcctcaagatggccgaggccaataaaacgtacggattcaccattgctgtgaaggaacttcgcgagaccgtgccgaatatctttcgctacgcttcagcttacaaacgaaagaacaatataaaatcccaaggactgtgggagatgtttttggaaccccgcgaggaaccaaatccggaggaacagcaacccgagactctccctgaggaaattcttattacggagcccggtgagaagaacgaaattgatcccgaaactatggagggagagagttataacatgtgccatttctggagtaactttgaaattgcgcgcttggacttcttccggagcaaagagtacgaggatttcttcgagatgatggataggagtggtggtttctggatggagagatggggtgatgctcccattcattccctcgctgctggtgtgcttctgtcaccgagtgacatccactatttccgtgacttcggttaccgacacaccacgattcaacactgccctgcgaacgcacctgcccgacaactaccgcgcattccgtaccttgaaatgacgaccgaggacgagaaggagcgtattgaagaggatgagtattgggcaaaccccgatcctgtaaaggaaaatggagttggctgcagatgccggtgtgataccgatattgtggatgtcgaaggcaagcaaggcagttgccttgcggaatgggtggaagttgctggagggtgggcatctccatag

SEQ ID NO: 45580 - protein, 498 aa, Aspergillus nidulans FGSC A4
MGVVQRVRKWLPSTPSLPLDDSPYEKGHKSSRFAFFRRRIRLKGNSSVSIPLGFVLLFPCIVIVLILLLFVRHPSSPGGILIPAGTPPSIRKISEKYDKVFATGCQPINTDTPRANAAFVVLARNKEIDGVIQSMKSIERHFNRWYRYPYVFLNDAEFDDNFINTVKNYTSAPVEFGKIDETMWGYPSWVDHEVAKEGIRKQGDAAIMYGGMESYHHMCRFYSGFFYKHPLLLKYEWYWRLEPEIKYFCDITYDPFLKMAEANKTYGFTIAVKELRETVPNIFRYASAYKRKNNIKSQGLWEMFLEPREEPNPEEQQPETLPEEILITEPGEKNEIDPETMEGESYNMCHFWSNFEIARLDFFRSKEYEDFFEMMDRSGGFWMERWGDAPIHSLAAGVLLSPSDIHYFRDFGYRHTTIQHCPANAPARQLPRIPYLEMTTEDEKERIEEDEYWANPDPVKENGVGCRCRCDTDIVDVEGKQGSCLAEWVEVAGGWASP

SEQ ID NO: 45581 - DNA, 1350 bp, Aspergillus nidulans FGSC A4
  CDS (1)..(1350)
atgggtgggctagcactcttcctcctctccaggcgctcgatccccgttccagacagttcaagctcaatttcaacgcctccgcccccgccctctgaccgacccgtgaacgcattcggatactcacttaatccacaatcaagtagcgaggtagtgaggttcgctgcaagtcatcctggcggtcgtgctaatgcgacctttgtgactctggcgcgaaattcagatgtttgggagattgcgcaggccattcgccaggtggaggatcgtttcaaccgcaacttccactatgactggatcttcctaaacgaccaaccattcgatgacaactttaaacgtatcacgacatcactggtgtccggcactacgcgttatggcgagattccgaaggagcattggtcctatccagactggatcgaccaggacagggcaagggaggttcgggaagagatgaaggagaagaagattatttatggtcactcggaaagttaccgacatatgtgccgttatgaatcgggattctttttccgtcatcctctgctgcaggagtacgagttctattggcggattgaacccggcgtcgagctgttttgcgacattccctacgacccttttctcttcatgaaggagaacgataagaagtatagcttcgtgatgagtatgtatgaatacgaaggtactatcccgacgctttgggactcggtcaagcagttcatggatgatcaccctgagcacatcgccgaagggaactcgttgcgtttcctgagcgatgacaatggcaaaacctacaacaaatgccacttctggtcgaattttgagatcggcagcctggattggttgagatccaaggagtacctggactactttgactttctcgaccgggcaggcggcttctactatgaaagatggggtgacgcgcctatccattcgattgccgctggcttgctcctcaagaaagaacaactgcacttctgggacgagatttcctactaccacataccctttacccattgtcctcgtgatgaacaactcaggatggacctccgatgtagctgcgacccatcaggaaactttgactggaggggtttctcatgcctttcccggtattacaagaccaacaatatcccattgcccccaggtgttgacgagtacagctggctagctattttcggaataattgttggtctgttggccgttgctgggatcgtagcaaccgccgtcaaccatcaagcccgaagccacgcgcttcaagaagtacagtacttatactggcaaagccagactctctgggagcggtatcagaaagagaaacgcgagtgggagcgagagaggatggggcgagcatggtcgccataa

SEQ ID NO: 45582 - protein, 449 aa, Aspergillus nidulans FGSC A4
MGGLALFLLSRRSIPVPDSSSSISTPPPPPSDRPVNAFGYSLNPQSSSEVVRFAASHPGGRANATFVTLARNSDVWEIAQAIRQVEDRFNRNFHYDWIFLNDQPFDDNFKRITTSLVSGTTRYGEIPKEHWSYPDWIDQDRAREVREEMKEKKIIYGHSESYRHMCRYESGFFFRHPLLQEYEFYWRIEPGVELFCDIPYDPFLFMKENDKKYSFVMSMYEYEGTIPTLWDSVKQFMDDHPEHIAEGNSLRFLSDDNGKTYNKCHFWSNFEIGSLDWLRSKEYLDYFDFLDRAGGFYYERWGDAPIHSIAAGLLLKKEQLHFWDEISYYHIPFTHCPRDEQLRMDLRCSCDPSGNFDWRGFSCLSRYYKTNNIPLPPGVDEYSWLAIFGIIVGLLAVAGIVATAVNHQARSHALQEVQYLYWQSQTLWERYQKEKREWERERMGRAWSP

SEQ ID NO: 45583 - DNA, 1188 bp, Aspergillus nidulans FGSC A4
  CDS (1)..(1188)
atggctgtcgctagacctattcgcatgctctctgcggcatgcgtggtactcgtgatttttctggtgttccagatgaagaggagcccttcatatgtcggcatggggccaggcgaatacaacggcatgactgcggaccctctgaatgatccaaccggtgagcctgatggctatctgtggcgcgccgacgaacacgactacgctcctgacagcaccaactccgcccgaaccaatgcagccatcatctccctcgtgcggaacgaagagctgaacgagctgcttccaagcatgcgcgacttggaaaggacatggaaccacaaatttaactacccatggattttcttcaacgacgtgccgttcaccgaggagtttaagaaacgaacacaggctgagactaaggccaaatgtcaatacgaattggttcccaaagagcactgggaagtccctagcttcattgacatgaaccttttcaaagagtccgcggcgctcctgaaagagaagggattacagtacgccgataagatatcctaccatcagatgtgccggtggaacagtggcatgttctacaagcacccagcgcttaaagattatcgctactactggcgcgtggagcccaaagtccagttcttttgtgatgtcgattatgatgtcttccgcttcatggaggaccgcaacaagacttacggtttcacgattaatttgttcgatgctcccgagagtatcccatccctgtggccgacgacacaggagttcctcgccgcgaatccatcttacctctccgataacaacatgatggactggttgactgacgaccagctccgaccggaccacacccgcgatgcgaacggatactcgacctgccatttctggtccaactttgagattggtgatatggagttcttccgcggtgacaaatactctgcgtactttgatttccttgatcacgctggtggtttcttctacgagagatggggtgatgctcctgttcattcgatcggtttgggattgttcgaggacaagaacaaggttcattggttccgcgacatcggataccgccatattccttacttcaactgccccaactcgcccaaatgttccgcttgcacccctggcaagttctacgaaggcgcatcgttccttgctaaggaggactgccggcccagctacttcaagcacgttgggacccattaa

SEQ ID NO: 45584 - protein, 395 aa, Aspergillus nidulans FGSC A4
MAVARPIRMLSAACVVLVIFLVFQMKRSPSYVGMGPGEYNGMTADPLNDPTGEPDGYLWRADEHDYAPDSTNSARTNAAIISLVRNEELNELLPSMRDLERTWNHKFNYPWIFFNDVPFTEEFKKRTQAETKAKCQYELVPKEHWEVPSFIDMNLFKESAALLKEKGLQYADKISYHQMCRWNSGMFYKHPALKDYRYYWRVEPKVQFFCDVDYDVFRFMEDRNKTYGFTINLFDAPESIPSLWPTTQEFLAANPSYLSDNNMMDWLTDDQLRPDHTRDANGYSTCHFWSNFEIGDMEFFRGDKYSAYFDFLDHAGGFFYERWGDAPVHSIGLGLFEDKNKVHWFRDIGYRHIPYFNCPNSPKCSACTPGKFYEGASFLAKEDCRPSYFKHVGTH

SEQ ID NO: 45585 - DNA, 1206 bp, Candida glabrata CBS138
  CDS (1)..(1206)
atgtcgaaacttagaatacctcctggtaaggaacctctggtgaagagaattggtatcgctttggtacttttcctgtccaccttcttcctctactctactgtttctggcggtgagttcttccactctggcaagcctgtgaagggtgcttctactgctatcacgggtaacactggttacaagtacacttatgccgacgaggacggccattacccagaaagcaagaaggttagagctactttcgtgactttggtccgtaacaaggacttgtgggaactgctgccaacgatcaagaacgtcgaagacagattcaaccgccatttccactacgattgggtgttccttaacgatgagcccttcactcaggaatttatcaccaccaccactgctatgacctctggtaagaccaaatacggtctaatccctcgtgagcactggtcctaccctgaatggatcgaccaggaaaaggccagactcaccagagaagaaatgaagaagcaaaagattatctacggtttctctgagccttatagacatatgtgtcgtttcgagtccggtttcttctacagacaaaaagtccttgatgagtacgaatactactggcgtgtggaacctggtaccaagttgcactgtgatgtcaattacgatgtctttaagttcatgaaggacaacggtaagaagtacggtttcaccgtctctttgttggaatacgaagcaaccatcaagaccttatggcaaaccactgttgaatttatcaagaagttcccacaacacttggcaaagaacagcatgttggatttcatctctgacgaccaaggtgagtcttacaacttgtgccatttctggtccaactttgaaatcgcctccttggacttatggagaggtgaagcctacagtgcttactttgattacttagaccatgctggtggtttcttctacgagagatggggtgatgctccagttcactcaattggtgctgcgttgttcttggacagagatgaaattcaccacttcggtgacttgggatactaccatcctcctttccatgcttgtccaattgacgaaaacatcagattatctaacagatgtgattgtcatccaaacaaggactttacttgggtgccatactcttgtgctctaaagtactacaacgttaacaagttgacaaagccacttggatggcaagagcacgttggcatgaaggtctga

SEQ ID NO: 45586 - protein, 401 aa, Candida glabrata CBS138
MSKLRIPPGKEPLVKRIGIALVLFLSTFFLYSTVSGGEFFHSGKPVKGASTAITGNTGYKYTYADEDGHYPESKKVRATFVTLVRNKDLWELLPTIKNVEDRFNRHFHYDWVFLNDEPFTQEFITTTTAMTSGKTKYGLIPREHWSYPEWIDQEKARLTREEMKKQKIIYGFSEPYRHMCRFESGFFYRQKVLDEYEYYWRVEPGTKLHCDVNYDVFKFMKDNGKKYGFTVSLLEYEATIKTLWQTTVEFIKKFPQHLAKNSMLDFISDDQGESYNLCHFWSNFEIASLDLWRGEAYSAYFDYLDHAGGFFYERWGDAPVHSIGAALFLDRDEIHHFGDLGYYHPPFHACPIDENIRLSNRCDCHPNKDFTWVPYSCALKYYNVNKLTKPLGWQEHVGMKV

SEQ ID NO: 45587 - DNA, 1392 bp, Candida glabrata CBS138
  CDS (1)..(1392)
atggctattttcttgtcaaagaggctgatcaggctatgtgccatggtcaccgtgttgttgctactattggcaactttgaacacacaccagtccagttctcaatatgtgagcggttatctgccatcgcaattgaggttaccagacagttctaactttggcttccctagtggtggtgcctccgatgtcacggtaggccaaaccaccgaacttgaggaccctaccaaagagctagaggctgccagagccaaggctgacaaggataccgatgctggtaatatttccaatccggacgagaaggcaccaggcgattcaggcaaagctctagagcaagctgccaatgctgaggccgctgttaaggatatgaccaagaaggatattgaggagtacctggccccatcttttgccaacaagggtaagagaccaaaggccgcctttgtcactctgattagaaacagagagctaaacgacatcttggaaccaatgaacatggttgaaaagagattcaacaagaactaccattacccatgggtcttcttgaacaacgagccatttaccgaagaattcaaggaaactgtcaaaaagcatgcctctggtgaagttatcttcgacttgattcctaaggagcactggggctatccagattatgttgaccaagataaggccgctatcgagagaaagaagatggccgacaagaatattatctacggtgatagtgaatcttatagacacatgtgccgtttccaatctggtttcttctggagagaaaaggctttagaagactttgactggtactggagagtcgaaccaagcacaaagatttactgtgatattccttacgatccattccaatacatgcaagacaacaagaaggcctatggtttcacaatcactatccatgaatacagatctactatcgaatctctttggaagaccgtcaaaaacttcatcaaggacttccctcagtacttggccaaggataacttggagaagtttgtctctgaagacaacttagaagaatacaacttgtgccacttctggtctaacttcgagatcgctaacttgaacgtttggagatcaccagcttacagagatttctttgattacctagataagactggtaactttttctatgagagatggggtgatgctcctgtccattctatttttgtctctttgttcttaccaaagagctacttacactatttcaacgattttggctactaccatcctccttataaccactgtccaattgacaatgaaattttcagagacagaaactgtgactgtactcaaaaggatgacttcaccttcaagggttattcttgtggtattcaataccataatgctcaaggtatcaagaaaccaagcaattgggaagattacagcgattaa

SEQ ID NO: 45588 - protein, 463 aa, Candida glabrata CBS138
MAIFLSKRLIRLCAMVTVLLLLLATLNTHQSSSQYVSGYLPSQLRLPDSSNFGFPSGGASDVTVGQTTELEDPTKELEAARAKADKDTDAGNISNPDEKAPGDSGKALEQAANAEAAVKDMTKKDIEEYLAPSFANKGKRPKAAFVTLIRNRELNDILEPMNMVEKRFNKNYHYPWVFLNNEPFTEEFKETVKKHASGEVIFDLIPKEHWGYPDYVDQDKAAIERKKMADKNIIYGDSESYRHMCRFQSGFFWREKALEDFDWYWRVEPSTKIYCDIPYDPFQYMQDNKKAYGFTITIHEYRSTIESLWKTVKNFIKDFPQYLAKDNLEKFVSEDNLEEYNLCHFWSNFEIANLNVWRSPAYRDFFDYLDKTGNFFYERWGDAPVHSIFVSLFLPKSYLHYFNDFGYYHPPYNHCPIDNEIFRDRNCDCTQKDDFTFKGYSCGIQYHNAQGIKKPSNWEDYSD

SEQ ID NO: 45589 - DNA, 1275 bp, Candida glabrata CBS138
  CDS (1)..(1275)
atgcatgcgcatcaagtcaatattaaggccgtcatactgctcactacattaaccgtgctggtgtggttaccatcctttcgagaatggaatcgtatcttaagtttaagaagcaaagatcagcactatttagacaagtcagcactgatacgatctaaatatctacagaaaaccagagatactatttataaacctctcaaaatgtcttcacatactgctgctgataataataatctcataactacatctatggatattaataactttgagaaacaaaatgcaacatttgtgatgctggctcggaatagcgatgtgaatgatgcagttgaggctatcaaatctctagagtcacgcttcaatcacaaataccattacgattgggcttttttcaatgatgtaccctttgatgaagatttcatcaggcgtacaacagaagttgccagcggcaagactcaatatggactgataccgaaagataactgggatataccgtcatggatcaataaaacaacgatgaacaataatatgaatatctttaatgaagaaaatatgctgtatggctcatctatatcatacagaaatatgtgtcggtacaattctggatttttctttaggcagaaattacttgatggctatgattattatatgagagtggaccctgatgtacattttctttgcgatcttccttacgacccttttgaaatgatggtggttaaccataagaaatacggatttgtaataaccatgcatgaaataggcagcacaatccctacactttgggatactgttaaaaaatttataagtcaacacagtgacctaatcaacaaaaataatctacttggctttttaacagataagaatgatcttggaaagaacaaatttaaagcacacttccaagacgattacaatctttgccatttctggactaatttagaagttggtgatctgaattttttcaggagtgacaaatatttgaagttttttgatttcctagacgccaacggtgggttctactatgaaagatggggtgacgcacctattcattccattgcagcagctttgttcttagataaggatgaaattattcattttgaagagattgggtatcaccatatgccatattaccattgccctatgccgaatgcattttgggattctcacaaatgcgcctgttctagatctggtcaattcaacgttataaataatgaaataaactgcttgcctagatattggaaacataatggtaaaacgtttgtcaaagaaccagggcatttttga

SEQ ID NO: 45590 - protein, 424 aa, Candida glabrata CBS138
MHAHQVNIKAVILLTTLTVLVWLPSFREWNRILSLRSKDQHYLDKSALIRSKYLQKTRDTIYKPLKMSSHTAADNNNLITTSMDINNFEKQNATFVMLARNSDVNDAVEAIKSLESRFNHKYHYDWAFFNDVPFDEDFIRRTTEVASGKTQYGLIPKDNWDIPSWINKTTMNNNMNIFNEENMLYGSSISYRNMCRYNSGFFFRQKLLDGYDYYMRVDPDVHFLCDLPYDPFEMMVVNHKKYGFVITMHEIGSTIPTLWDTVKKFISQHSDLINKNNLLGFLTDKNDLGKNKFKAHFQDDYNLCHFWTNLEVGDLNFFRSDKYLKFFDFLDANGGFYYERWGDAPIHSIAAALFLDKDEIIHFEEIGYHHMPYYHCPMPNAFWDSHKCACSRSGQFNVINNEINCLPRYWKHNGKTFVKEPGHF

SEQ ID NO: 45591 - DNA, 1281 bp, Candida glabrata CBS138
  CDS (1)..(1281)
atgggagctgttaagaagaagcttatgccgaagtcggcgatgtttgtaaggaagtatgaaaagaccattcgtgttgggtttgcatctttccttatggcgctgactgttctatttctgatgcacaagcccgatgcgggcactactgcgatggcaccccagcagacaatggctggtttcactagcgttgttaagaatggccagcctgggtatgtgattcctgcctctgatctactgcaggacgtcaaggaacatcctctggatgatggtgtcaaggaaaaggctgcatttatcactctggctagaaatggtgacttgtggtctttggtaaatacaataagacatgtcgaggacagattgaaccatcgttatcactatgattgggtattcctgaatgacaaaggtttcaccgatgagtttatccgcttgacatctgcattggtctctggtaaagctaagtacggtaaagttcctaaagaacattgggaagttccatctcacattgacaaggagaaatatgaaatctctaggcgtaaaatggtcctagacaaagttccatacggtgattcgacaccatacagacacatgtgccgttaccaatcaggtcttttctatagacatgaacttgtgcaagagtacgactattactggagagttgacacagacatcactgttttttgtaatttccaatacgacatcttcaagttcttgagacagaacaagaagaagtacgggttcgtaatttcattgacagaatacgaggagaccattccaacgttgtgggctactgtgaaggaattcatgaagaaatacccacaacacattcataagaataacttcttgaactttatcagtgacgatggcggtgagacatacaatggctgccatttctggacaaatttcgaagtcggtgacttgaacttctggaggtcacaagcttacacggatttcttcaatttcttggatcagaagggtggtttctattacgaaagatggggtgatgcgcctgttcattccattgctgcagcactgctgttagacaaggatgagattcatttctttgacggtttcggttaccaccacccagatttccaatcttgtccacatgaagaagaagtcagactacagaacaaatgtacctgtaattttagcaaggataagatttggatgacgtactacttctgcaatctgcgttactttgaagctaaagaaatcggtctaccaccaaaaattgaagccaacttagacgaagaatacaagaagaaattgaaggtttctagctaa

SEQ ID NO: 45592 - protein, 426 aa, Candida glabrata CBS138
MGAVKKKLMPKSAMFVRKYEKTIRVGFASFLMALTVLFLMHKPDAGTTAMAPQQTMAGFTSVVKNGQPGYVIPASDLLQDVKEHPLDDGVKEKAAFITLARNGDLWSLVNTIRHVEDRLNHRYHYDWVFLNDKGFTDEFIRLTSALVSGKAKYGKVPKEHWEVPSHIDKEKYEISRRKMVLDKVPYGDSTPYRHMCRYQSGLFYRHELVQEYDYYWRVDTDITVFCNFQYDIFKFLRQNKKKYGFVISLTEYEETIPTLWATVKEFMKKYPQHIHKNNFLNFISDDGGETYNGCHFWTNFEVGDLNFWRSQAYTDFFNFLDQKGGFYYERWGDAPVHSIAAALLLDKDEIHFFDGFGYHHPDFQSCPHEEEVRLQNKCTCNFSKDKIWMTYYFCNLRYFEAKEIGLPPKIEANLDEEYKKKLKVSS

SEQ ID NO: 45593 - DNA, 1236 bp, Candida glabrata CBS138
  CDS (1)..(1236)
atgaaggagtggcttatttgggtagtagaggtgtttatatggtggggacagctatggttctgcggtgatattgatcgcaactattttgagagaagtgtggcagtgaagacaaagtacgatggggttaggcgacgtgagtattttgtgccattgaagctggccacgaatagttatgacgacatggctgttttcaccgaactagagtattctcccaaaagggagaacgcaacgttgttgatgcttgttagaaattgggaattgagtggagccctggcgtccatgcggtcgttggaggatagattcaacaggaagtataattatgattgggtcttcttgaatgatgtgccgtttgatgaggatttcatgctggcaacatctgctatggctagtggtatgacttactatggtatggtgccgccccatgaatggtctactccaacttggattaatgaggaccagtacgcacagtgcctgagagacatggaaggcagcggtgtcatatatggtggttcaagatcatacagaaatatgtgcaggttctactctgggtttttctacaagcaggatcttttgaaaaactatgattactacatgagagtagaacccaacgttgagtatttctgtgacttcccatatgacccatttaaagtcatgcgtgcaaataaatacaaatatggcttcttaatgtcattatatgagtacgaaaacactattccacacttgtggcatgcagttgaggattacattaacgaatatggtcacaaactcaattttgaaaacaattcctacagttttttagtggataaagaccatttcagcccaaataccatgggtatcatagagtcacacaccgattacaacctatgccatttctggtccaattttgaagttggagatttaagtttcttcagaagtaaagagtacgaagagttcttcgatttcatggatcaaaagggaggattttattatgaaagatggggtgatgcaccaatacatacaattgctgcatctctactattgaacactagtgaagtgatacatttcgatgaattgggctacagacatgaaccatatctctcctgcccgagatctctgggtatacaattacaacaaagatgcctgtgtgatgtaaactccgatgtcaatttggacatttcattggcaagttgtctacctagatggtggaggaacgggtctggcaaaacgtttgttaaacccaaacaatttacagattaa

SEQ ID NO: 45594 - protein, 411 aa, Candida glabrata CBS138
MKEWLIWVVEVFIWWGQLWFCGDIDRNYFERSVAVKTKYDGVRRREYFVPLKLATNSYDDMAVFTELEYSPKRENATLLMLVRNWELSGALASMRSLEDRFNRKYNYDWVFLNDVPFDEDFMLATSAMASGMTYYGMVPPHEWSTPTWINEDQYAQCLRDMEGSGVIYGGSRSYRNMCRFYSGFFYKQDLLKNYDYYMRVEPNVEYFCDFPYDPFKVMRANKYKYGFLMSLYEYENTIPHLWHAVEDYINEYGHKLNFENNSYSFLVDKDHFSPNTMGIIESHTDYNLCHFWSNFEVGDLSFFRSKEYEEFFDFMDQKGGFYYERWGDAPIHTIAASLLLNTSEVIHFDELGYRHEPYLSCPRSLGIQLQQRCLCDVNSDVNLDISLASCLPRWWRNGSGKTFVKPKQFTD

SEQ ID NO: 45595 - DNA, 1599 bp, Candida glabrata CBS138
  CDS (1)..(1599)
atgagggtaaaggtcaaaaggtgggtaaatgatgcagtagaggaagtattagattggctattgtcaaccattgcgatatatatgtatattacagccattatttgtgggacattcttatattttacttacccttctcgaactgatatacgattttactccgagcaggatttgggtaccgaaagagatgcaccattctactatggttgtgtgaacacagagggatatttacaagcaccagaatataagaagatgaatgcagcctttgtcatgcttacgcggaataacgaattgaaggatgtattgtcttcaatgaatagcattgaagcgcatttcaatcaatggtttaaatacccatacgtgttcctgaatgacgaaccgttcagcgaagaatttaagaaatcaatacgtgaagctacagatgctgatatcgaatttggtacactagatgaaagtcaatgggagtttccagaagaagtaagaaacacattcgaatatcagaatgccataaccgatcagggagacagaggtatcttgtatggtaatatggaatcataccataagatgtgtcggttctattcgggcatattttacaaacatccattgatgcagaaatatgaatggtattggaggttagaacctgatgtggagtttttctgtgatttgacatatgatccattttttgaaatgcatagaagaaataaaaagtatgcattcaccatgattatacctgaaatttactggactgtgccgaacttgtttaggtacacaaaggcatttattagagagtatggcgtaaaagtggggacactttggaagcttttcgcaacaaattatgatattctgaagaccgataaaggaagagatgaatttactgactatgaaaatatggttagagatgatcttcatcagtgggtaaaatttggtggtgatgtggaacccaagttatcagagaaggtagctatcgaccatttacttgaatcggaaactgcagacgatgacgtagggttgatgttcttggtgaacagggctaggtcaaaggtaccactaatcgaagatgaatttgagggagaagaatataatttatgtcatttctggtcaaacttcgagatagcaagattggatgtttttgataacgaagtctacaacagttatttccaatatttagaagctagtggtggtttttggaaagaacgttggggggatgcaccagtacattctattggattagcattgactctagacgtagacgatatacattattttagagatattgggtatatgcattccattttgaaacattgtccaaagaactcacctgatttaaacgaattccaatacaagcccgctaataagaaatacaagaggagctcctggactagatatgatactccaattgaagggggtagcggttgtcgttgtagatgtcctagtaaaccggctgaggtagaagatactatcacattttgttttgaaaaatggatggatgtgacacatttgaagaagggagaggtagagctataccaactattcaacattgaagagaaagaggaaatggtgagaaatgattttgaaaggcaccatcaacagcagaatcagtaa

SEQ ID NO: 45596 - protein, 532 aa, Candida glabrata CBS138
MRVKVKRWVNDAVEEVLDWLLSTIAIYMYITAIICGTFLYFTYPSRTDIRFYSEQDLGTERDAPFYYGCVNTEGYLQAPEYKKMNAAFVMLTRNNELKDVLSSMNSIEAHFNQWFKYPYVFLNDEPFSEEFKKSIREATDADIEFGTLDESQWEFPEEVRNTFEYQNAITDQGDRGILYGNMESYHKMCRFYSGIFYKHPLMQKYEWYWRLEPDVEFFCDLTYDPFFEMHRRNKKYAFTMIIPEIYWTVPNLFRYTKAFIREYGVKVGTLWKLFATNYDILKTDKGRDEFTDYENMVRDDLHQWVKFGGDVEPKLSEKVAIDHLLESETADDDVGLMFLVNRARSKVPLIEDEFEGEEYNLCHFWSNFEIARLDVFDNEVYNSYFQYLEASGGFWKERWGDAPVHSIGLALTLDVDDIHYFRDIGYMHSILKHCPKNSPDLNEFQYKPANKKYKRSSWTRYDTPIEGGSGCRCRCPSKPAEVEDTITFCFEKWMDVTHLKKGEVELYQLFNIEEKEEMVRNDFERHHQQQNQ

SEQ ID NO: 45597 - DNA, 1434 bp, Candida glabrata CBS138
  CDS (1)..(1434)
atggagaccagggggttgatacactggttgcggtactactacaaagtctttcaccggaacaggactctgaaagcggtcgctgtgcttctgagctttgtgctgttcatatactacgtgcgtaactcagacatcactgataaactggttacgtttgctggcgaggagaacgtcaagagcttacacgctgtgaaggcgaacatcagggcgaactggaaccaggaggacgatggggacaagttcaagaaggacctaagtgcttctttgcaagtgaagctcgacaacatactggggactcaaaacatgtcccttgccgagatgggcgagctgccaatcgatgcagagacgatcgaggagcagaagagtattcgttacgccaagctgttgaaggatcacaaggccacggagaacagcacaatggggttcctcttcaagtctttggctaacgaagggctgaaaccctcagcatgcatatattcttttgtcacgggcaactcagaattgaggaagctactaagaactatagagtctgtacagaagaagttcaatcacaagttcggttacccctgggtgatcatcagtcccgagcccttgtcagagaagttccatgccgacgttgaaaagaaactagaagagttcacatctgctatagacgatgtcaagactgaggtggagtttggaaccgtgccgcctgaacattgggggttccctgattttatcgactcaaccgtggcttcaaacgccagaattgatctgttcgatattcccaacggtgactcgcaattattcagattaatcaatagatacaacgctggcctggcagctcatcacacattgctgaaaaagtatgattggtacatgcgtgtgagccccggcatacggttgaattgtgagatggaatacgacataatgaggtggatgcaggataaccgtaaaatatttggattcactttatcaatcaaagaaattgaacgttctgcaaagaaaatatggggccataacttgaatttcactgcacacaaccgagaattctacaaccccattgaaaagtcaagtttaagatcttacatccaagttggaagagatacatacaattattgttccttctctaccgatttgcaaattgtgaatctgaacttcttgagatcaccagtatacacaaaatattttgagtacatggacaaagcaggaggcatattctatgagagatggtccgatagcattatccagtcaatggcatattcaactatggtaccagctaaaatgattcaacatatcagcccaatgggataccagaataaagagacagtagtgtgccctgcagatgatataatgtggagggaatataaatgtgaatgtgatcaaggtagtgatatttcctttaaccgtgacttaacttgcacgcagagatacaaagacactcaaggaatgttttga

SEQ ID NO: 45598 - protein, 477 aa, Candida glabrata CBS138
METRGLIHWLRYYYKVFHRNRTLKAVAVLLSFVLFIYYVRNSDITDKLVTFAGEENVKSLHAVKANIRANWNQEDDGDKFKKDLSASLQVKLDNILGTQNMSLAEMGELPIDAETIEEQKSIRYAKLLKDHKATENSTMGFLFKSLANEGLKPSACIYSFVTGNSELRKLLRTIESVQKKFNHKFGYPWVIISPEPLSEKFHADVEKKLEEFTSAIDDVKTEVEFGTVPPEHWGFPDFIDSTVASNARIDLFDIPNGDSQLFRLINRYNAGLAAHHTLLKKYDWYMRVSPGIRLNCEMEYDIMRWMQDNRKIFGFTLSIKEIERSAKKIWGHNLNFTAHNREFYNPIEKSSLRSYIQVGRDTYNYCSFSTDLQIVNLNFLRSPVYTKYFEYMDKAGGIFYERWSDSIIQSMAYSTMVPAKMIQHISPMGYQNKETVVCPADDIMWREYKCECDQGSDISFNRDLTCTQRYKDTQGMF

SEQ ID NO: 45599 - DNA, 1335 bp, Kluyveromyces lactis NRRL Y-1140
  CDS (1)..(1335)
atgcaaacttcatgcatatataagatgatctatagcgatggcagttccctagctgggtattcgatgttcgcccttcggagagtgtaccttggtgcctacgctgctattgtatcactgtcattgactttataccttatccgtgtgggttttgctgtcattaaggaagtatatctgcatcaaagaatagaacaaggctttttccctagatccgaagatgtcctacacaaatatgacaacataaggcggttcaataagagttttggtgaattgaaaccggcaagcaattcatatttagatgatttgatcattccagttgagagagattctatcattcaagaaagagagaatgccacaatattgatgttatgccggaattgggagataccaggtgttttgcaatctatgcgctcattggaagataggttcaatagacggtataaatatgactggacgtttctcaatgatgtcccattcgatgattacttcattgaagccaccagtgctatggctagcggtaaaacaaagtacggattgatacctagtgaagattgggaccgcccagcttggatagatgaagaattattcgaggaaaggctgcagatgctaaaggaaaagaaggtaatatacggagactcgaaatcgtatcgtaatatgtgtcgtttcaatagtgggttctttttcagacaaaagcttttggaccaatatgattactattttagagtcgaacctgatgtggaatacttctgcgatttcccatatgatccattcaaagtcatgcgggagaagaagaagaaatacggatttgtgatatctatctttgaatatgaggatacggtaacgacattatgggatgctgttgaggaattcatggatacttatccagaaattctacatcctaacaacagtctaagctttttgacggataccacgatggtgggacgttttttccctgttgttgattcgaatacagactataatctatgtcatttctggtccaatttcgaaattggagatctaaatttctttagaagtgacgagtatcttcagtatttcaattacttggactccaagggtgggttttattatgaacgttggggtgatgcacccgtgcacagtataggtgcctcattacttctagacaagaatgaaatccaccactttgatgaaattggatacagccatgttccatttgaaacatgtcccacgtccatatcagcacgattagtgctccgttgtatgtgtgatcctaacggcgaatctaatattcccatccacccaaacagttgcttgatgagatggtggaaaaacggtgccggcaaactatttattagatga

SEQ ID NO: 45600 - protein, 444 aa, Kluyveromyces lactis NRRL Y-1140
MQTSCIYKMIYSDGSSLAGYSMFALRRVYLGAYAAIVSLSLTLYLIRVGFAVIKEVYLHQRIEQGFFPRSEDVLHKYDNIRRFNKSFGELKPASNSYLDDLIIPVERDSIIQERENATILMLCRNWEIPGVLQSMRSLEDRFNRRYKYDWTFLNDVPFDDYFIEATSAMASGKTKYGLIPSEDWDRPAWIDEELFEERLQMLKEKKVIYGDSKSYRNMCRFNSGFFFRQKLLDQYDYYFRVEPDVEYFCDFPYDPFKVMREKKKKYGFVISIFEYEDTVTTLWDAVEEFMDTYPEILHPNNSLSFLTDTTMVGRFFPVVDSNTDYNLCHFWSNFEIGDLNFFRSDEYLQYFNYLDSKGGFYYERWGDAPVHSIGASLLLDKNEIHHFDEIGYSHVPFETCPTSISARLVLRCMCDPNGESNIPIHPNSCLMRWWKNGAGKLFIR

SEQ ID NO: 45601 - DNA, 1284 bp, Kluyveromyces lactis NRRL Y-1140
  CDS (1)..(1284)
atgagtggcatattgcataatgtacagaagagaacatcagctatcaagactttgttgctagtgctgttcttgtttcttgtgatatacactatgagaattgagaatgttgggaaagtgaaaaccggatcgagggttgatgatagcatggaatcaaaggataatagattggaatatatgaaatcaagtgattcccagcttccaccagttagtcttaatagagtcctagatcaaaagtgggaaaaacgctaccctttcgacgctgctggatctggggctgtgtatgactccgtggttcatgggaccaaggataaacccaaggcatgtttcgtatcattggtccggaatgaagaactatgggatttggctaaatcgatttcatctgtcgaagatcgtttcaacaataagtttaattatccatggatcttcctaaacgatgaaccatttaccgaagagttcaaagaacgtatctctgccattgttccaaactctcaattcggtgttataccgaaggaacactggtcatacccagattatgtttctaaagaacgtgcagctcaaactagaattgacatgcaggatataatctacggtgcttccgagagttatcgtcacatgtgtcgctttcaatcggggttctttttccaacatccattattagccgagttcgattggtactggcgtgtcgaaccaagtaccgaattgctatgctccatcgattatgatatcttccaacagatgcaggataaagacttaggtctcggattcgtcatttctatccatgaatttgtcatcacaatcccaactttatggaacactactcgtgggttcgcagaaaaacattcagaatacatccataacgacaatttgttgaagttcatatccgatgatggtggtgatagttataacttgtgtcatttctggtcgaatttcgaagtcgccaacctaaatttctacagatcaaaagcatacacggactatttcgattatcttgatcgctcaggtggattcttctacgaacgctggggtgatgctcccgtacattcaattgctgcatcgcttttcttgcctcgcaacaaattgcactttttccaagatattggatatcatcaccctccatacaacaattgtccgttcgacagcggaattagagccaagggtaaatgttactgtgacccaaaaaccgatttcacattcagggattacgcttgtggtattcaatattacgaggcccaaggcattgaaaaaccctttaattggaaagattatagtggccgaggctattga

SEQ ID NO: 45602 - protein, 427 aa, Kluyveromyces lactis NRRL Y-1140
MSGILHNVQKRTSAIKTLLLVLFLFLVIYTMRIENVGKVKTGSRVDDSMESKDNRLEYMKSSDSQLPPVSLNRVLDQKWEKRYPFDAAGSGAVYDSVVHGTKDKPKACFVSLVRNEELWDLAKSISSVEDRFNNKFNYPWIFLNDEPFTEEFKERISAIVPNSQFGVIPKEHWSYPDYVSKERAAQTRIDMQDIIYGASESYRHMCRFQSGFFFQHPLLAEFDWYWRVEPSTELLCSIDYDIFQQMQDKDLGLGFVISIHEFVITIPTLWNTTRGFAEKHSEYIHNDNLLKFISDDGGDSYNLCHFWSNFEVANLNFYRSKAYTDYFDYLDRSGGFFYERWGDAPVHSIAASLFLPRNKLHFFQDIGYHHPPYNNCPFDSGIRAKGKCYCDPKTDFTFRDYACGIQYYEAQGIEKPFNWKDYSGRGY

SEQ ID NO: 45603 - DNA, 1221 bp, Kluyveromyces lactis NRRL Y-1140
  CDS (1)..(1221)
atgagcgagaccagaatcaataaggagcgttctgcgcgtctccttgggataattatcgttgctgcaattaccatctatttgttgttccaaggtgcttcatacaatggtggatacagcactggtgtgtcatcttcgcagaatgcaaatcagtacgagaccgttcgcatgaagggtgattcccgtgttgttgtagacccaaacacagggttgaagtacaccaccgtcgattccggtaagtacactggctccaaggttaaggcaacttttgtgactttggcacgtaacggtgatttgacagaattattgtcatctattaggtctgttgaagatagattcaacaagaagttccaatacgattgggtgtttttgaacgatgaagagttcacagatgacttcaagaatacagttgcttctatgattagtggtaacgtcaagtttggcctaatccctgtcgaacactggtcctatccaagctggatcgaccaggaaaaggctgctcaagtcagagctgatatgaaagccaagaagattatctatggtcattcggaatcatacagacatatgtgtcgttatgaatcaggattcttctatagacacaaattgatggatgaatacgagttctactggcgtgttgaaccaggtgttaagatctactgtgatatcgattacgacattttcaaattcatgaaggataacgataagaagtacggtttcaccatctctttgagagaatacgaagctaccatagaaacgttgtggaagaccgttttcgaatttaaccaggcaaacccacaatatttgcacaagaacaacatgatgaagttcatctcagatgataacggtgcttcttataacttgtgtcatttctggtcgaacttcgaagtcgcatccctagaactatggagaagtgaagcctacacaaagttcttcgatcatttggatcatgctggtgggttcttctacgaaagatggggtgacgcccctgtccattctattgctgctgcattgtttttggacaagaaccaaatccatcatttcaatgacgtcggttactaccacgttccattccattcctgtccagtttctgatgcattcagaagggatcacagatgtgtctgctccccaagtgatgatttcacttggaaatcttactcctgtactccacagttctacaacgttagaaacttgaagaaacctgagggctggcaaaacttcacatga

SEQ ID NO: 45604 - protein, 406 aa, Kluyveromyces lactis NRRL Y-1140
MSETRINKERSARLLGIIIVAAITIYLLFQGASYNGGYSTGVSSSQNANQYETVRMKGDSRVVVDPNTGLKYTTVDSGKYTGSKVKATFVTLARNGDLTELLSSIRSVEDRFNKKFQYDWVFLNDEEFTDDFKNTVASMISGNVKFGLIPVEHWSYPSWIDQEKAAQVRADMKAKKIIYGHSESYRHMCRYESGFFYRHKLMDEYEFYWRVEPGVKIYCDIDYDIFKFMKDNDKKYGFTISLREYEATIETLWKTVFEFNQANPQYLHKNNMMKFISDDNGASYNLCHFWSNFEVASLELWRSEAYTKFFDHLDHAGGFFYERWGDAPVHSIAAALFLDKNQIHHFNDVGYYHVPFHSCPVSDAFRRDHRCVCSPSDDFTWKSYSCTPQFYNVRNLKKPEGWQNFT

SEQ ID NO: 45605 - DNA, 1569 bp, Kluyveromyces lactis NRRL Y-1140
  CDS (1)..(1569)
atgaggaatagaaccagaaagctactgatagtgataacaattgcacttctaatttgtgttggtgtacaccatattgtgcgaacggaagaagctgcaatatgggaagatgctgtagtctactcctcagcggatcgcgcctctaagaaggaacatcccttctttgaagggtgtgtggatactgcagaatatctaaatcacaaaaaatatgaacgacagaatgccacatttgtgatgttaacaagaaacgaggagctggatggggtaattcacactatgagatctgtggaaagaagattcaatcaatggttccaatatccgtacgtttttatgaacaacgaaccattcactgatgaatttcaagaaagagtccgatcattaacaactgccaacataacgtttgcccttgtagatgagtcctcatggaatttccctaaggagaacactccactatttcagcattacgttgaatcccagggtgatcgtggaattatgtatgggaatatggtttcataccataagatgtgcagattttattccggactcttctataaacaccctgcagttaggcaatacgagtggtactggcgtattgaaccagatgtggaattcttctgtgatctaacttatgatccattctttgaaatgaagaaggcaggaaagaaatacggtttcacaatttttatcaaagaaatatattggactgtgccgaacttatttagagcaaccagaagtttcatcaagcaaaacgatatcaaactcggatcactgtggaaagcctttattaagaatagaaacgttttactcggagatgattatttaaattcctttgtcaatgaactagaagaattgaacgaagaaatgacccacgaatttctgattgactatttgaagaagaattgggcaagagaaaaagtcatagatgacgagctaatacaagaaattgctcatagggtcaggaggaaagttcctgtcgttgaagacaaatttgaccaagaagagtacaatttatgtcatttttggtccaatttcgaaattgctagagttgatgtatttgataatgaagtatacaacaagtatttcgaataccttgagtcgtggggtggattctggcaagaaagatggggggatgcgcctgtgcattcgttaggtttggccttaacattgaatgcagaagacatccattatttcagagatatcggatatcaacatactacaatcgtacactgccccaacaacaaagagggaaagcaattaccatatgtggaatcgtcaaaatacacagaaatattcgaaagagagtcatctaggatgagtgtaaaagagaaagcgttacaatatttcaagactggcaaaatagacgatggttgggatacaggaagtggatgcagatgccaatgccccgatattatagatgtggaggatacatcgcaccaatgcctcatgcaatggttcgacctagtgagcgattctccatcgcgagaagaatccctactaccgtttaatgcagcagaattaaaagtagcactcgctaatgactacaaaagacattttgcgaagaataataattaa

SEQ ID NO: 45606 - protein, 522 aa, Kluyveromyces lactis NRRL Y-1140
MRNRTRKLLIVITIALLICVGVHHIVRTEEAAIWEDAVVYSSADRASKKEHPFFEGCVDTAEYLNHKKYERQNATFVMLTRNEELDGVIHTMRSVERRFNQWFQYPYVFMNNEPFTDEFQERVRSLTTANITFALVDESSWNFPKENTPLFQHYVESQGDRGIMYGNMVSYHKMCRFYSGLFYKHPAVRQYEWYWRIEPDVEFFCDLTYDPFFEMKKAGKKYGFTIFIKEIYWTVPNLFRATRSFIKQNDIKLGSLWKAFIKNRNVLLGDDYLNSFVNELEELNEEMTHEFLIDYLKKNWAREKVIDDELIQEIAHRVRRKVPVVEDKFDQEEYNLCHFWSNFEIARVDVFDNEVYNKYFEYLESWGGFWQERWGDAPVHSLGLALTLNAEDIHYFRDIGYQHTTIVHCPNNKEGKQLPYVESSKYTEIFERESSRMSVKEKALQYFKTGKIDDGWDTGSGCRCQCPDIIDVEDTSHQCLMQWFDLVSDSPSREESLLPFNAAELKVALANDYKRHFAKNNN

SEQ ID NO: 45607 - DNA, 1251 bp, Kluyveromyces lactis NRRL Y-1140
  CDS (1)..(1251)
atgatcggtaaattacatctatcgaaaagaacggtacgaaatggtatcatattgatcacgataatcggattaatttatggattctggtcgacttatgggatcgaagatagaattgccgagttaaaaccagaaccagaatcagaaccaaaatcatcggtacaggacgagaaaccagttgaaaagttttatactgatgataggggtaatgatattatactttctttggtgcgaaacgaggaattggatggtatgttgcaatcaattagacaattcgagagacgattcaacaagaaataccattacgattggtggtttgtaaacgataaaaagttcactgaagagttcatcaatggtacttctaatgaagttagcggtaacgtaaagtatatcacgcttccgaaagaatttttcgactatccagataatatcgatcgtggaaaagctgccaaagttagagaggaaatgggcaaaaagaaaattgcttatggcgctagcgaatcgtatcgtttcatgtgtagattcaattctggattgttttacaagttaccagaactagcaaatgttgaatactattggcgtgtggaaccttacgtgaaattcggatgtgatataaactatgatgtattccagcatatgagacaaaacgacaaattatacgggtttgccatggccatgggtgaagaccaaaagacgatcccgacgttatgggaacatacgtataagtattttttcgaaatgcaccctgaacttgtcagcaaacgaaacaacttcaaattcatctcggacgatgacggagccacgtataacggatgtcatttttggactaactttgagattgcccatttaaagatattcaaagacccgagttatgggtacgaatcttatttccaatatttggactcacttggtgggtttttctacgaacgttggggcgatgctccggttcatacgcttgcatttagtttgttactagacgttgaccaaatccattttgtacccgatacagggtacgcacacaatccaaatcaagattgtccaagagataacccgttgaaagaaatattgagatgcaattgccaagcctcaaaagatttcacgtggcatcgttggagttgcgtcagtaagttctttgatgtgaatggactgcagaggccagataccttatcacaagtgaagaaacactactcatatttattaccagaaaataagaatatggacaggacacagcctatgacaacagaactcaaataa

SEQ ID NO: 45608 - protein, 416 aa, Kluyveromyces lactis NRRL Y-1140
MIGKLHLSKRTVRNGIILITIIGLIYGFWSTYGIEDRIAELKPEPESEPKSSVQDEKPVEKFYTDDRGNDIILSLVRNEELDGMLQSIRQFERRFNKKYHYDWWFVNDKKFTEEFINGTSNEVSGNVKYITLPKEFFDYPDNIDRGKAAKVREEMGKKKIAYGASESYRFMCRFNSGLFYKLPELANVEYYWRVEPYVKFGCDINYDVFQHMRQNDKLYGFAMAMGEDQKTIPTLWEHTYKYFFEMHPELVSKRNNFKFISDDDGATYNGCHFWTNFEIAHLKIFKDPSYGYESYFQYLDSLGGFFYERWGDAPVHTLAFSLLLDVDQIHFVPDTGYAHNPNQDCPRDNPLKEILRCNCQASKDFTWHRWSCVSKFFDVNGLQRPDTLSQVKKHYSYLLPENKNMDRTQPMTTELK

SEQ ID NO: 45609 - DNA, 1233 bp, Kluyveromyces lactis NRRL Y-1140
  CDS (1)..(1233)
atgcagccgaagaaaaagctcatgccaaaatcggcatttcttgtgaagaaatatgagcgtcatattagattgctgttcattgcattcatcacggttttatgtttcgtgttcattacacgttctggtaatggtagcagcgaaacgccagtgcttccaccaaagactgtcgaaccagcagtgtcgagtcctggtggtgcaaaagataagttcctgaagcctcatactgataaggttcagaacgttttttacccagaagatgatggtgttagagaaaaggcctgtatggtcaccttagcaagaaacaaagatttatggcatttggttacatctgtgagggatgttgaagatagattcaacaagaactatcattacgattgggtctttttgaacgatgaaccgttcaacgaggaattcaaaagtgttatgacagcaatggtcagtggtaccgctaaatttggtgtgattccaaaggaacactggtccttcccagactggattgaccaggataaggcggcagaagtcagaaaacagatgaaagaagacggtatcatttacggtgactccgtctcttacagacatatgtgtagatacgaatccggattcttctggagacacgagttacttgacgagtatgaatggtattggcgtgtggaaccagatatcaagttgttctgtgatattcactacgatgtttttaagttaatgaagcaaaacaacaagaagtacgggttcatcttatccgttagcgaatacgaaaaaacgattcctactttatgggaaaccaccaaaaatttcatgaaggaatacccacaacacgtcaaggaaaataatttgatgaagtttatctccaacgatggtggtaagacttataacatgtgtcacttctggtctaacttcgaaatcgcatcgctagaattatggagatcccctgcctaccgtgagtacttcgactacttggaccgttccggtgggttcttctacgagagatggggtgatgctccgattcattccattgccgctgcacttttcttagaaccagaagaattccatttcttcgacggcataggatactaccatccaggattcacttcatgtcctgtggaagaagctatcagattacaaaacagatgtacatgtgacccaggcgatgaccaaacttggggtgacagttatttctgcacaagaaaatacttcggtgcccgtggtttgaaactaccaaaggaggtcaggtaa

SEQ ID NO: 45610 - protein, 410 aa, Kluyveromyces lactis NRRL Y-1140
MQPKKKLMPKSAFLVKKYERHIRLLFIAFITVLCFVFITRSGNGSSETPVLPPKTVEPAVSSPGGAKDKFLKPHTDKVQNVFYPEDDGVREKACMVTLARNKDLWHLVTSVRDVEDRFNKNYHYDWVFLNDEPFNEEFKSVMTAMVSGTAKFGVIPKEHWSFPDWIDQDKAAEVRKQMKEDGIIYGDSVSYRHMCRYESGFFWRHELLDEYEWYWRVEPDIKLFCDIHYDVFKLMKQNNKKYGFILSVSEYEKTIPTLWETTKNFMKEYPQHVKENNLMKFISNDGGKTYNMCHFWSNFEIASLELWRSPAYREYFDYLDRSGGFFYERWGDAPIHSIAAALFLEPEEFHFFDGIGYYHPGFTSCPVEEAIRLQNRCTCDPGDDQTWGDSYFCTRKYFGARGLKLPKEVR

SEQ ID NO: 45611 - DNA, 1773 bp, Debaryomyces hansenii CBS767
  CDS (1)..(1773)
atgcctgcggtaaagactaacgatcaagggtcgattaaggactctttggaaccacacgatacatctgactcagactatgactattccgacgacgatgatgaatatgaagtctcattcaccgaggcaagacttaggaatatcaagtctatcgtacatacatcaaggcgaatacgcttacccaaacgatcacatagactatggataatgttgttgataattgtcttgtttatatactcatttactaatatggggtttcagggagcaaagaataatattcaagaagatataggaacattttccgacccattagatgaagccgaaggtcatttcatgagtgaaacaaggatatcgtctgacatagactcaccttttcaaattggatgtcgggtaccagacataactcagccaagggcgaatgcggccctcgtggtattaaccaggaattcagaggtcaaaaaagtcatcaaatctatgaagtcgatggagagacattttaaccagtggtttaattatccatgggttttcttgaatgatgagccattcactgacgaattcaagaattctgtcttgaagtatacgtcttccaaagtagagtttggcacaatcccggagaaagagtggaatttcaatgaagatattgataaagatgaattacacgagcatattgccaaccaaggagatagaagaatcatgtacggaaattctgagtcttatcataagatgtgccggtttttttcgggctatttctacaaacatgaattggtgaagaaaagggattggtattggagagtggagcccgatgttgaattcttttgcgatttgacatacgatccctttattgaaatggaaaagcgcaataagaagtatggcttcaatgttcttattggtgaattgtactacactattccggggttatttaaagagacaagggcatttataaggaaaaacaacgttccattgggtaatgcatggagcttgtttatcacggactataagtacgcagtaggtaaaaatgctgccaagtacgatggtttcaaatctaagtcggatatattgcgagagatagaaatgaacttaacggtcaagaagttcttatcaatgaaggacaaaacggatgaacaaatccccgagtatgatctgtggttactagatgaagtaatttctaagtctaaaaagccagcgttatatgaagatagaattgacctcgaagagtacaacatgtgccatttctggtcgaattttgaaattgcaagaaccgacttgtttaattccccaagatacgaagcgtattttgaccatttagagaagagcggaggattttataaagagcgatggggagatgcccctgtacattcacttgctataggaatgttacttgacctcaaggatatacattacttcagagacgttggctacaggcactcagggttgagccattgccctgggaactcgagaagataccaactaaaatatgaaccaagcgaaaggtactaccagaaggatttgagtaaggactcggcatggctttcgccagacagcccccgttctaatggaatcgggtgtagatgtaggtgtcccaagacaaaggaaattgaagattcgctgtcgtcgtgtgtccgttcgtgggccgatatcaccagtaacagatacatacctcccgaacctgtcgacgttgatttttgggaagaagaaatcaaaaaccgtttaaacaaattccttgcaaccggcggaatcctaggccaaaacaacattgccgaaaagttgctcagctag

SEQ ID NO: 45612 - protein, 590 aa, Debaryomyces hansenii CBS767
MPAVKTNDQGSIKDSLEPHDTSDSDYDYSDDDDEYEVSFTEARLRNIKSIVHTSRRIRLPKRSHRLWIMLLIIVLFIYSFTNMGFQGAKNNIQEDIGTFSDPLDEAEGHFMSETRISSDIDSPFQIGCRVPDITQPRANAALVVLTRNSEVKKVIKSMKSMERHFNQWFNYPWVFLNDEPFTDEFKNSVLKYTSSKVEFGTIPEKEWNFNEDIDKDELHEHIANQGDRRIMYGNSESYHKMCRFFSGYFYKHELVKKRDWYWRVEPDVEFFCDLTYDPFIEMEKRNKKYGFNVLIGELYYTIPGLFKETRAFIRKNNVPLGNAWSLFITDYKYAVGKNAAKYDGFKSKSDILREIEMNLTVKKFLSMKDKTDEQIPEYDLWLLDEVISKSKKPALYEDRIDLEEYNMCHFWSNFEIARTDLFNSPRYEAYFDHLEKSGGFYKERWGDAPVHSLAIGMLLDLKDIHYFRDVGYRHSGLSHCPGNSRRYQLKYEPSERYYQKDLSKDSAWLSPDSPRSNGIGCRCRCPKTKEIEDSLSSCVRSWADITSNRYIPPEPVDVDFWEEEIKNRLNKFLATGGILGQNNIAEKLLS

SEQ ID NO: 45613 - DNA, 1515 bp, Debaryomyces hansenii CBS767
  CDS (1)..(1515)
atgtctcatgattcaaacacagtgaaagatgtcatatataaacctaacaaacggttgttgaggatatttattgtgctttgcattattctgcttctttttatcggtcagcacttagttttcggaaatcgtgaagatctagtatctgaagtacaaaataataaagtttttagatttatcaacgaagcggaagataaggatactttgaataacgtgaatttctatggaacatccgtacaaacacattcggcacaaaaacaagaagaagaacaggatgtgaagggtagtcaatcagcaaacagaattaatgaagcttccaactcggcgggtgatgaggaaactgaggaaatggaaaatatgatggatgaacaggaaaacgagagagagagagcggcgatggtaattatagtgcagaataaagcagacattctgctggtgatgccaacaataagaagctaccaacagaagtttaacgaaaaatacaattatgactgggttataatatcacacagggcgatgttgtctctgcttcagcaagatataacggctttaacgaagccgggatccaatgttaagtttatggatatgaaatatctgtcggaacttataatataccctcctggaattgacaaacaaaaggtaagagaaataagacgggatacaaattttccaaagttgttgagatccaagaatatattacaagcgagacattttgcaaggtttttgacgggccatttttataatttggataacatttggaaagattatgattattactggaaagtgccgctagggtcgcaattgaattgtgaggtcaactatgatgtattcaaatacatgaagcaaaacaagattaagtatggatggctgttgatgcaacaagactatcctcacctccatcctagtttgttcaatgccgtaaaaaggtacattctcgatccaggcaacgattttatggatgaatcgggacccactcggaacaactttcatttccttcttggcaacggtatggatcctgaagcattgcaagatccaaatgccgattggaaaataaattcgtgctctattgattcagaattcgaattagtggatttgtcgttcttcaaatccattcaataccagcatttcttcaattacatagacggattcaatggcttctactacgaaagctggagtgaaccggtaatcaagaccatagccacttcacttttcctcaacacaaatcaagttcacttcttcgacgatttggcagtactggttcggacccaagctttaggactctgccctttaaacaaagatttttatatcaagaacaaatgtacttgcaatccacaagaacacggtaagaagattggtgtgggtaaatttcctggagaagaattacaattaatgcataagagtacatgtttggctaaatggttgcaatcttcaggccaaggcacacctcaagcttttgaagctgaagacgacccacttttcgaatcttttctcgaaaatgacgaacctccctcagactag

SEQ ID NO: 45614 - protein, 504 aa, Debaryomyces hansenii CBS767
MSHDSNTVKDVIYKPNKRLLRIFIVLCIILLLFIGQHLVFGNREDLVSEVQNNKVFRFINEAEDKDTLNNVNFYGTSVQTHSAQKQEEEQDVKGSQSANRINEASNSAGDEETEEMENMMDEQENERERAAMVIIVQNKADILLVMPTIRSYQQKFNEKYNYDWVIISHRAMLSLLQQDITALTKPGSNVKFMDMKYLSELIIYPPGIDKQKVREIRRDTNFPKLLRSKNILQARHFARFLTGHFYNLDNIWKDYDYYWKVPLGSQLNCEVNYDVFKYMKQNKIKYGWLLMQQDYPHLHPSLFNAVKRYILDPGNDFMDESGPTRNNFHFLLGNGMDPEALQDPNADWKINSCSIDSEFELVDLSFFKSIQYQHFFNYIDGFNGFYYESWSEPVIKTIATSLFLNTNQVHFFDDLAVLVRTQALGLCPLNKDFYIKNKCTCNPQEHGKKIGVGKFPGEELQLMHKSTCLAKWLQSSGQGTPQAFEAEDDPLFESFLENDEPPSD

SEQ ID NO: 45615 - DNA, 1257 bp, Debaryomyces hansenii CBS767
  CDS (1)..(1257)
atggggtcttctaggtcaaatgcccgtattataagatttgcagtgtttgctcttattttgattggatgtgggtttatcctttcaagaggctcatactacaatgctgacgctaacccaggtacaaacttgcaagccaagccagctagtgatggaagtattagtcgtgaaggtgatgtgagtggtggtaatggaggcggaaatgtgcaagcggaattgcagatgccaaatcaaaatgtgccagcagcagccaagccaaaggcagagggaggagctaacaaaaaggacaaggttaaggctacgtttgtgtcgcttgctagaaattctgacttgaattcgttgcttggatcgatcagacagatcgaagatcgtttcaatcacaagtttaactacgactgggttttcttgaacgatcagccattttctgacgaattcaaggaggtcaccagtgctgttgtttccggtaccaccaagtatggtttaattccagaggaacagtggtctttcccatcatggatcgaccaagaaaaggctgcgttaaccagagaacaaatgaaggaaaagggaatcatttacggtgattcgaagtcgtacagacacatgtgtcgttacgaatctgggtttttctggagacacgagttgatgatggactacgactactactggagagtcgagccagatgtaaagatctactgtgacatcgactatgacgtgttcaagtggatgagcgacaacaacaaggcttatggtttcaccatctcattgcctgaatataaggaaaccatcccaactttgtgggacgtcaccaagaaattcatcaaggaaaacccacaacacgtcgccaaggacaacttgatggaatggatttccaacgacaacggtgaaacatacaacggatgtcacttctggtctaactttgaaatcgccagcttgaagttgtggagatccgaagcatacaccgcatacttcgacaccttggacaagaatggaggtttcttctacgagagatggggtgatgcgccaatccattcgatcgccgcagccttgttcttgcaaaaagaccaagtccacttctttgacgacgttggatactaccacgttccattccataactgtccggtctccaaggaaaccagattgaagaacaaatgtgtgtgtaatcctgatgaggatttcacctggaagggttactcgtgtactgctaaattctacacgatcaagaaccttcaaagacctaagggatgggaaaacttcacctag

SEQ ID NO: 45616 - protein, 418 aa, Debaryomyces hansenii CBS767
MGSSRSNARIIRFAVFALILIGCGFILSRGSYYNADANPGTNLQAKPASDGSISREGDVSGGNGGGNVQAELQMPNQNVPAAAKPKAEGGANKKDKVKATFVSLARNSDLNSLLGSIRQIEDRFNHKFNYDWVFLNDQPFSDEFKEVTSAVVSGTTKYGLIPEEQWSFPSWIDQEKAALTREQMKEKGIIYGDSKSYRHMCRYESGFFWRHELMMDYDYYWRVEPDVKIYCDIDYDVFKWMSDNNKAYGFTISLPEYKETIPTLWDVTKKFIKENPQHVAKDNLMEWISNDNGETYNGCHFWSNFEIASLKLWRSEAYTAYFDTLDKNGGFFYERWGDAPIHSIAAALFLQKDQVHFFDDVGYYHVPFHNCPVSKETRLKNKCVCNPDEDFTWKGYSCTAKFYTIKNLQRPKGWENFT

SEQ ID NO: 45617 - DNA, 1320 bp, Debaryomyces hansenii CBS767
  CDS (1)..(1320)
atgggcatgataagaactcctgctattagggtagcggccataggtatagcactattggtgttatatatgctttccgtgtttttaaggcctcaggttgtttatgtagataaggatactaatgaaatcgtgaaggacttccagggcagcgatatgggcggcgctatcaacgctgtggtggatccaccaagaaaagtgcaagatccgattaaaaataacgataaggaacatgaacaggcgcatatccagatcgaggaagcagaaatcaacgaagctactgaccaagtggtgagtgactcgagcgcaagccatgatcaggttgccggtgtaaatgatgtatatcccggtgaacgggtcaaagcgacgtttgtaacgttggccagaaacaaagaattgtacgacttaatcaagtcggtgaggcgagtggaggatcggttcaaccgtaaattcaactacgattgggtatttttgaacgacgagccattcaccgacgaattcaagaaattgaccacctcaattgtatcaggaaaaaccaaatatgggttgatccccaaggaacattggtcataccccgattggatcgacaaggaaaaggcagcggaatcgaggaacgccatgaaggctgccggtatcatttacggtgactcagaatcgtacagacacatgtgtcgatttgagtcgggattcttctggcaaaatccgttgttagacgagtacgattggtattggagagtcgagcctggcatccaaatacactgcgacttggactacgatcttttcaaatacatggaggacaataacaaggtgtacggattcacgatttcgatctacgagtttgaaaagacgatttcgtcgttgtggggccacgtcaaggacttcatcaagaaaaacccccaatacttggccgaagacaacctcatggacttcatttccgacaacaagggggaaacgtataatttgtgccacttctggtccaacttcgaggtggcctcgttgaaattctggcgttcgcaggcatacagagaatttttcgactacttggacaaaactgggggctttttctacgagagatggggcgacgccccaatccattcgattgctgcggcccttttcctttccaaggatcaggtccactacttcgaagacgttggctacaaccacggtgtatacactcagtgtccgcttaattctcaattcaggtacgatcacaagtgtcactgtgaccccaaatctgacttcacattcagaggctactcatgcggtaacaagtactacgacgttatgaagaaagaaaagccacaggaatgggtgaactatacctag

SEQ ID NO: 45618 - protein, 439 aa, Debaryomyces hansenii CBS767
MGMIRTPAIRVAAIGIALLVLYMLSVFLRPQVVYVDKDTNEIVKDFQGSDMGGAINAVVDPPRKVQDPIKNNDKEHEQAHIQIEEAEINEATDQVVSDSSASHDQVAGVNDVYPGERVKATFVTLARNKELYDLIKSVRRVEDRFNRKFNYDWVFLNDEPFTDEFKKLTTSIVSGKTKYGLIPKEHWSYPDWIDKEKAAESRNAMKAAGIIYGDSESYRHMCRFESGFFWQNPLLDEYDWYWRVEPGIQIHCDLDYDLFKYMEDNNKVYGFTISIYEFEKTISSLWGHVKDFIKKNPQYLAEDNLMDFISDNKGETYNLCHFWSNFEVASLKFWRSQAYREFFDYLDKTGGFFYERWGDAPIHSIAAALFLSKDQVHYFEDVGYNHGVYTQCPLNSQFRYDHKCHCDPKSDFTFRGYSCGNKYYDVMKKEKPQEWVNYT

SEQ ID NO: 45619 - DNA, 1419 bp, Debaryomyces hansenii CBS767
  CDS (1)..(1419)
atgatatctgcattctcattgagaataccaaaaccgttacttgtattaattatacctttgaatttagtgttaatatttggaataattgtttatgttgctgaaatacctacagatgaatatgtagatagggatatgattagtctggggtttcgacaacttacacagaagtttgattttgggtatttaaatcagaatgtttcagacgttgatttgcaaaatgttgatacttatagcacatatggctttaaaataaaacccaataatgtcaagttcaagtttgtgaaccccaagaagaagattggtactccggaggatatcctaaagaagaataaggaaacatttgaagaggtgatggcacaagaaatccatgagccaaaagatgcagaccttcagagcatgaggccaccatcaaaaaaagacatcgataaatacaagcatgcaaatgctacaataattgcattggtacgtaataacgaggccctggctataactaaaactatccgaagatttgaaacgagatttaattccaagttcagatacccatatacattcattaacgacgagccatttaccgagaggtttatgcaacgaatgcagaaattaagtgacgcccctatggaattcgttacaattccaagtgaattatggaagaagccatctgacattgatactgaacgcgaggagaaggctatgcagctcttgtccgatcaacggatttcgtatgcaaaaaagggatcttatcataatatgtgtaggttttacctgggtaatttctacaatgttccagaattgaaaaaataccaatattattggcgtattgaaccaaatgtctttttctacaatgatttggaatacgatgtctttaagtatatggaagtaaccaagaaagcttatggttttgcaattaatctctacgatatttcggaaactgtcgtatccttatggccggagactttaaaattcttgaataagggcgataactataaatatgtaaacccgaatggagcatttcagtggcttttagagaaccaacaaaatcccaagaataataaaaaggcaaacggatattctacttgtcatttctggtcaaatttcgaaattggtgacatggatttctaccgtggtgaagcgtataatgagtggtttaaatatttggattctactgggaacttctattatgaacgttggggagatgcacctgtacattctatggggttagcattatttgccgacaccaaggatatccactggtttagagatataggatattaccacgacccatacgttaattgtcctaattctcctgacacaattggttgcgaagctggccaatttagtagatgggaccatttggcagatcaaaactgtatggctagctggattgattacagtatggaagacccaagtgcaatttattaa

SEQ ID NO: 45620 - protein, 472 aa, Debaryomyces hansenii CBS767
MISAFSLRIPKPLLVLIIPLNLVLIFGIIVYVAEIPTDEYVDRDMISLGFRQLTQKFDFGYLNQNVSDVDLQNVDTYSTYGFKIKPNNVKFKFVNPKKKIGTPEDILKKNKETFEEVMAQEIHEPKDADLQSMRPPSKKDIDKYKHANATIIALVRNNEALAITKTIRRFETRFNSKFRYPYTFINDEPFTERFMQRMQKLSDAPMEFVTIPSELWKKPSDIDTEREEKAMQLLSDQRISYAKKGSYHNMCRFYLGNFYNVPELKKYQYYWRIEPNVFFYNDLEYDVFKYMEVTKKAYGFAINLYDISETVVSLWPETLKFLNKGDNYKYVNPNGAFQWLLENQQNPKNNKKANGYSTCHFWSNFEIGDMDFYRGEAYNEWFKYLDSTGNFYYERWGDAPVHSMGLALFADTKDIHWFRDIGYYHDPYVNCPNSPDTIGCEAGQFSRWDHLADQNCMASWIDYSMEDPSAIY

SEQ ID NO: 45621 - DNA, 1341 bp, Debaryomyces hansenii CBS767
  CDS (1)..(1341)
atgcacaatagatattacctaatacctattttagtttgtttatggggagtttactacagtattataacacattatatatctagtaataatcatgcatatatgtttcacaatgaagatttgaatgaaattttcaatcctactaaggcttcgtggaatatttcatttccttggattgacaggcttccaaggttttcaggtcctaatattaaaaccgtgcttcaaaagaaaggatcgcataaattgtcttcgaattcatacttacctaatgattttccatttagagaacggagtcaaataggtcaagaaaatgctacgatggtgatgttggtacgaaatcgggaattgagaggtgcattgcaatcaatgaggtcattagaagatagattcaacagaaattatagatatccatgggtgtttttaaatgacgagccttttgacaccgatttcatagaacaaactacattaatggctagcgggaaaacatattatgaattgataccgagtgaggactggcaaccgccttcgtttatcgatatggatttaatggaaaagaaactaatgaaggcgcatgaagatggcgttatctatggtggatcatggtcctataggaacatgtgtcactttaactcgggatttttttataaacaaaagagattacttgattatgaatggtatttcagggtggagcctgacgtcaagtacatgtgtgattttcagtatgacccctttacggtgttgagagaaaataataaaatatatgggtttgttctaactattcacgactacgaaaacacaatgccatcgttgtggcctaccgtcgagaacttcatgaaggaccacaaagatttaatccatcctaataattccatagacttcatcacgtctaatgaaacttccttgaactacgacttcgagttacccgaatcaaatacctcatataacctttgccatttttggtctaactttgaaattggaaacttagacttcttcagaagcgaagcctatgagacatacttcaaatatttggataaaacgggtggatttttctacgaaagatggggcgatgctccggttcattctatagggctaaacttgttagccgacaaaaacagaatacaccacttcgaagatatagggtattttcatgtaccgtatctagcatgtcctacttcaattgacgtacttgcatcaaaaagatgtgtatgtaagactaaaggtcttgaaaatcatgatcctgagacaccacatgacatccagcctttcagttgcttaagcagatggtggagatatggctctggcaaaaccttcttaaacgatatcgattatacgttcaacaattag

SEQ ID NO: 45622 - protein, 446 aa, Debaryomyces hansenii CBS767
MHNRYYLIPILVCLWGVYYSIITHYISSNNHAYMFHNEDLNEIFNPTKASWNISFPWIDRLPRFSGPNIKTVLQKKGSHKLSSNSYLPNDFPFRERSQIGQENATMVMLVRNRELRGALQSMRSLEDRFNRNYRYPWVFLNDEPFDTDFIEQTTLMASGKTYYELIPSEDWQPPSFIDMDLMEKKLMKAHEDGVIYGGSWSYRNMCHFNSGFFYKQKRLLDYEWYFRVEPDVKYMCDFQYDPFTVLRENNKIYGFVLTIHDYENTMPSLWPTVENFMKDHKDLIHPNNSIDFITSNETSLNYDFELPESNTSYNLCHFWSNFEIGNLDFFRSEAYETYFKYLDKTGGFFYERWGDAPVHSIGLNLLADKNRIHHFEDIGYFHVPYLACPTSIDVLASKRCVCKTKGLENHDPETPHDIQPFSCLSRWWRYGSGKTFLNDIDYTFNN

SEQ ID NO: 45623 - DNA, 1251 bp, Debaryomyces hansenii CBS767
  CDS (1)..(1251)
atgaataaggttgtttgtcggtttatatggctatttaatgtgctaggggtggtttgtgcaaatataaacgttcaagatcaacttcaagatcaacttccggacatacgaatagatacgttcaatgatatgcccgcaagcgtaaaaaatgtgactgtgggtgctggggagtttttatgggattgggacaaagagaacaactcacaggaattgaccgattttcttagacgcgagatagagggtcagcatgatgtgcagacgatagtggtgaataaaaataggccagaagacacgtaccaacgggagaatgctacgtttttggtgctctgtcgaaacgaagaggtttttgagttgcttgagtcgattcagagtatacaagaccggtttaaccaccggtacaactacgattgggtgtttttgaacgacaaggcattcgacgagcgattcatgtacattgtgtcgcagtacgtggtgcaagggaagttgagttttgggcagattccccgggaacactggggatatccatcctgggtgaaccagacgtacgcgagtgaacagcgggctcgtctagtagaggaggacgtggtgtacgcggatagcgaatcgtacagacatatgtgtcgattctacctgggatttttctacaaacatccacttgtagcacagtaccagtactactggcgcattgaaccgggtgttaagttctattgcgacgtttcctacgacgtgtttcacttcatgaaaactcacggcaagaagtacggttttgtaatgtcgatgttcgagtacaaaaagacaattccgtcgctttggggccatttcaagtctttcatcagacggtacgaccacgccaatggccagtatggtgagttgcttgatttcgtccagaacgacaatgtggccaaaacatacaatttatgtcacttttggtccaacttcgaaatcgccgatttatcgatattcaataaccctgattatcaggcgttttttgaccatttagatgctactggtggtttcttttacgagagatggggagatgctccagttcattctttggcggttctgtggttcttgtctaaacgcgacttatggtggtttggtgatatcggctactaccatgcaccatatctacaatgcccccagccattacaaaccagactcgaaaacaggtgtagctgtgatcccgatgaagactttctgttcagtttcatcagctgtacaccccatatactaaatttactaaactcccgatag

SEQ ID NO: 45624 - protein, 416 aa, Debaryomyces hansenii CBS767
MNKVVCRFIWLFNVLGVVCANINVQDQLQDQLPDIRIDTFNDMPASVKNVTVGAGEFLWDWDKENNSQELTDFLRREIEGQHDVQTIVVNKNRPEDTYQRENATFLVLCRNEEVFELLESIQSIQDRFNHRYNYDWVFLNDKAFDERFMYIVSQYVVQGKLSFGQIPREHWGYPSWVNQTYASEQRARLVEEDVVYADSESYRHMCRFYLGFFYKHPLVAQYQYYWRIEPGVKFYCDVSYDVFHFMKTHGKKYGFVMSMFEYKKTIPSLWGHFKSFIRRYDHANGQYGELLDFVQNDNVAKTYNLCHFWSNFEIADLSIFNNPDYQAFFDHLDATGGFFYERWGDAPVHSLAVLWFLSKRDLWWFGDIGYYHAPYLQCPQPLQTRLENRCSCDPDEDFLFSFISCTPHILNLLNSR

SEQ ID NO: 45625 - DNA, 1302 bp, Debaryomyces hansenii CBS767
  CDS (1)..(1302)
atgccaagtctaaatgataatccactaaatgttgaagagttggaaaataccgaagcgtctcttaaaaaggataaacaacgtgaaagtgtgtttcgattgggtgaccaggagctgttgctttcccaggatccggaatatgaggcactggagccatttaaagaaagcaaggttttttataataacaagtttgtcggtagagctgtaataggagaatctaataacaatattaccgatggaattgtagactaccagagggagaacgctacatttttctcgttggtcagaaatgaagactttctgggtattgccgaagccatacaatcagttgaatataggttcaataacaaatatcattatgactgggtatttgcaaatgatgaaccgtttcatccaacattcataaacgttatacaaaatttggtgagtggacaagcccattttgttcaaatatcgagagaaatatggagctatccggattggattgaccaagacaaagcaaacgaaacaaggcatacgatgaaagaaaataaggttaaatatggtgactctgtatcctacaggcatatgtgccgtttcaattcaggttttttctaccgattaccaataatgaagaactatagatactattggagagtagagccagaaattgaatttcagtgtgatatattccatcaagattggtttaaatatatgaaagaaaataataaaaagtatgcatttacattggctcctttagagctacatacaactgttacaaacttatgggaaacagtccaggagttttcccggaaaaacccaaaattggttgctaaagacaataatatggatttcttgactgaagatggaggagcaacctacaatatgtgtcatttttggtcaaattttgaaataggagatatggatttttatagactggaggcatattcaaaatttttcgaccatattgataaggccggtggattctactatagtcggtggggggatgcaccagttcattctatgggtgtttcgttacttttaagtaaggatgaactattctttatggataactcgggatattttcattcgccaaacggcgattgtccctgggatccaaaaattagaaaggaaagaagatgtacttgtctgactaaaaaggatgcaacatggttgaaaagctcgtgcattcctaaatggtttgagatccatgatatagaaaagccaccctttgttcctaaatatgccttcgtcaatcaacacaagcctcctgatgaagaagaagaaaaggaaaatgaagaagaatacgacaataaagacgaataa

SEQ ID NO: 45626 - protein, 433 aa, Debaryomyces hansenii CBS767
MPSLNDNPLNVEELENTEASLKKDKQRESVFRLGDQELLLSQDPEYEALEPFKESKVFYNNKFVGRAVIGESNNNITDGIVDYQRENATFFSLVRNEDFLGIAEAIQSVEYRFNNKYHYDWVFANDEPFHPTFINVIQNLVSGQAHFVQISREIWSYPDWIDQDKANETRHTMKENKVKYGDSVSYRHMCRFNSGFFYRLPIMKNYRYYWRVEPEIEFQCDIFHQDWFKYMKENNKKYAFTLAPLELHTTVTNLWETVQEFSRKNPKLVAKDNNMDFLTEDGGATYNMCHFWSNFEIGDMDFYRLEAYSKFFDHIDKAGGFYYSRWGDAPVHSMGVSLLLSKDELFFMDNSGYFHSPNGDCPWDPKIRKERRCTCLTKKDATWLKSSCIPKWFEIHDIEKPPFVPKYAFVNQHKPPDEEEEKENEEEYDNKDE

SEQ ID NO: 45627 - DNA, 1341 bp, Yarrowia lipolytica CLIB99
  CDS (1)..(1341)
atgcacaacgtgcacgaagcccccaacccaccccagaagaaaacgcagaaggtggtcaacacccacaacatcaacggcgactttggcaagtccatagacgagctcaaaaagggacacctggaggaggaagaggccaaggccaaggagctggaggaacagtaccagaaccgaggcgaggcccaggccgtgagcggctccgagactgaagacgaggagccctcccacacggaaatcattctgccgtccaactcggccacccccttcgtcatgaaggccccttctctcatgcattcgtcccctggttccaacccagaccccaacatccaaattgcattcgactaccccgctctccgtcagcagacggagcgagccaacgccactctagtttcgctggtccgaaacaaggagctcaaacagatggtgcgcacggtcaagaactacgaggaccgcttcaaccacaagttccgctacgactgggtcttcctcaacgatgagccctttgacgacgactttatcgagacaatgacaaacctcgtgtcgggtaaagccaagttcggacttgtccctaaagaacactggtctgtaccctcctgggttgacaaggagaaggcagacaaggcgagaaaggccatggccgagcaggtcatctacggagactcggagtcataccgacacatgtgccgattcaactctggcttcttcttccaccatcctctcatgcaggaatacagatactactggcgtgtggagcccgagaccgccatccactgcgacgtcaactacgacattttccagttcatgcagaccaataacaagacgtacggcttcaccatcaccttgctggaaaaccctctcacggttgcgtctctgtggcaggagaccaaggcttacaccaaggctcatcccgaggtgctggccaaggataacctgctcaactggctctcgtacgataagggtgagaactacaacatgtgccacttttggtctaatttcgaggtggccgacatggacttttggcggtcggaggcgtaccaaaagtatttcgaccatctggacaagtccggtgggttcttctatgagcggtggggtgatgcgcctgttcactccattgccgcagctctgtttctgcccaagagcgaagtgcatttctttaacgacattggatacacgcatcctcccttcactcactgtcccattgatggcgacacccggaaggagggcaagtgttcgtgtcttgctgaagagacgtttgattggaagccgtgctcgtgtctggggcggtatctggacgttcagcgaatcaagcggccccatgactgggagaactatagtgactggtag

SEQ ID NO: 45628 - protein, 446 aa, Yarrowia lipolytica CLIB99
MHNVHEAPNPPQKKTQKVVNTHNINGDFGKSIDELKKGHLEEEEAKAKELEEQYQNRGEAQAVSGSETEDEEPSHTEIILPSNSATPFVMKAPSLMHSSPGSNPDPNIQIAFDYPALRQQTERANATLVSLVRNKELKQMVRTVKNYEDRFNHKFRYDWVFLNDEPFDDDFIETMTNLVSGKAKFGLVPKEHWSVPSWVDKEKADKARKAMAEQVIYGDSESYRHMCRFNSGFFFHHPLMQEYRYYWRVEPETAIHCDVNYDIFQFMQTNNKTYGFTITLLENPLTVASLWQETKAYTKAHPEVLAKDNLLNWLSYDKGENYNMCHFWSNFEVADMDFWRSEAYQKYFDHLDKSGGFFYERWGDAPVHSIAAALFLPKSEVHFFNDIGYTHPPFTHCPIDGDTRKEGKCSCLAEETFDWKPCSCLGRYLDVQRIKRPHDWENYSDW

SEQ ID NO: 45629 - DNA, 1290 bp, Yarrowia lipolytica CLIB99
  CDS (1)..(1290)
atggtggaaaagaacccggcatcaccgaaacggacctccaagaaatcggtaccgtcgccgcgctcgctgcttttccccatcctactcctagcgggcatcctcatcttgctacttagccaaacggtgggcgtcctctcgatagtggaatctctcgcgtctctcaaacccgcagccacaaacccatatccgtatgaaaaccgcaaatggatttacgacttcacccatcagccgtggtccggggccgacaccaaagaccggcggcaaattgggcgagaaaacgccactctggtcatgctggtgcgaaaccgagagctcaaagaagctgtgctggccatgcgatcgatcgaggaccggttcaacaagaaatacaagtacccctgggtgtttatgaacgaccgagagttcaccgaagatttcaaggagtacaccaccggcatggcatcgggccacaccgagtactacaaggtgcccaaagaggcatggcaaatgactccaggaatcgaccgagacctagtgtttgagtccgtggaaaacttcaccaaggaaggcgtcatctacggagactccttgtcctacagacgtatgtgccggttcaattcagggtactttttccgaatggctcctctgctcaagtacaagtactactggcgggtggagccagacgtggagctctattgtgaccagcagtacgaccccttcaccttcatgcgcgaaaacaacaagctctatggctttgtcatggccatgtacgagtatcctcagactgtggctacgctggcagaacatgtccagggcttctttgacgttcatccgcaatacgtgcatcccaattcgtcggtagggtttctcaaggacaaacgggtgaaccggtttggcgatctcatgcccgagtggcacggcgagtggaatctgtgtcatttctggtccaattttgagattggcaatatggattttttccggtcgaaaaagtatctcgagttcttcgagtggctggaccgagccggtgggttcttctatgaacgctggggagacgcgcccgtccattctttggcggtgggttacatgatggacaaaactcaggttcatcagtttgcagatatcggatattatcatcctccgtttttcagatgtcctgcagatgagcagagtcacaagtcgggacgatgtgcgtgtcctgaggatctgaatgggtacaagaactttgattatgaacccatgagttgtctgccgagatggtggggcaatgcgggcaaggcgtggatgaaggatggggtgcatattaacgtgtga

SEQ ID NO: 45630 - protein, 429 aa, Yarrowia lipolytica CLIB99
MVEKNPASPKRTSKKSVPSPRSLLFPILLLAGILILLLSQTVGVLSIVESLASLKPAATNPYPYENRKWIYDFTHQPWSGADTKDRRQIGRENATLVMLVRNRELKEAVLAMRSIEDRFNKKYKYPWVFMNDREFTEDFKEYTTGMASGHTEYYKVPKEAWQMTPGIDRDLVFESVENFTKEGVIYGDSLSYRRMCRFNSGYFFRMAPLLKYKYYWRVEPDVELYCDQQYDPFTFMRENNKLYGFVMAMYEYPQTVATLAEHVQGFFDVHPQYVHPNSSVGFLKDKRVNRFGDLMPEWHGEWNLCHFWSNFEIGNMDFFRSKKYLEFFEWLDRAGGFFYERWGDAPVHSLAVGYMMDKTQVHQFADIGYYHPPFFRCPADEQSHKSGRCACPEDLNGYKNFDYEPMSCLPRWWGNAGKAWMKDGVHINV

SEQ ID NO: 45631 - DNA, 1242 bp, Yarrowia lipolytica CLIB99
  CDS (1)..(1242)
atgaccccgctgatagtcagaagactattcctgctgctggtgacggcttcgctcggtctgctcgtgttcctgatctacttctcgttacaagatgactggaccagaacacatgcggacttcttgaaagaggagagcatctacaagcaacccaacgatgcattcctgcaatatacggaaccaaaagaggacttaacgccgaagaacaatcccctgcttgaagaggtggacgagcctgtcagtgccaagcctcttgttcgcgccactgacacgcggcgaactaaagccgctcttatctctcttgttcgaaacaaagagctggacggtattgtggatgccatggtgcaggtcgaggacacattcaatcacaaattcggctacccttggatctttttcaatgatgaagagttcaccgacgagttcaaggaaaaggtgcgcgaacagactgactctgaagtcaagtttgagctgattgaaaagaaggactgggacgcccccagatggatcgacaaggacaaggccaagaaggccggcaagaagctggaagatgctggtgtacgatatggtgccatggactcctaccacaagatgtgcagatggaactcgggtatgttctacaagcacaaggccatggacgattatgactggtactggcgcgttgaacccgacacccaatactattgtgacatcgactacgatgtatttgcatacatggaggacaatgacaaggtgtatggcttcaccattgcattgtttgacaaccccaaaaccgttgccaccctatggccggaaactaaatccttcttgatgaagaacaaggagtatctgcacaaagacaatgccatgcaattcttgctgaaccccagcagaccagactggaacgcccaggctggcggatactccacttgccatttctggtccaactttgaaatcgcgtctctgaagttcttcaggggcgatgcatacgcccaatggtttgagcatctggataaacagggagggttcttttacgagagatggggagatgctcccgtgcactctgtcggcgcaggactatttgctaaccagtcacaaatccattggttcaaggacattggatattaccacttcccctatttcaattgccccaagtccaaaaagtgtcatggatgcaagcctggtcgattcaccacagacgatctcaaggattctctgatgcctgaaaactgtcttcctcagtacctcaaatacatgggcgaccgataa

SEQ ID NO: 45632 - protein, 413 aa, Yarrowia lipolytica CLIB99
MTPLIVRRLFLLLVTASLGLLVFLIYFSLQDDWTRTHADFLKEESIYKQPNDAFLQYTEPKEDLTPKNNPLLEEVDEPVSAKPLVRATDTRRTKAALISLVRNKELDGIVDAMVQVEDTFNHKFGYPWIFFNDEEFTDEFKEKVREQTDSEVKFELIEKKDWDAPRWIDKDKAKKAGKKLEDAGVRYGAMDSYHKMCRWNSGMFYKHKAMDDYDWYWRVEPDTQYYCDIDYDVFAYMEDNDKVYGFTIALFDNPKTVATLWPETKSFLMKNKEYLHKDNAMQFLLNPSRPDWNAQAGGYSTCHFWSNFEIASLKFFRGDAYAQWFEHLDKQGGFFYERWGDAPVHSVGAGLFANQSQIHWFKDIGYYHFPYFNCPKSKKCHGCKPGRFTTDDLKDSLMPENCLPQYLKYMGDR

SEQ ID NO: 45633 - DNA, 1527 bp, Yarrowia lipolytica CLIB99
  CDS (1)..(1527)
atgctacgacgcagatcttcagcatcatacccacaacagtcgctgcccaaaacacaggggacctggcagccgtccacaatgacgcagggagtgcggaccaaggcccggttctatctcagtcgcatgccgctcaaaatcctggctgttctcgcagcgctgctcatcacagccggctttgtgacattcaacttgcgccacccggccgagcaacaacccggcggaaacaagcagtacatcaaagagattgtgtttgagaacccagcactacatggaccctttgtggctggctgcagaccgatcgtagctaatcctgaagacaaggtcaacgcggcgtttgtcgtactggcccgaaaccaggaccaggagggcctactgtcgtccatcgcttcgctagaacggcatttcaaccagtggtacaactacccttacattttcctcaacgacgagcccttcaacgctacctttaaggccgcaatctccaagtccaccgctgctaagacggaatttggagttatccccgactctctgtgggacttcgacgacagcgtcgatcgaaaagagctcaagaaagcgttgcagaaccaggcggaccaaaatgtcatgtatggcgactcggaatcgtaccacaaaatgtgccgattctactcgggcaagttctacgaccacccgctactcaaggaccttgactggtactggcggctggagcccgacgtgcagttcttctgcgacctgacctacgaccccttccgatacatgcaggacaacaacaaggtgtacggctacaacattgccatcaaggaactcaaggagacggtgcctaacttgtggcgatacaccaagtcattcaagcagaaaaacaagatgcagtccaagggtatgtgggaaatgtttctgcagacagcggaggagcgagaacaacgaggaggccaccctctcaaggacgctcgaatgtccgacaagaacgacaaggtcaagggtaaggctgaaactaacaatcccacctccaagcggtttgctgatcctgattacgaggatatgggagaagaggcctacaacatgtgccacttctggtccaactttgagattggaaagctctccttcttcagatccaaagagtacagagactactttgactacctcgaggagaagaagggtttctggtccgaacgatggggagatgcacccgtacattccctagccgtgggtctgtttctggccccctccgaggtgcattatttccgagacatcggataccagcattcggacattttccactgtccttacaacgccaagggcgcccagttgcctcctcccgagcggtactgggagggcgtttccaagcgaaccggtctcaaactgactgacgagcagatcaaggaggacgagaagtggctggttcccgaccctgcggaggaaggcggcgtgggatgcagatgcatttgtcctctggataaggcagcgttcatcgagccgcgagacggaagttgcattgctcactgggttgagaccagagacaaggggttgtga

SEQ ID NO: 45634 - protein, 508 aa, Yarrowia lipolytica CLIB99
MLRRRSSASYPQQSLPKTQGTWQPSTMTQGVRTKARFYLSRMPLKILAVLAALLITAGFVTFNLRHPAEQQPGGNKQYIKEIVFENPALHGPFVAGCRPIVANPEDKVNAAFVVLARNQDQEGLLSSIASLERHFNQWYNYPYIFLNDEPFNATFKAAISKSTAAKTEFGVIPDSLWDFDDSVDRKELKKALQNQADQNVMYGDSESYHKMCRFYSGKFYDHPLLKDLDWYWRLEPDVQFFCDLTYDPFRYMQDNNKVYGYNIAIKELKETVPNLWRYTKSFKQKNKMQSKGMWEMFLQTAEEREQRGGHPLKDARMSDKNDKVKGKAETNNPTSKRFADPDYEDMGEEAYNMCHFWSNFEIGKLSFFRSKEYRDYFDYLEEKKGFWSERWGDAPVHSLAVGLFLAPSEVHYFRDIGYQHSDIFHCPYNAKGAQLPPPERYWEGVSKRTGLKLTDEQIKEDEKWLVPDPAEEGGVGCRCICPLDKAAFIEPRDGSCIAHWVETRDKGL

SEQ ID NO: 45635 - DNA, 1299 bp, Schizosaccharomyces pombe
  CDS (1)..(1299)
atgaagtttaatttaagagatggcgagttggcacctgttttagtaactttaccttggagctttgaaaaatgtattaaatctacatatattactagacattggaaaaccgttcatggttgtttgagattgtttcatttcgttgaatatcaaaacgatatgaaaagatatgatacattacatgtttggaaactaataaaattattaatatgcaaattccttttatttcatgattttggcactgcgttgttcacaagccttgtgaaagcctcaatgcttggattccataattggagacgtacatattggttgtacttgaagaaattgagacctattaatgatacatacgacgcgccgtttgcgataggatgtaagaatgtggcctatgaagcaagtcaatatcctagaatgaatgctacttttatggttttagcaagaaactctgaccttgacggtgttctatctagtatgaactcaatcgaacgtcgatttaatcgacacttcaagtatccttatgtcttcttaaacgatgaaccttttactacggaatttaaaaaagcggttaaggatgctacggattcttctattcaattcggtgttctcgatgatgaactatggaacttccctaaagatgtcgacaaggatatgatagatgagagtattgctgaacaagttggagtcgtatatgcgaactttcctagttatcataaaatgtgcagattcttttcgcgaaacttttacaaacatcccttaatgcaacagtacgagtggtattggagacttgaaccggaagtcactttttcttgtgacatctcttatgacccattttactacatggacaagcacaataaagtctacggatacgttattgctatcaaagaacttgcaaaaactgttccaaatctgtttcggtacactgttgctcatcaaaaaatatccaatttaccaactaccgatctttggagcttcttccttgataaacgctatgaaacgagaattaaaaagctgaaagaagaacaaaaagatcaaggatattacgttttaccggagccccctttaaaccgaattgatggccagatttataatctatgccatttttggagtaacttcgaaattgcacgcttagacttttacaatagtaaagagtataatgaatatgtcgacgcattggaaaatgctggaggattttggactgaaagggtatgtttttacagtttattcaaaaaaaaaaaagcattgtgttcttcgaagtgcaatcttcttcatacttttttcctatctctgattactaacttattttag

SEQ ID NO: 45636 - protein, 432 aa, Schizosaccharomyces pombe
MKFNLRDGELAPVLVTLPWSFEKCIKSTYITRHWKTVHGCLRLFHFVEYQNDMKRYDTLHVWKLIKLLICKFLLFHDFGTALFTSLVKASMLGFHNWRRTYWLYLKKLRPINDTYDAPFAIGCKNVAYEASQYPRMNATFMVLARNSDLDGVLSSMNSIERRFNRHFKYPYVFLNDEPFTTEFKKAVKDATDSSIQFGVLDDELWNFPKDVDKDMIDESIAEQVGVVYANFPSYHKMCRFFSRNFYKHPLMQQYEWYWRLEPEVTFSCDISYDPFYYMDKHNKVYGYVIAIKELAKTVPNLFRYTVAHQKISNLPTTDLWSFFLDKRYETRIKKLKEEQKDQGYYVLPEPPLNRIDGQIYNLCHFWSNFEIARLDFYNSKEYNEYVDALENAGGFWTERVCFYSLFKKKKALCSSKCNLLHTFFLSLITNLF

SEQ ID NO: 45637 - DNA, 1215 bp, Saccharomyces cerevisiae
  CDS (1)..(1215)
atgtctgtgcaccacaaaaagaagctaatgcccaaatcggcattgctgattagaaaataccaaaagggaatcagatcatcattcattgggctcatcatagtgttatcctttttatttttcatgagtggctcaaggtccccagaggtaccaatagctcagggcaccagtgtcagtcgtgtagccagtaaggattatttgatgccgtttactgacaagtcacaaggagtaatccatcccgtggacgatggaaagaaggaaaagggtgttatggtcacattggccaggaattcagatttacggaacttggtaaaatctattagacatgttgaagacaggttcaataacagatatcactacgattgggtgttcttgaatgaccaaccatttagtgatgagtttaaacgtgttaccagtgcattggtttcaggcaaggcaaaatatgggacaatcccaaaggaccattggtccattccatcttggatcgatactgaaaaattcgatgagaaaaggcttgcaatgggaaaattggatattccatatggtagttccgtgccttaccgtcacatgtgccgtttccagtcagggttcatatggagacacccactactggaggagtacgaatggttttggagagtggataccgatatcactttattctgtgatattcagtatgacatattcaagtttttaaaagtaaataacaagaaatatggattcattctttcggtaagtgaatatgagcgcacaatcccaaccttgtgggaaacgacaaagaaattcatcaagaaaaatcctaaattcttacacaaaaataacctcatgaaattcatttcgaatgatgatggtgacacttataatatgtgtcatttctggaccaacttcgaaatcggctctttagacttcttcaggtccgatgcatacagagaatactttgattacttagacagttctggtggattcttctacgaaagatggggggatgcgccagtgcactccatcgctgcctctttgttcttggacaagtcagaaatccatttctttgacggtcttggattccatcatccagatttcacctcttgtcctatcgaacagaagattagactacaaaacaagtgtatctgcgaacctagcaaggacgtcacctggactcctgactacttctgtactagaaagtacttttcagcaggaaattacaagcttccaccaggaatttaa

SEQ ID NO: 45638 - protein, 404 aa, Saccharomyces cerevisiae
MSVHHKKKLMPKSALLIRKYQKGIRSSFIGLIIVLSFLFFMSGSRSPEVPIAQGTSVSRVASKDYLMPFTDKSQGVIHPVDDGKKEKGVMVTLARNSDLRNLVKSIRHVEDRFNNRYHYDWVFLNDQPFSDEFKRVTSALVSGKAKYGTIPKDHWSIPSWIDTEKFDEKRLAMGKLDIPYGSSVPYRHMCRFQSGFIWRHPLLEEYEWFWRVDTDITLFCDIQYDIFKFLKVNNKKYGFILSVSEYERTIPTLWETTKKFIKKNPKFLHKNNLMKFISNDDGDTYNMCHFWTNFEIGSLDFFRSDAYREYFDYLDSSGGFFYERWGDAPVHSIAASLFLDKSEIHFFDGLGFHHPDFTSCPIEQKIRLQNKCICEPSKDVTWTPDYFCTRKYFSAGNYKLPPGI

SEQ ID NO: 45639 - DNA, 1233 bp, Candida albicans
  CDS (1)..(1233): transl_table=12
atgactagctattcgattgcatttataagtggtgttatactatctatttactactactttgttttgaactatttttctgagttaaagttcagcgaaccaccatatcaacgatataatccactagcgaaagaccaacctaaattagctagtaatcaatatttagacaaaatttatccaccagagaataggaaacagatagggaaagaaaatgccacgatggtaatgttagtgagaaacatcgaattagaaggagcattagaatcaatgcgatcattagaagatcgattcaatcgagattataaatatccttgggttttccttaatgatgaaccatttactgaagaatttatggagaaaaccacattaatggcaagtggtgaaactttttatgaattaatccctgtcgaagattggcaaccaccaatatttattaatgaaacaaaattacaagaaaatttagataattctaaaactaatgttatttatggtggagttagatcttatcgtaatatgtgtcattttaattctgggtttttttataaacaaaaaaaattattgaattatgattggtattttcgagttgaaccaaatgttgaatatatgtgtgattttcaatatgatccatttgaatttcttcgaattaataataaaatttatggatttattattgccattactgaatatgaaaatactattcctaatctttggcccacagtagaatcatttatgaaaaaacatccagaattacttcatccaaataatgccattgaatttttaacaagtaaagaaatttctttaaatcattatatggatttaattccttcagcaactgattataatctttgtcatttttggtcgaattttgaaattggtaatttgaattttttccgtaatgaatcatatgaaacttttttccaatatttagatcatacgggtgggttttattatgaaagatggggggatgctccagttcataccattggattgagtttattggctgataaagattcaattcatcattttgaagatattggatattatcatgcaccgtatttggcatgtcctctggctgacgatgttttggcttctaaaagatgtgtttgtgtttctcgacaatcagaagataaaataaatcgaaccattgatactaatatatatagttgtttacctcgatggtggaaatatggttctggtaaacgatttcttaatcaaattgattataaacgagattaa

SEQ ID NO: 45640 - protein, 410 aa, Candida albicans
MTSYSIAFISGVILSIYYYFVLNYFSELKFSEPPYQRYNPLAKDQPKLASNQYLDKIYPPENRKQIGKENATMVMLVRNIELEGALESMRSLEDRFNRDYKYPWVFLNDEPFTEEFMEKTTLMASGETFYELIPVEDWQPPIFINETKLQENLDNSKTNVIYGGVRSYRNMCHFNSGFFYKQKKLLNYDWYFRVEPNVEYMCDFQYDPFEFLRINNKIYGFIIAITEYENTIPNLWPTVESFMKKHPELLHPNNAIEFLTSKEISLNHYMDLIPSATDYNLCHFWSNFEIGNLNFFRNESYETFFQYLDHTGGFYYERWGDAPVHTIGLSLLADKDSIHHFEDIGYYHAPYLACPSADDVLASKRCVCVSRQSEDKINRTIDTNIYSCLPRWWKYGSGKRFLNQIDYKRD

SEQ ID NO: 45641 - DNA, 1443 bp, Candida albicans
  CDS (1)..(1443): transl_table=12
atgattagttttattagtcttcggagaagaaaattgatatcgattctagcgattttcaccatatttatccttctgggttcaatcattggatattataatggtcatcatcatataattaaaatggtggaaaattatacacctgatgattttcaaaattcaataactgcattgactaataaatttgatttttcatatttacctggatttaaaggaatcatcaccaaaaataatagcactagttttgaatcattagatgatcttgatatgaatggattttcattaatccctggtaatgttcaatttaaatttttaaataaaggtaataaaaagggtacaccagaacaaattcttgaacaaaatatgaaagattataaagaattattaggatcgaaaactattggacaaccaaaagatgccaaattggttccaccaccaccacctgaagaattaccaaattataaaagagccaatgcaactatattatcattagtacgtaatggtgaattaggggcaattggtattagtattaaacgattacaaaaaaaattcaattcgaaatataattatccttatacatttttaaatgatgaaccatttactgatcgatttaaacaacggattttgaaatatactgggaatgcacctgtcgaatttgttcaaattaaacctgaatattggcaaaaaccatcatttatagatacagttaaagaagctaaagaaatggaaattatgtttaaacatgatgttgcgtatgccaagaagcaatcatatcataatatgtgtcgattttatctgagtcaattttataaaattcctgaattacaaaaatataaatattattggcgagtggaacctaaagttaattttttcactgatattaattatgatgtttttaaatatatggaagacacccaaaaaatttatggatttaccattaatttatatgataatgaagaaaccgtgaaaactctttggcctgaaaccattaaatatttaaatcaaggtgataattataaatatattaatccgaaaggatcatttcaatggttattagaagatttacaaaatcctaaaaaaacaaaatttgctggaggttattcaacttgtcatttttggtcaaattttgaaattggtgattttgattttttccgtaatgaagcttatgataattgggttaaatatcttgattctacagggaaattttattatgaacgatggggtgatgcaccagtacattcaattggagttagtttatttgctgataaagataaaattcatttttttaaagatattggttatgatcatgatccttatactaattgtccaaatactgaaactactcaaatgtgtgaaattgggaaatttagtagatgggaacatttatatgatcaaaattgcttaatgaattggcttcatcatgatcaacccaaagatgtatattaa

SEQ ID NO: 45642 - protein, 480 aa, Candida albicans
MISFISLRRRKLISILAIFTIFILSGSIIGYYNGHHHIIKMVENYTPDDFQNSITALTNKFDFSYLPGFKGIITKNNSTSFESLDDLDMNGFSLIPGNVQFKFLNKGNKKGTPEQILEQNMKDYKELLGSKTIGQPKDAKLVPPPPPEELPNYKRANATILSLVRNGELGAIGISIKRLQKKFNSKYNYPYTFLNDEPFTDRFKQRILKYTGNAPVEFVQIKPEYWQKPSFIDTVKEAKEMEIMFKHDVAYAKKQSYHNMCRFYSSQFYKIPELQKYKYYWRVEPKVNFFTDINYDVFKYMEDTQKIYGFTINLYDNEETVKTLWPETIKYLNQGDNYKYINPKGSFQWLLEDLQNPKKTKFAGGYSTCHFWSNFEIGDFDFFRNEAYDNWVKYLDSTGKFYYERWGDAPVHSIGVSLFADKDKIHFFKDIGYDHDPYTNCPNTETTQMCEIGKFSRWEHLYDQNCLMNWLHHDQPKDVY

SEQ ID NO: 45643 - DNA, 1296 bp, Candida albicans
  CDS (1)..(1296): transl_table=12
atggcttctaccagatcgaatgctcgtttgattagatttgggatctttgcccttgttttaataggatgtggctatatccttacaagaggctcatcattccaacctccaaattatcaacaaacacaatcacccgccgctcatgaaaaacagaccggtaatgttgctgctggaggtggtgctggttcaggttccgcaggagctcaagttccattaggcaaaaatagaggtccaataccaaaagcaattatgggagctggtgaaggtggtagtgatgctccggttcctcaacaagatattcctgatagttataccctcaatgacaaaattaaggctacatttgtcactttggcccgtaactctgatttatattctttagctgaatcaattagacacgttgaagatcgtttcaataagaaattccattatgattgggttttcctcaatgatgaagaattcaatgatgaatttaaagaaactgttggtagtttagttagtggtaacactaaatttggtttgattccaaaggaacattggtcatatcctccatggattgatcaagaaaaagctgctttagtccgtgaacaaatgagagaaaagaagattatttatggtcattctgaatcttatcgtcacatgtgtagatttgaaagtgggtttttctggaggcaagaaattttaaacgattatgattactattggagagttgaaccagatatcaaattatattgtgatattgattatgatatctttaaatggatgaaagataataataaagattatgcattcactatttccttaccagaatataaagaaaccattcctactttatgggacactactaaagaatttattgaaaaaaacccacaatatttggctcaaaataacttgatggattgggtttctgacgataaaggtcaaacttataatggttgtcatttctggtccaattttgaaattggttctttggcattttggagaagtgaagcttacagaaaatattttgaacatttagataaagctggtggattcttttatgaaagatggggtgatgctccagttcattccattgctgcagcattatttttaccaagagaaaaaatccatttctttgaagatgttggttattatcatgttccatttaccaattgcccagttgataaagaagtcagaaaggcaagaaattgtaattgtgatcctaacaaagattttacttggagaggctattcttgtactaccaaatattacactttgaataatttcaaaagacaaaagggttgggaaaagtacactgcttaa

SEQ ID NO: 45644 - protein, 431 aa, Candida albicans
MASTRSNARLIRFGIFALVLIGCGYILTRGSSFQPPNYQQTQSPAAHEKQTGNVAAGGGAGSGSAGAQVPLGKNRGPIPKAIMGAGEGGSDAPVPQQDIPDSYTLNDKIKATFVTLARNSDLYSLAESIRHVEDRFNKKFHYDWVFLNDEEFNDEFKETVGSLVSGNTKFGLIPKEHWSYPPWIDQEKAALVREQMREKKIIYGHSESYRHMCRFESGFFWRQEILNDYDYYWRVEPDIKLYCDIDYDIFKWMKDNNKDYAFTISLPEYKETIPTLWDTTKEFIEKNPQYLAQNNLMDWVSDDKGQTYNGCHFWSNFEIGSLAFWRSEAYRKYFEHLDKAGGFFYERWGDAPVHSIAAALFLPREKIHFFEDVGYYHVPFTNCPVDKEVRKARNCNCDPNKDFTWRGYSCTTKYYTLNNFKRQKGWEKYTA

SEQ ID NO: 45645 - DNA, 1329 bp, Saccharomyces cerevisiae
  CDS (1)..(1329)
atggccctctttctcagtaagagactgttgagatttaccgtcattgcaggtgcggttattgttctcctcctaacattgaattccaacagtagaactcagcaatatattccgagttccatctccgctgcatttgattttacctcaggatctatatcccctgaacaacaagtcatctctgaggaaaatgatgctaaaaaattagagcaaagtgctctgaattcagaggcaagcgaagactccgaagccatggatgaagaatccaaggctctgaaagctgccgctgaaaaggcagatgccccgatcgacactaaaacaaccatggattatatcactccatcttttgctaacaaagctggtaagccaaaagcttgttacgtcactttggtgagaaacaaggagttgaaaggtttgctaagctccattaaatatgtggaaaacaaaattaacaagaaattcccatatccttgggttttcctaaacgatgaaccttttactgaagaattcaaggaagcagtcaccaaagctgtttcttccgaagttaagtttggtattttgcccaaggaacattggtcatatcctgaatggattaatcaaaccaaggctgctgaaattcgtgcagatgctgccaccaaatacatatacggtggctccgaatcttatagacacatgtgtcgttaccaatctgggtttttctggagacatgaattattagaagagtacgattggtactggcgtgtggaaccagacatcaagttatactgtgatattaattacgacgtttttaagtggatgcaagaaaacgaaaaagtttacggctttaccgtttctattcatgaatatgaagtgacgatcccaacactatggcaaacgtccatggatttcatcaaaaagaaccccgaatacttagatgaaaacaacctgatgagttttctttcgaacgataatggtaaaacatacaatctgtgccatttctggtcaaactttgaaattgcaaacttgaatttgtggaggtcaccagcctacagagagtattttgacactttggatcatcaaggtggatttttctacgaaagatggggcgatgctcccgttcattctattgctgctgctttgtttttgccaaaggataaaatccattatttttcagacattggttaccatcatccaccttatgataactgcccattggacaaggaggtctataacagtaacaactgtgaatgtgaccaaggtaatgatttcactttccaaggttactcttgtggtaaggaatattatgatgctcaagggttggtaaagccaaaaaactggaaaaaattccgtgagtag

SEQ ID NO: 45646 - protein, 442 aa, Saccharomyces cerevisiae
MALFLSKRLLRFTVIAGAVIVLLLTLNSNSRTQQYIPSSISAAFDFTSGSISPEQQVISEENDAKKLEQSALNSEASEDSEAMDEESKALKAAAEKADAPIDTKTTMDYITPSFANKAGKPKACYVTLVRNKELKGLLSSIKYVENKINKKFPYPWVFLNDEPFTEEFKEAVTKAVSSEVKFGILPKEHWSYPEWINQTKAAEIRADAATKYIYGGSESYRHMCRYQSGFFWRHELLEEYDWYWRVEPDIKLYCDINYDVFKWMQENEKVYGFTVSIHEYEVTIPTLWQTSMDFIKKNPEYLDENNLMSFLSNDNGKTYNLCHFWSNFEIANLNLWRSPAYREYFDTLDHQGGFFYERWGDAPVHSIAAALFLPKDKIHYFSDIGYHHPPYDNCPLDKEVYNSNNCECDQGNDFTFQGYSCGKEYYDAQGLVKPKNWKKFRE

SEQ ID NO: 45647 - DNA, 1182 bp, Saccharomyces cerevisiae
  CDS (1)..(1182)
atggcgaagattatgatcccagctagcaagcagcctgtttacaaaaaattaggacttcttctggtcgccgtgtttactgtgtatgtgttctttcatggagctcagtatgcgagaggctctgccccaagcccaaagtacagtaccgtgctatcttccggctcgggctataaatactcgaaagtggaactaccaaagtataccggtcctcgggaaaaggccacttttgtcactctagtgcgtaatagagatctatattcgttggctgagtctattaaatccgtggaagatagatttaactccaagttcaactatgattgggtgtttttgaatgatgaagagttcactgatgaattcaaaaacgttacgtcagctttagttagtggtacaacaaaatacggtgtcatcccaaaggaacattggtccttccctgagtggattgatgaagaaaaggccgctcaagtcaggaaggagatgggtgagaagagaatcatctacggtgattctatctcttacagacacatgtgtcgttttgaatcaggcttcttttacagacatcctttgatggatgactacgattggtattggcgtgtggaacctgatatcaagttgcactgtgatatcgactacgatgtcttcaaattcatgaaagacaataagaaaaagtatgcctttgccatttccattaaggagtatgaagctactatccccactttatgggagactactcgtaaattcatggaagcccatcctgagcttatccatgaaaataatatgttagactttgttagcgacgatcagggactttcatacaatttgtgccatttttggtctaattttgaaattgctgctttggatttgtggagatctccagcatactccgcatattttgattatttagatcgtgaaggtggattcttttatgaaagatggggtgatgctccagttcattctattggtgctgcgctgttcttggaccgctctgaaatccatcacttcggtgatattggttattaccatgttccatttcactcctgtccaatagacacaagtatcagactggctaacaaatgtgactgtgatccaagcaaagatttcacatggcacagttattcatgtactactaaattctacaatataaacaagttgccaaagcctgctggttggcaaaaccatatcggttga

SEQ ID NO: 45648 - protein, 393 aa, Saccharomyces cerevisiae
MAKIMIPASKQPVYKKLGLLLVAVFTVYVFFHGAQYARGSAPSPKYSTVLSSGSGYKYSKVELPKYTGPREKATFVTLVRNRDLYSLAESIKSVEDRFNSKFNYDWVFLNDEEFTDEFKNVTSALVSGTTKYGVIPKEHWSFPEWIDEEKAAQVRKEMGEKRIIYGDSISYRHMCRFESGFFYRHPLMDDYDWYWRVEPDIKLHCDIDYDVFKFMKDNKKKYAFAISIKEYEATIPTLWETTRKFMEAHPELIHENNMLDFVSDDQGLSYNLCHFWSNFEIAALDLWRSPAYSAYFDYLDREGGFFYERWGDAPVHSIGAALFLDRSEIHHFGDIGYYHVPFHSCPIDTSIRLANKCDCDPSKDFTWHSYSCTTKFYNINKLPKPAGWQNHIG

SEQ ID NO: 45649 - DNA, 1278 bp, Saccharomyces cerevisiae
  CDS (1)..(1278)
atgcaaatctgcaaggtatttcttacacaggttaaaaaactactttttgttagtcttctattttgcttgatagctcaaacatgttggcttgcacttgtaccatatcagagacagctgagcctagattcgtatttttttagaagatctcgagaagtttcatcgagatatgattttacaaggaggcgacatatgaatcagacgctgaagctatctagcaacacttataatgatgaaccactaaacaagaccaagggaataaaaaatcaaagagaaaatgctacattgttaatgcttgtgcgtaattgggaactttcgggggcactccgttccatgagatcactagaagaccgtttcaataaaaactaccagtatgactggacatttcttaatgatgtcccatttgatcaagagttcatcgaagccaccacagccatggctagtggtagaacgcaatacgctttaatccctgcggaggactggaacaggccatcttggatcaacgaaactctatttgaagaggctttacaattaatggaggaaaaaaatatcttgtacggtgggtcaaagtcatatagaaatatgtgccgatttaattctggatttttctttagacaaaagatattagatccgtacgatttttatttcagagttgagccagatgtagagtatttttgcgattttccctacgatccattcaaggtgatgaggcagaacaataagaaatatggctttgtgataactatgtatgaatacgaagatacaattccgagcctatgggaagctgtagaagaatatctcgaagaaacagagtcagcagatattgacatggaaagcaacgctttcgggttcgtatcaaatttcgacttcatcggtaaatcttttggtgtcatcgatagtaacagcggctataatttatgtcatttttggacaaattttgaaattggcgatttgaactttttcagaagtgagaaatacattagatttttcgagtacttggattcaaagggcggtttttactatgaaaggtggggagatgcaccagttcattcgattgctgcctcacttcttttgaaaaaagacgaaatcatccattttgatgaattaggctataagcatatgccttttggcacgtgtccatctgcatactacctgagacttcaacaaagatgtctttgtgatagcaatcacccagacaatattgatctcaatgtcatcagctgcctgagaagatggtggaaggacggcagcggtaaatacttcctcaaacacgattcatag

SEQ ID NO: 45650 - protein, 425 aa, Saccharomyces cerevisiae
MQICKVFLTQVKKLLFVSLLFCLIAQTCWLALVPYQRQLSLDSYFFRRSREVSSRYDFTRRRHMNQTLKLSSNTYNDEPLNKTKGIKNQRENATLLMLVRNWELSGALRSMRSLEDRFNKNYQYDWTFLNDVPFDQEFIEATTAMASGRTQYALIPAEDWNRPSWINETLFEEALQLMEEKNILYGGSKSYRNMCRFNSGFFFRQKILDPYDFYFRVEPDVEYFCDFPYDPFKVMRQNNKKYGFVITMYEYEDTIPSLWEAVEEYLEETESADIDMESNAFGFVSNFDFIGKSFGVIDSNSGYNLCHFWTNFEIGDLNFFRSEKYIRFFEYLDSKGGFYYERWGDAPVHSIAASLLLKKDEIIHFDELGYKHMPFGTCPSAYYLRLQQRCLCDSNHPDNIDLNVISCLRRWWKDGSGKYFLKHDS

SEQ ID NO: 45651 - DNA, 1215 bp, Saccharomyces cerevisiae
  CDS (1)..(1215)
atgtctgtgcaccacaaaaagaagctaatgcccaaatcggcattgctgattagaaaataccaaaagggaatcagatcatcattcattgggctcatcatagtgttatcctttttatttttcatgagtggctcaaggtccccagaggtaccaatagctcagggcaccagtgtcagtcgtgtagccagtaaggattatttgatgccgtttactgacaagtcacaaggagtaatccatcccgtggacgatggaaagaaggaaaagggtgttatggtcacattggccaggaattcagatttatggaacttggtaaaatctattagacatgttgaagacaggttcaataacagatatcactacgattgggtgttcttgaatgaccaaccatttagtgatgagtttaaacgtgttaccagtgcattggtttcaggcaaggcaaaatatgggacaatcccaaaggaccattggtccattccatcttggatcgatactgaaaaattcgatgagaaaaggcttgcaatgggaaaattggatattccatatggtagttccgtgccttaccgtcacatgtgccgtttccagtcagggttcatatggagacacccactactggaggagtacgaatggttttggagagtggataccgatatcactttattctgtgatattcagtatgacatattcaagtttttaaaagtaaataacaagaaatatggattcattctttcggtaagtgaatatgagcgcacaatcccaaccttgtgggaaacgacaaagaaattcatcaagaaaaatcctaaattcttacacaaaaataacctcatgaaattcatttcgaatgatgatggtgacacttataatatgtgtcatttctggaccaacttcgaaatcggctctttagacttcttcaggtccgatgcatacagagaatactttgattacttagacagttctggtggattcttctacgaaagatggggggatgcgccagtgcactccatcgctgcctctttgttcttggacaagtcagaaatccatttctttgacggtcttggattccatcatccagatttcacctcttgtcctatcgaacagaagattagactacaaaacaagtgtatctgcgaacctagcaaggacgtcacctggactcctgactacttctgtactagaaagtacttttcagcaggaaattacaagcttccaccaggaatttaa

SEQ ID NO: 45652 - protein, 404 aa, Saccharomyces cerevisiae
MSVHHKKKLMPKSALLIRKYQKGIRSSFIGLIIVLSFLFFMSGSRSPEVPIAQGTSVSRVASKDYLMPFTDKSQGVIHPVDDGKKEKGVMVTLARNSDLWNLVKSIRHVEDRFNNRYHYDWVFLNDQPFSDEFKRVTSALVSGKAKYGTIPKDHWSIPSWIDTEKFDEKRLAMGKLDIPYGSSVPYRHMCRFQSGFIWRHPLLEEYEWFWRVDTDITLFCDIQYDIFKFLKVNNKKYGFILSVSEYERTIPTLWETTKKFIKKNPKFLHKNNLMKFISNDDGDTYNMCHFWTNFEIGSLDFFRSDAYREYFDYLDSSGGFFYERWGDAPVHSIAASLFLDKSEIHFFDGLGFHHPDFTSCPIEQKIRLQNKCICEPSKDVTWTPDYFCTRKYFSAGNYKLPPGI

SEQ ID NO: 45653 - DNA, 1395 bp, Saccharomyces cerevisiae
  CDS (1)..(1395)
atgaggtttctttcaaaaaggatactgaaacctgtactttcagtgatcattctaatatcgattgccgtaaccgttgttctttactttttaacggcgaatgagaactatttgcaagcagtcaaggatagtgccaagtcccagtatgcttctctccgggagagctacaaaagtattacaggtaaaactgaaagcgctgatgaacttcctgatcatgatgctgaggtgttagatagcataatggacaggctacacgagcccctttatgaaaaggacacttttgacccgaatgaagtccttgctgaaaataaacagttgtacgaggagtttttacttcaagaaatttctgagccaaaggtggacaatttggtacgtagcggggatccgttagccggcaaggcaaaaggaactattttgagtttggtgagaaattctgatttagaggatataatttcttctattcaacagctagaagaggagtacaataagaattttggatatccctataccttccttaacgatgaggaatttactgacgaattcaaagatggaataaaaagtattcttcctaaggaccgtgtagtagaatttggcactattggtccagataactggaatatgcctgatagcatagatagggagagatacgaccaagaaatggacaaaatgagtaaagagaacattcagtatgcagaggtggaatcctatcataacatgtgtcgtttctattctaaagaattttaccatcatcctctgctatctaaatataaatatgtgtggagattagagccaaacgtgaatttctattgcaaaattaactatgacgttttccaatttatgaacaagaatgacaagatttatgggtttgttttgaacctctatgatagtccgcaaaccatcgaaacgctatggacttcaactatggattttgtcgaggaacacccaaactatttgaacgtcaacggagccttcgcatggctaaaagataactctcaaaatccaaaaaattatgattatactcaagggtattcaacttgtcatttctggaccaattttgaaatagtcgatttagactttttgaggtcagaaccttatgaaaaatatatgcaatatcttgaagaaaagggaggattctactatgaaaggtggggtgatgcccctgtaagaagtttggcacttgctttatttgcggataagtcaagcatccattggttcagggatataggttatcaccatactccgtacacgaactgtccaacttgtccagcagattcagataggtgtaatggaaattgtgtaccaggcaaattcactccttggagtgatctagacaaccaaaattgccaggcaacctggataagacactctatgtctgaggaagagttagaaatgtattga

SEQ ID NO: 45654 - protein, 464 aa, Saccharomyces cerevisiae
MRFLSKRILKPVLSVIILISIAVTVVLYFLTANENYLQAVKDSAKSQYASLRESYKSITGKTESADELPDHDAEVLDSIMDRLHEPLYEKDTFDPNEVLAENKQLYEEFLLQEISEPKVDNLVRSGDPLAGKAKGTILSLVRNSDLEDIISSIQQLEEEYNKNFGYPYTFLNDEEFTDEFKDGIKSILPKDRVVEFGTIGPDNWNMPDSIDRERYDQEMDKMSKENIQYAEVESYHNMCRFYSKEFYHHPLLSKYKYVWRLEPNVNFYCKINYDVFQFMNKNDKIYGFVLNLYDSPQTIETLWTSTMDFVEEHPNYLNVNGAFAWLKDNSQNPKNYDYTQGYSTCHFWTNFEIVDLDFLRSEPYEKYMQYLEEKGGFYYERWGDAPVRSLALALFADKSSIHWFRDIGYHHTPYTNCPTCPADSDRCNGNCVPGKFTPWSDLDNQNCQATWIRHSMSEEELEMY

SEQ ID NO: 45655 - DNA, 1569 bp, Saccharomyces cerevisiae
  CDS (1)..(1569)
atgttgctaataagaaggacgataaatgcatttctgggatgtatccattgcaatcttacggcgacgtgcatcctgattgccttcgtcataaccatgtatgtggtacttgtatctgagcctgcatccgtagacggaactatgggaaattttcttccgttttccaagatggatcttgcgacgaagagggacagacccttttattcgaattgtgtgaatactcaggactatttgttgaatccatcgtacatcaagcagaatgcctcgtttgtcatgctaacaaggaacggggagctagaagatgttatcaagactatcaacagtatagaagagcatttcaatcagtggttccactatccatatgtgttcttaaatgaccagccgtttgaagaggacttcaaagcaaaagtacgtgatgttacagtgggcgcgctggtggaatttggcactatcgatgagatatcttggaattttcccagtgacgtaaaggatacgttcgagttctacaacgcaattgaggatcaaggtgatagaagcatactttacggaaacttagaatcatatcataagatgtgccggttttattcaggattattttacaagcacccgctagtacagaagtacgaatggtattggagattggaacccgatgttgagtttttctgtgatattacctacgatccctttttggagatgctccgaactaataagaaatatggatttacgatcatcatccccgaattgtattggacagtcccaaatttgtttagacacactaaaagctttatcagtcaaaaaggcgttacgcttgggtcattatggaaactatttacaaaggattacgacatttttgaatccgatgatccggagttacgggactggatcaactatgattttcaggccaaggctaagatatccgaaaagatagccatcgagcagcttttgaaaaagggtgatgatttccaacagataaatgatgacaaagagggaataatgaatttgatacataaggctcgctctaggaagcatatcgtagaagacaaatttttcaatgaagagtacaatctatgccatttctggagtaattttgagattgcgcggctaagcgtgttcgacaatgacatttacaacagtttttttcaatatttggagaaaagtggtggattttggaaggaaagatggggggacgctcctgttcactctattggattgtcgctaactctggatttggacgatgtacactattttagagacatcggatatagacactccacaatacagcattgtccacataatgccatggggaatgaggaattctcctacttagccagtgactcaaaattcaaacgtaaaaacgcggcctacgacgagggaagggaatttgggtgtggctgcaggtgcagatgtcccaagaaaaagcgtgaaattgaggattccatgggtttctgcgtaaatatttgggtaaatctgcttaaccaacagaggggacacgaacgccacgtcgaagcactcaacggcaatgaaatggaggagcacataagggaagactatctaagacagttcggaaactag

SEQ ID NO: 45656 - protein, 522 aa, Saccharomyces cerevisiae
MLLIRRTINAFLGCIHCNLTATCILIAFVITMYVVLVSEPASVDGTMGNFLPFSKMDLATKRDRPFYSNCVNTQDYLLNPSYIKQNASFVMLTRNGELEDVIKTINSIEEHFNQWFHYPYVFLNDQPFEEDFKAKVRDVTVGALVEFGTIDEISWNFPSDVKDTFEFYNAIEDQGDRSILYGNLESYHKMCRFYSGLFYKHPLVQKYEWYWRLEPDVEFFCDITYDPFLEMLRTNKKYGFTIIIPELYWTVPNLFRHTKSFISQKGVTLGSLWKLFTKDYDIFESDDPELRDWINYDFQAKAKISEKIAIEQLLKKGDDFQQINDDKEGIMNLIHKARSRKHIVEDKFFNEEYNLCHFWSNFEIARLSVFDNDIYNSFFQYLEKSGGFWKERWGDAPVHSIGLSLTLDLDDVHYFRDIGYRHSTIQHCPHNAMGNEEFSYLASDSKFKRKNAAYDEGREFGCGCRCRCPKKKREIEDSMGFCVNIWVNLLNQQRGHERHVEALNGNEMEEHIREDYLRQFGN

SEQ ID NO: 45657 - DNA, 1341 bp, Saccharomyces cerevisiae
  CDS (1)..(1341)
atgcacgtactgctgagcaaaaaaatagcacgctttctgttgatttcgtttgttttcgtgcttgcgctaatggtgacaataaatcatccaaaaacaaagcagatgtctgaacagtatgttacaccataccttccgaaatctttgcaacctattgcaaaaattagtgcagaggaacaaaggcgtatacaaagtgaacaggaagaagccgaattgaagcaatctttagagggagaggccattagaaatgccaccgtgaatgccattaaggaaaagatcaaatcttatggtggtaatgaaacgacgctagggttcatggtgccatcgtatatcaatcatagaggatcaccaccaaaggcgtgctttgtctcactaattactgaaagggattccatgacccaaatcttacaatctattgatgaagtgcaggtgaagtttaacaaaaattttgcttatccttgggtttttattagtcagggggagcttgacggaatgaagcaagaaatgattcgtcaagccataactgattctatgaatggtgatcctgagttaattaatattaaatttgctgaaattcctgcagacgaatgggtataccctgaatggattgatgaaaataaagcagcagaatcgctaatttcattagcaaatgtaccggatggtgattctagagctgtaagatatcaagctagatattttgcagggtttttttggaggcatccagttctggatgagtttgattggtactggagagtagaccctggtattaaattgtactgtgatattgatcatgacctttttaggtggatgcaagatgaaggcaaagtgtttggtttcacattgagtatgagtgaagctaaggaagccaatgagaagatttgggatgttacgaaaaaatttgcaaaggattttccaaagtttatttccgagaataatttcaagtcatttattacaaaaaaggactctgaagattttaacaactgtgaattcacatcaaattttgaaattggtaatttgaacttttatagatcgccagcttacaggaaattttttaattacatcgacgaagagggcggtattttctactggaaatggtctgattccatcatccacacaattgggttatcgatgctgttgccaaaggataaaatacattttttcgaaaatataggattccattatgacaagtacaataactgtcccctaaacgatgatatatggaaccaatataattgtaactgtgaccagggtaacgatttcacgtttagaagtggttcatgtggcggacattacttcgacattatgaagaaagataagccagaaggttgggataggttaccataa

SEQ ID NO: 45658 - protein, 446 aa, Saccharomyces cerevisiae
MHVLLSKKIARFLLISFVFVLALMVTINHPKTKQMSEQYVTPYLPKSLQPIAKISAEEQRRIQSEQEEAELKQSLEGEAIRNATVNAIKEKIKSYGGNETTLGFMVPSYINHRGSPPKACFVSLITERDSMTQILQSIDEVQVKFNKNFAYPWVFISQGELDGMKQEMIRQAITDSMNGDPELINIKFAEIPADEWVYPEWIDENKAAESLISLANVPDGDSRAVRYQARYFAGFFWRHPVLDEFDWYWRVDPGIKLYCDIDHDLFRWMQDEGKVFGFTLSMSEAKEANEKIWDVTKKFAKDFPKFISENNFKSFITKKDSEDFNNCEFTSNFEIGNLNFYRSPAYRKFFNYIDEEGGIFYWKWSDSIIHTIGLSMLLPKDKIHFFENIGFHYDKYNNCPLNDDIWNQYNCNCDQGNDFTFRSGSCGGHYFDIMKKDKPEGWDRLP

SEQ ID NO: 45659 - DNA, 1554 bp, Saccharomyces cerevisiae
  CDS (1)..(1554)
atggctataagattgaatccaaaagtcagaaggttcttgctggataagtgtcgacaaaaacgatatggtttcctctttttaggatgtatcttcgccatactttactgtatggggacctggccatttttcgcaaaagatattgtacatgatccaaataatttgccttattccttacaggattattcgactgacaaagacgagccatttttccggggctgcactgatacaaagctgtacttgcaaaatcctgcttactccaaaatgaacgcatctttcgttatgctaacgagaaacgaagaaatagaagacgtactgaaaactatgagaagtatagagggccatttcaataagtggttcaaatatccgtacgttttcttgaatgatgacccctttacagatcattttaaggaccaaattcaagctgcaactaatgccactgtagagtttggcactgttgatgaaattatgtgggagtttcctgctaaggttcgtaattcattgcagtttaaggcttcattagaagaccaaaacgatcgcggtataatgtatggtaatatggaatcatatcacaagatgtgtcgattttactccgggatcttttataaacatccattagtttccaagtatgaatggtattggagaatagaacctgatgtggactttttttgtgacatctcgtatgatccctttttcgagatggccaaacataacaagaaatatgggtttaccgtacttataactgaactgtactggactgtccccaacttgttcagaacaaccaaaagctttataaaaaaaacggcaggtttaaaggaaaatctcggcacgttgtggaaattatttacatttaattataatattctagatacagatgatgaagaaatttctaggtgggtcaattttccctgggatgcaaagccaaagttgacagaaaagttgatggtagactttttgctagagaatcatggtcaagtcaataatgaggaagatttggaaggtatacaatatctcgttgaaagggcccgctctaaggtgccaatgctagaggattcccttgaaggggaagattacaatttgtgtcatttttggagtaactttgaaattgcccgcgttgatttattcgacaatgagatctataacgcctattttaaatttttggaagagtctggaggtttctggactgaaaggtggggtgacgcgccaattcattcaattgggttgggaatgaccttggatctagaagacgttcattatttcagagacattggttatagacactcatcgctgcagcattgtccgaagaatgccttacaaagccaagaaaatctcaacactttcgatgaaggttataacttcggatgtggatgtcgatgcgtgtgccccaagaaaggtgaagacatcgaagaccactccaccccttgcatggatattttttttgaattgcttcacggcagggaatatgagaaggaattccctggttgttacaagccctccataaaggacaaagacgtgattgaagagatcagaagagaaaattttagagtaattgaatag

SEQ ID NO: 45660 - protein, 517 aa, Saccharomyces cerevisiae
MAIRLNPKVRRFLLDKCRQKRYGFLFLGCIFAILYCMGTWPFFAKDIVHDPNNLPYSLQDYSTDKDEPFFRGCTDTKLYLQNPAYSKMNASFVMLTRNEEIEDVLKTMRSIEGHFNKWFKYPYVFLNDDPFTDHFKDQIQAATNATVEFGTVDEIMWEFPAKVRNSLQFKASLEDQNDRGIMYGNMESYHKMCRFYSGIFYKHPLVSKYEWYWRIEPDVDFFCDISYDPFFEMAKHNKKYGFTVLITELYWTVPNLFRTTKSFIKKTAGLKENLGTLWKLFTFNYNILDTDDEEISRWVNFPWDAKPKLTEKLMVDFLLENHGQVNNEEDLEGIQYLVERARSKVPMLEDSLEGEDYNLCHFWSNFEIARVDLFDNEIYNAYFKFLEESGGFWTERWGDAPIHSIGLGMTLDLEDVHYFRDIGYRHSSLQHCPKNALQSQENLNTFDEGYNFGCGCRCVCPKKGEDIEDHSTPCMDIFFELLHGREYEKEFPGCYKPSIKDKDVIEEIRRENFRVIE

SEQ ID NO: 45661 - DNA, 1386 bp, Candida albicans
  CDS (1)..(1386): transl_table=12
atgaagccttcaatattctatagttcgagacaaccctatctcaaatatttggcaatcatcttaaccaccatcaccatctatgttctaactcatagcagttatctggctgatcctaatatcaatgatgtcaccactaagccaatactggaaactgtgccacaaccaccaccacaatcaccttcatcaccagaacaacaacaacaacaacctgcaaaccaagatcaaatcgtcaaggtgcctgaagaattgaaaaacaaacctcaagatttagttgttgataacaataaagatcaaaaaccagctgtatctggtgtaccaaaatcctcctcctcctccccacagcaacaagagaaacaagacaccaaaaaagaactggaaaattcttcttcatcaaaagatcctgtgaaaccagaaaaagttaaagccacatttgtcactttagcccgtaattctgaattatatgatttgatcaaatctattcgtaatgttgaagaccgtttcaatagaaaattcaattatgattgggtatttcttaatgatgatgatttcacccaagaatttaaagatttaactacagcattagtttctggtaaaaccaaatatgggaaaattcctaaagaacattggtcatatcctgattggattgatttgaaaagagcagaagaaactcgtaaaaatatgaaattacaaaaaatcatttatggagatagtgaatcttatcgtcatatgtgtcgatttgaaagtgggtttttttggagacatccattattagatgattatgattggtattggagagttgaaccaagtattgatattcattgtgatttgaattatgatttattcaaatacatggaagataataataaagtttatggttttactatttcaattcatgaatttagagccaccattcctacattatgggataccacgaaaaaattcattaaagaaaatcctcaatatttagctgaaaataattttatggattttattagtgatgataaaggtgaaacttataatttatgtcatttttggtcgaattttgaaattgccaatttgaatttttggagaggtgaagcttatagaaaatattttgattatttagatcaaacgggtggatttttctatgaacgttggggtgatgctccaattcattctattgctgcagcattatttttaccaaaagataaaattcattattttgatgatgttggttataaacatagtgtttatactcaatgtccattaaatcctcaatttagatacgaacataaatgtcattgtaatccagataatgattttacttttagaggttattcttgtggtaagaaatattttgaaaaaatgggtttacaaaaacctaaagaatgggaaaaatatcaataa

SEQ ID NO: 45662 - protein, 461 aa, Candida albicans
MKPSIFYSSRQPYLKYLAIILTTITIYVLTHSSYSADPNINDVTTKPISETVPQPPPQSPSSPEQQQQQPANQDQIVKVPEELKNKPQDLVVDNNKDQKPAVSGVPKSSSSSPQQQEKQDTKKESENSSSSKDPVKPEKVKATFVTLARNSELYDLIKSIRNVEDRFNRKFNYDWVFLNDDDFTQEFKDLTTALVSGKTKYGKIPKEHWSYPDWIDLKRAEETRKNMKLQKIIYGDSESYRHMCRFESGFFWRHPLLDDYDWYWRVEPSIDIHCDLNYDLFKYMEDNNKVYGFTISIHEFRATIPTLWDTTKKFIKENPQYLAENNFMDFISDDKGETYNLCHFWSNFEIANLNFWRGEAYRKYFDYLDQTGGFFYERWGDAPIHSIAAALFLPKDKIHYFDDVGYKHSVYTQCPLNPQFRYEHKCHCNPDNDFTFRGYSCGKKYFEKMGLQKPKEWEKYQ

SEQ ID NO: 45663 - DNA, 1137 bp, Candida albicans
  CDS (1)..(1137): transl_table=12
atgctacggcatttggtatttattttgattgcaatacttttattgacattccctcctaaaatcgaatctttattcaaatcttttatcatcaataaaccaactaaaacaacatgttatcaatataccactcgtgaacaacttaaatcaatacttgaatcagatatccatgagacaaatttttgtattgaaaaaccttccacatcacccccaaaaacaaattctacattgttaatgttatgtcaaaattccgatatattttccgtattagaaaccattcaaaacattcaggatcgattcaatgataaatacaattatgattacacgtttttaaatgacgttcccttcaactatgagtttatttatttagtatcatcaattatccctcatgggaaaatcaattttggtcttataccaattgaacattggtcatatccatcacatataaatatatcattagctactgaaatcagacaaaattatgctaatgtcccttatggagattcagaaagttatcgacacatgtgtcgattttattctgggtttttttataaacatgaattggtcaaacaatatcaatattattggagaatagaacctggcattaaaatatattgtgatattgattatgatgtgtttgaatatatgataattaatgataaaaaatatggatttgtgatttcattatttgaatactcggaaactattcctacgttatggaatcatgttgttcaatatataaatgataatgaaatcaaatcagaattgttaccacttttgactaataaatataattggtataatttatgccatttttggtcgaattttgaaattgcaaatcttgatatatttaataatgatgattatgaaaattttttccaatatttggacaatttaggagggttttattatgaacgatggggtgatgctccaatacattccattgctatagcattgttcttacaaaaaaaggatattcattggtttgaaaatataggctactatcatgttccatatctacaatgtcctcaagatattgacttgtacgtcaagaataagtgtacttgtaaccccgatgaagattttacatggagtgaccttagttgtactaaccatttcttgaacattctacataattga

SEQ ID NO: 45664 - protein, 378 aa, Candida albicans
MLRHLVFILIAILLLTFPPKIESLFKSFIINKPTKTTCYQYTTREQLKSILESDIHETNFCIEKPSTSPPKTNSTLLMLCQNSDIFSVLETIQNIQDRFNDKYNYDYTFLNDVPFNYEFIYLVSSIIPHGKINFGLIPIEHWSYPSHINISLATEIRQNYANVPYGDSESYRHMCRFYSGFFYKHELVKQYQYYWRIEPGIKIYCDIDYDVFEYMIINDKKYGFVISLFEYSETIPTLWNHVVQYINDNEIKSELLPLLTNKYNWYNLCHFWSNFEIANLDIFNNDDYENFFQYLDNLGGFYYERWGDAPIHSIAIALFLQKKDIHWFENIGYYHVPYLQCPQDIDLYVKNKCTCNPDEDFTWSDLSCTNHFLNILHN

SEQ ID NO: 45665 - DNA, 23 bp, Artificial sequence
  Primer sequence
atggcaaaaggaggctcgctata

SEQ ID NO: 45666 - DNA, 26 bp, Artificial sequence
  Primer sequence
ttaaatctcgtcttgctcttctttta

SEQ ID NO: 45667 - protein, 464 aa, Artificial sequence
  Consensus
  Variant (2)..(3): Xaa in position 2 to 3 is any amino acid
  Variant (5)..(6): Xaa in position 5 to 6 is any amino acid
  Variant (8)..(8): Xaa in position 8 is any amino acid
  Variant (10)..(10): Xaa in position 10 is any amino acid
  Variant (13)..(13): Xaa in position 13 is any amino acid
  Variant (16)..(17): Xaa in position 16 to 17 is any amino acid
  Variant (19)..(20): Xaa in position 19 to 20 is any amino acid
  Variant (23)..(24): Xaa in position 23 to 24 is any amino acid
  Variant (27)..(28): Xaa in position 27 to 28 is any amino acid
  Variant (31)..(32): Xaa in position 31 to 32 is any amino acid
  Variant (33)..(34): Xaa in position 33 to 34 is any or no amino acid
  Variant (36)..(36): Xaa in position 36 is any amino acid
  Variant (38)..(38): Xaa in position 38 is any amino acid
  Variant (40)..(40): Xaa in position 40 is any amino acid
  Variant (45)..(46): Xaa in position 45 to 46 is any amino acid
  Variant (48)..(50): Xaa in position 48 to 50 is any amino acid
  Variant (52)..(63): Xaa in position 52 to 63 is any amino acid
  Variant (64)..(74): Xaa in position 64 to 74 is any or no amino acid
  Variant (76)..(77): Xaa in position 76 to 77 is any amino acid
  Variant (79)..(82): Xaa in position 79 to 82 is any amino acid
  Variant (84)..(85): Xaa in position 84 to 85 is any amino acid
  Variant (87)..(88): Xaa in position 87 to 88 is any amino acid
  Variant (90)..(103): Xaa in position 90 to 103 is any amino acid
  Variant (104)..(108): Xaa in position 104 to 108 is any or no amino acid
  Variant (110)..(110): Xaa in position 110 is any or no amino acid
  Variant (113)..(114): Xaa in position 113 to 114 is any amino acid
  Variant (115)..(115): Xaa in position 115 is any or no amino acid
  Variant (118)..(119): Xaa in position 118 to 119 is any or no amino acid
  Variant (124)..(124): Xaa in position 124 is any or no amino acid
  Variant (127)..(127): Xaa in position 127 is any or no amino acid
  Variant (130)..(134): Xaa in position 130 to 134 is any or no amino acid
  Variant (136)..(141): Xaa in position 136 to 141 is any or no amino acid
  Variant (143)..(143): Xaa in position 143 is any or no amino acid
  Variant (151)..(151): Xaa in position 151 is any amino acid
  Variant (153)..(155): Xaa in position 153 to 155 is any amino acid
  Variant (159)..(159): Xaa in position 159 is any amino acid
  Variant (160)..(160): Xaa in position 160 is any or no amino acid
  Variant (163)..(163): Xaa in position 163 is any amino acid
  Variant (165)..(166): Xaa in position 165 to 166 is any amino acid
  Variant (168)..(171): Xaa in position 168 to 171 is any amino acid
  Variant (173)..(173): Xaa in position 173 is any amino acid
  Variant (177)..(177): Xaa in position 177 is any amino acid
  Variant (179)..(179): Xaa in position 179 is any amino acid
  Variant (181)..(181): Xaa in position 181 is any or no amino acid
  Variant (183)..(185): Xaa in position 183 to 185 is any amino acid
  Variant (188)..(189): Xaa in position 188 to 189 is any amino acid
  Variant (192)..(196): Xaa in position 192 to 196 is any amino acid
  Variant (198)..(214): Xaa in position 198 to 214 is any amino acid
  Variant (215)..(296): Xaa in position 215 to 296 is any or no amino acid
  Variant (298)..(299): Xaa in position 298 to 299 is any amino acid
  Variant (310)..(310): Xaa in position 310 is any amino acid
  Variant (312)..(313): Xaa in position 312 to 313 is any amino acid
  Variant (316)..(318): Xaa in position 316 to 318 is any amino acid
  Variant (320)..(321): Xaa in position 320 to 321 is any amino acid
  Variant (322)..(323): Xaa in position 322 to 323 is any or no amino acid
  Variant (326)..(327): Xaa in position 326 to 327 is any amino acid
  Variant (330)..(331): Xaa in position 330 to 331 is any amino acid
  Variant (336)..(336): Xaa in position 336 is any amino acid
  Variant (349)..(350): Xaa in position 349 to 350 is any amino acid
  Variant (352)..(357): Xaa in position 352 to 357 is any amino acid
  Variant (360)..(360): Xaa in position 360 is any amino acid
  Variant (362)..(362): Xaa in position 362 is any amino acid
  Variant (367)..(367): Xaa in position 367 is any amino acid
  Variant (369)..(372): Xaa in position 369 to 372 is any amino acid
  Variant (373)..(375): Xaa in position 373 to 375 is any or no amino acid
  Variant (378)..(381): Xaa in position 378 to 381 is any amino acid
  Variant (382)..(430): Xaa in position 382 to 430 is any or no amino acid
  Variant (432)..(443): Xaa in position 432 to 443 is any amino acid
  Variant (444)..(459): Xaa in position 444 to 459 is any or no amino acid
  Variant (461)..(463): Xaa in position 461 to 463 is any amino acid
RXXAXXVXLXRNXELXXLXXSIXXVEXXFNXXXXFXYXWXFLNDXXFXXXFXXXXXXXXXXXXXXXXXXXXXXXFXXIXXXXWXXPXXIXXXXXXXXXXXXXXXXXXXIXYGXXXSYXXMCRFXSGXFYXXXXXLXXXXXXYXYYWRVEPXVXXXCDIXXYDXFXXMXXXXKXYGFXIXLXEXXXTIXXLWXXXXXFXXXXXXXXXXXXXXXXXXXXXXXXXXXXXXXXXXXXXXXXXXXXXXXXXXXXXXXXXXXXXXXXXXXXXXXXXXXXXXXXXXXXXXXXXXXXXXXXXXXYXXCHFWSNFEIAXLXXFRXXXYXXXXYFXXLDXXGGFFXERWGDAPVHSIAXXLXXXXXXIHXFXDIGYXHXXXXXXXCPXXXXXXXXXXXXXXXXXXXXXXXXXXXXXXXXXXXXXXXXXXXXXXXXXXXXXCXXXXXXXXXXXXXXXXXXXXXXXXXXXXCXXXW

SEQ ID NO: 45668 - protein, 48 aa, Artificial sequence
  Consensus
  Variant (2)..(3): Xaa in position 2 to 3 is any amino acid
  Variant (4)..(5): Xaa in position 4 to 5 is any or no amino acid
  Variant (7)..(7): Xaa in position 7 is any amino acid
  Variant (8)..(9): Xaa in position 8 to 9 is any or no amino acid
  Variant (12)..(12): Xaa in position 12 is any amino acid
  Variant (13)..(13): Xaa in position 13 is Asp or Glu
  Variant (14)..(19): Xaa in position 14 to 19 is any amino acid
  Variant (20)..(20): Xaa in position 20 is Ala, Pro, Ser or Thr
  Variant (21)..(21): Xaa in position 21 is Ile, Met or Val
  Variant (22)..(24): Xaa in position 22 to 24 is any amino acid
  Variant (25)..(25): Xaa in position 25 is Glu or Gln
  Variant (26)..(28): Xaa in position 26 to 28 is any amino acid
  Variant (30)..(31): Xaa in position 30 to 31 is any amino acid
  Variant (32)..(32): Xaa in position 32 is Phe, His or Tyr
  Variant (33)..(33): Xaa in position 33 is any amino acid
  Variant (35)..(35): Xaa in position 35 is Asp, Gly or Pro
  Variant (36)..(37): Xaa in position 36 to 37 is any amino acid
  Variant (39)..(39): Xaa in position 39 is any amino acid
  Variant (41)..(41): Xaa in position 41 is Asp or Asn
  Variant (42)..(43): Xaa in position 42 to 43 is any amino acid
  Variant (44)..(44): Xaa in position 44 is Phe or Trp
  Variant (45)..(47): Xaa in position 45 to 47 is any amino acid
AXXXXLXXXRNXXXXXXXXXXXXXXXXXNXXXXYXXXFXNXXXXXXXF

SEQ ID NO: 45669 - protein, 18 aa, Artificial sequence
  Consensus
  Variant (2)..(2): Xaa in position 2 is Ala or Gly
  Variant (3)..(5): Xaa in position 3 to 5 is any amino acid
  Variant (6)..(6): Xaa in position 6 is Pro or Ser
  Variant (8)..(8): Xaa in position 8 is His or Arg
  Variant (9)..(9): Xaa in position 9 is any amino acid
  Variant (13)..(13): Xaa in position 13 is Phe, Trp or Tyr
  Variant (14)..(14): Xaa in position 14 is any amino acid
  Variant (16)..(16): Xaa in position 16 is any amino acid
  Variant (17)..(17): Xaa in position 17 is any or no amino acid
YXXXXXYXXMCRXXSXXF

SEQ ID NO: 45670 - protein, 48 aa, Artificial sequence
  Consensus
  Variant (2)..(15): Xaa in position 2 to 15 is any amino acid
  Variant (16)..(18): Xaa in position 16 to 18 is any or no amino acid
  Variant (21)..(21): Xaa in position 21 is Ile, Leu, Pro or Val
  Variant (23)..(24): Xaa in position 23 to 24 is any amino acid
  Variant (25)..(25): Xaa in position 25 is Leu or Met
  Variant (26)..(29): Xaa in position 26 to 29 is any amino acid
  Variant (31)..(31): Xaa in position 31 is any amino acid
  Variant (33)..(33): Xaa in position 33 is Ala, Gly or Ser
  Variant (34)..(34): Xaa in position 34 is Phe or Tyr
  Variant (35)..(35): Xaa in position 35 is any amino acid
  Variant (36)..(36): Xaa in position 36 is Ile, Leu, Met or Val
  Variant (37)..(37): Xaa in position 37 is any amino acid
  Variant (38)..(38): Xaa in position 38 is Ile, Leu, Met or Val
  Variant (39)..(39): Xaa in position 39 is any amino acid
  Variant (40)..(40): Xaa in position 40 is Asp or Glu
  Variant (41)..(43): Xaa in position 41 to 43 is any amino acid
  Variant (44)..(44): Xaa in position 44 is Ser or Thr
  Variant (45)..(46): Xaa in position 45 to 46 is any amino acid
  Variant (47)..(47): Xaa in position 47 is Gly, Asn, Ser or Thr
  Variant (48)..(48): Xaa in position 48 is Ile or Leu
YXXXXXXXXXXXXXXXXXYDXFXXXXXXXKXYXXXXXXXXXXXXXXXX

SEQ ID NO: 45671 - protein, 75 aa, Artificial sequence
  Consensus
  Variant (2)..(2): Xaa in position 2 is any amino acid
  Variant (3)..(4): Xaa in position 3 to 4 is any or no amino acid
  Variant (6)..(6): Xaa in position 6 is Ser or Thr
  Variant (8)..(8): Xaa in position 8 is Phe or Leu
  Variant (10)..(10): Xaa in position 10 is Ile or Val
  Variant (11)..(11): Xaa in position 11 is Ala or Gly
  Variant (12)..(16): Xaa in position 12 to 16 is any amino acid
  Variant (17)..(17): Xaa in position 17 is Asp, Glu, Asn or Arg
  Variant (18)..(18): Xaa in position 18 is Gly, Asn or Ser
  Variant (19)..(20): Xaa in position 19 to 20 is any amino acid
  Variant (22)..(24): Xaa in position 22 to 24 is any amino acid
  Variant (26)..(27): Xaa in position 26 to 27 is any amino acid
  Variant (28)..(28): Xaa in position 28 is Leu or Met
  Variant (29)..(29): Xaa in position 29 is Asp or Glu
  Variant (30)..(32): Xaa in position 30 to 32 is any amino acid
  Variant (33)..(33): Xaa in position 33 is Gly or Asn
  Variant (35)..(35): Xaa in position 35 is Phe, Trp or Tyr
  Variant (36)..(36): Xaa in position 36 is any amino acid
  Variant (43)..(43): Xaa in position 43 is Ala or Pro
  Variant (44)..(44): Xaa in position 44 is Phe, Ile or Val
  Variant (46)..(46): Xaa in position 46 is Ser or Thr
  Variant (47)..(47): Xaa in position 47 is Ile, Leu, Met or Val
  Variant (48)..(48): Xaa in position 48 is any amino acid
  Variant (49)..(49): Xaa in position 49 is Ala, Ile, Leu or Val
  Variant (50)..(60): Xaa in position 50 to 60 is any amino acid
  Variant (61)..(61): Xaa in position 61 is Phe or Trp
  Variant (62)..(62): Xaa in position 62 is any amino acid
  Variant (63)..(63): Xaa in position 63 is Asp, Glu, Gly or Asn
  Variant (64)..(64): Xaa in position 64 is Phe, Ile, Leu or Val
  Variant (65)..(65): Xaa in position 65 is Ala, Gly or Ser
  Variant (66)..(66): Xaa in position 66 is Phe or Tyr
  Variant (67)..(67): Xaa in position 67 is any amino acid
  Variant (69)..(73): Xaa in position 69 to 73 is any amino acid
  Variant (75)..(75): Xaa in position 75 is Gly or Pro
HXXXWXNXEXXXXXXXXXXXYXXXFXXXXXXXXFXXERWGDAXXHXXXXXXXXXXXXXXXXXXXXXXHXXXXXCX

SEQ ID NO: 45672 - DNA, 1390 bp, Saccharomyces cerevisiae; identical to SEQ ID NO: 531
  CDS (303)..(1118)

SEQ ID NO: 45673 - protein, 271 aa, Saccharomyces cerevisiae; identical to SEQ ID NO: 532

SEQ ID NO: 45674 - DNA, 714 bp, Deinococcus radiodurans; identical to SEQ ID NO: 533
  CDS (1)..(714)

SEQ ID NO: 45675 - protein, 237 aa, Deinococcus radiodurans; identical to SEQ ID NO: 534

SEQ ID NO: 45676 - DNA, 1350 bp, Nostoc sp. PCC 7120; identical to SEQ ID NO: 535
  CDS (1)..(1350)

SEQ ID NO: 45677 - protein, 449 aa, Nostoc sp. PCC 7120; identical to SEQ ID NO: 536

SEQ ID NO: 45678 - DNA, 636 bp, Listeria monocytogenes; identical to SEQ ID NO: 537
  CDS (1)..(636)

SEQ ID NO: 45679 - protein, 211 aa, Listeria monocytogenes; identical to SEQ ID NO: 538

SEQ ID NO: 45680 - DNA, 636 bp, Listeria innocua; identical to SEQ ID NO: 539
  CDS (1)..(636)

SEQ ID NO: 45681 - protein, 211 aa, Listeria innocua; identical to SEQ ID NO: 540

SEQ ID NO: 45682 - DNA, 654 bp, Brucella melitensis; identical to SEQ ID NO: 541
  CDS (1)..(654)

SEQ ID NO: 45683 - protein, 217 aa, Brucella melitensis; identical to SEQ ID NO: 542

SEQ ID NO: 45684 - DNA, 813 bp, Nostoc sp. PCC 7120; identical to SEQ ID NO: 543
  CDS (1)..(813)

SEQ ID NO: 45685 - protein, 270 aa, Nostoc sp. PCC 7120; identical to SEQ ID NO: 544

SEQ ID NO: 45686 - DNA, 615 bp, Deinococcus radiodurans; identical to SEQ ID NO: 545
  CDS (1)..(615)

SEQ ID NO: 45687 - protein, 204 aa, Deinococcus radiodurans; identical to SEQ ID NO: 546

SEQ ID NO: 45688 - DNA, 714 bp, Caulobacter crescentus; identical to SEQ ID NO: 547
  CDS (1)..(714)

SEQ ID NO: 45689 - protein, 237 aa, Caulobacter crescentus; identical to SEQ ID NO: 548

SEQ ID NO: 45690 - DNA, 756 bp, Treponema pallidum subsp. pallidum (syphilis spirochete); identical to SEQ ID NO: 549
  CDS (1)..(756)

SEQ ID NO: 45691 - protein, 251 aa, Treponema pallidum subsp. pallidum (syphilis spirochete); identical to SEQ ID NO: 550

SEQ ID NO: 45692 - DNA, 645 bp, Xylella fastidiosa; identical to SEQ ID NO: 551
  CDS (1)..(645)

SEQ ID NO: 45693 - protein, 214 aa, Xylella fastidiosa; identical to SEQ ID NO: 552

SEQ ID NO: 45694 - DNA, 2034 bp, Arabidopsis thaliana (mouse-ear cress); identical to SEQ ID NO: 553
  CDS (1)..(2034)

SEQ ID NO: 45695 - protein, 677 aa, Arabidopsis thaliana (mouse-ear cress); identical to SEQ ID NO: 554

SEQ ID NO: 45696 - DNA, 582 bp, Bacillus subtilis; identical to SEQ ID NO: 555
  CDS (1)..(582)

SEQ ID NO: 45697 - protein, 193 aa, Bacillus subtilis; identical to SEQ ID NO: 556

SEQ ID NO: 45698 - DNA, 606 bp, Thermotoga maritima; identical to SEQ ID NO: 557
  CDS (1)..(606)

SEQ ID NO: 45699 - protein, 201 aa, Thermotoga maritima; identical to SEQ ID NO: 558

SEQ ID NO: 45700 - DNA, 660 bp, Clostridium acetobutylicum; identical to SEQ ID NO: 559
  CDS (1)..(660)

SEQ ID NO: 45701 - protein, 219 aa, Clostridium acetobutylicum; identical to SEQ ID NO: 560

SEQ ID NO: 45702 - DNA, 744 bp, Saccharomyces cerevisiae; identical to SEQ ID NO: 561
  CDS (1)..(744)

SEQ ID NO: 45703 - protein, 247 aa, Saccharomyces cerevisiae; identical to SEQ ID NO: 562

SEQ ID NO: 45704 - DNA, 1050 bp, Synechocystis sp; identical to SEQ ID NO: 563
  CDS (1)..(1050)

SEQ ID NO: 45705 - protein, 349 aa, Synechocystis sp; identical to SEQ ID NO: 564

SEQ ID NO: 45706 - DNA, 875 bp, Arabidopsis thaliana (mouse-ear cress); identical to SEQ ID NO: 565
  CDS (30)..(722)

SEQ ID NO: 45707 - protein, 230 aa, Arabidopsis thaliana (mouse-ear cress); identical to SEQ ID NO: 566

SEQ ID NO: 45708 - DNA, 741 bp, Debaryomyces hansenii; identical to SEQ ID NO: 567
  CDS (1)..(741)

SEQ ID NO: 45709 - protein, 246 aa, Debaryomyces hansenii; identical to SEQ ID NO: 568

SEQ ID NO: 45710 - DNA, 741 bp, Yarrowia lipolytica; identical to SEQ ID NO: 569
  CDS (1)..(741)

SEQ ID NO: 45711 - protein, 246 aa, Yarrowia lipolytica; identical to SEQ ID NO: 570

SEQ ID NO: 45712 - DNA, 816 bp, Kluyveromyces lactis; identical to SEQ ID NO: 571
  CDS (1)..(816)

SEQ ID NO: 45713 - protein, 271 aa, Kluyveromyces lactis; identical to SEQ ID NO: 572

SEQ ID NO: 45714 - DNA, 687 bp, Kluyveromyces lactis; identical to SEQ ID NO: 573
  CDS (1)..(687)

SEQ ID NO: 45715 - protein, 228 aa, Kluyveromyces lactis; identical to SEQ ID NO: 574

SEQ ID NO: 45716 - DNA, 651 bp, Erwinia carotovora subsp; identical to SEQ ID NO: 575
  CDS (1)..(651)

SEQ ID NO: 45717 - protein, 216 aa, Erwinia carotovora subsp; identical to SEQ ID NO: 576

SEQ ID NO: 45718 - DNA, 840 bp, Candida glabrata; identical to SEQ ID NO: 577
  CDS (1)..(840)

SEQ ID NO: 45719 - protein, 279 aa, Candida glabrata; identical to SEQ ID NO: 578

SEQ ID NO: 45720 - DNA, 744 bp, Candida glabrata; identical to SEQ ID NO: 579
  CDS (1)..(744)

SEQ ID NO: 45721 - protein, 247 aa, Candida glabrata; identical to SEQ ID NO: 580

SEQ ID NO: 45722 - DNA, 621 bp, Bartonella quintana; identical to SEQ ID NO: 581
  CDS (1)..(621)

SEQ ID NO: 45723 - protein, 206 aa, Bartonella quintana; identical to SEQ ID NO: 582

SEQ ID NO: 45724 - DNA, 648 bp, Parachlamydia sp; identical to SEQ ID NO: 583
  CDS (1)..(648)

SEQ ID NO: 45725 - protein, 215 aa, Parachlamydia sp; identical to SEQ ID NO: 584

SEQ ID NO: 45726 - DNA, 636 bp, Listeria monocytogenes; identical to SEQ ID NO: 585
  CDS (1)..(636)

SEQ ID NO: 45727 - protein, 211 aa, Listeria monocytogenes; identical to SEQ ID NO: 586

SEQ ID NO: 45728 - DNA, 633 bp, Thermus thermophilus; identical to SEQ ID NO: 587
  CDS (1)..(633)

SEQ ID NO: 45729 - protein, 210 aa, Thermus thermophilus; identical to SEQ ID NO: 588

SEQ ID NO: 45730 - DNA, 654 bp, Mycobacterium paratuberculosis; identical to SEQ ID NO: 589
  CDS (1)..(654)

SEQ ID NO: 45731 - protein, 217 aa, Mycobacterium paratuberculosis; identical to SEQ ID NO: 590

SEQ ID NO: 45732 - DNA, 1134 bp, Mycobacterium paratuberculosis; identical to SEQ ID NO: 591
  CDS (1)..(1134)

SEQ ID NO: 45733 - protein, 377 aa, Mycobacterium paratuberculosis; identical to SEQ ID NO: 592

SEQ ID NO: 45734 - DNA, 627 bp, Lactobacillus johnsonii; identical to SEQ ID NO: 593
  CDS (1)..(627)

SEQ ID NO: 45735 - protein, 208 aa, Lactobacillus johnsonii; identical to SEQ ID NO: 594

SEQ ID NO: 45736 - DNA, 807 bp, Ashbya gossypii; identical to SEQ ID NO: 595
  CDS (1)..(807)

SEQ ID NO: 45737 - protein, 268 aa, Ashbya gossypii; identical to SEQ ID NO: 596

SEQ ID NO: 45738 - DNA, 687 bp, Mycobacterium tuberculosis; identical to SEQ ID NO: 597
  CDS (1)..(687)

SEQ ID NO: 45739 - protein, 228 aa, Mycobacterium tuberculosis; identical to SEQ ID NO: 598

SEQ ID NO: 45740 - DNA, 618 bp, Photorhabdus luminescens; identical to SEQ ID NO: 599
  CDS (1)..(618)

SEQ ID NO: 45741 - protein, 205 aa, Photorhabdus luminescens; identical to SEQ ID NO: 600

SEQ ID NO: 45742 - DNA, 588 bp, Anopheles gambiae str; identical to SEQ ID NO: 601
  CDS (1)..(588)

SEQ ID NO: 45743 - protein, 195 aa, Anopheles gambiae str; identical to SEQ ID NO: 602

SEQ ID NO: 45744 - DNA, 3762 bp, Neurospora crassa; identical to SEQ ID NO: 603
  CDS (1)..(3762)

SEQ ID NO: 45745 - protein, 1253 aa, Neurospora crassa; identical to SEQ ID NO: 604

SEQ ID NO: 45746 - DNA, 567 bp, Synechococcus sp; identical to SEQ ID NO: 605
  CDS (1)..(567)

SEQ ID NO: 45747 - protein, 188 aa, Synechococcus sp; identical to SEQ ID NO: 606

SEQ ID NO: 45748 - DNA, 612 bp, Rhodopirellula baltica; identical to SEQ ID NO: 607
  CDS (1)..(612)

SEQ ID NO: 45749 - protein, 203 aa, Rhodopirellula baltica; identical to SEQ ID NO: 608

SEQ ID NO: 45750 - DNA, 1329 bp, Prochlorococcus marinus subsp; identical to SEQ ID NO: 609
  CDS (1)..(1329)

SEQ ID NO: 45751 - protein, 442 aa, Prochlorococcus marinus subsp; identical to SEQ ID NO: 610

SEQ ID NO: 45752 - DNA, 1332 bp, Prochlorococcus marinus; identical to SEQ ID NO: 611
  CDS (1)..(1332)

SEQ ID NO: 45753 - protein, 443 aa, Prochlorococcus marinus; identical to SEQ ID NO: 612

SEQ ID NO: 45754 - DNA, 591 bp, Prochlorococcus marinus; identical to SEQ ID NO: 613
  CDS (1)..(591)

SEQ ID NO: 45755 - protein, 196 aa, Prochlorococcus marinus; identical to SEQ ID NO: 614

SEQ ID NO: 45756 - DNA, 618 bp, Streptomyces avermitilis; identical to SEQ ID NO: 615
  CDS (1)..(618)

SEQ ID NO: 45757 - protein, 205 aa, Streptomyces avermitilis; identical to SEQ ID NO: 616

SEQ ID NO: 45758 - DNA, 600 bp, Streptomyces avermitilis; identical to SEQ ID NO: 617
  CDS (1)..(600)

SEQ ID NO: 45759 - protein, 199 aa, Streptomyces avermitilis; identical to SEQ ID NO: 618

SEQ ID NO: 45760 - DNA, 612 bp, Streptomyces avermitilis; identical to SEQ ID NO: 619
  CDS (1)..(612)

SEQ ID NO: 45761 - protein, 203 aa, Streptomyces avermitilis; identical to SEQ ID NO: 620

SEQ ID NO: 45762 - DNA, 645 bp, Enterococcus faecalis; identical to SEQ ID NO: 621
  CDS (1)..(645)

SEQ ID NO: 45763 - protein, 214 aa, Enterococcus faecalis; identical to SEQ ID NO: 622

SEQ ID NO: 45764 - DNA, 666 bp, Lactobacillus plantarum; identical to SEQ ID NO: 623
  CDS (1)..(666)

SEQ ID NO: 45765 - protein, 221 aa, Lactobacillus plantarum; identical to SEQ ID NO: 624

SEQ ID NO: 45766 - DNA, 642 bp, Clostridium tetani; identical to SEQ ID NO: 625
  CDS (1)..(642)

SEQ ID NO: 45767 - protein, 213 aa, Clostridium tetani; identical to SEQ ID NO: 626

SEQ ID NO: 45768 - DNA, 600 bp, Bradyrhizobium japonicum; identical to SEQ ID NO: 627
  CDS (1)..(600)

SEQ ID NO: 45769 - protein, 199 aa, Bradyrhizobium japonicum; identical to SEQ ID NO: 628

SEQ ID NO: 45770 - DNA, 1407 bp, Synechococcus elongatus; identical to SEQ ID NO: 629
  CDS (1)..(1407)

SEQ ID NO: 45771 - protein, 468 aa, Synechococcus elongatus; identical to SEQ ID NO: 630

SEQ ID NO: 45772 - DNA, 582 bp, Oceanobacillus iheyensis; identical to SEQ ID NO: 631
  CDS (1)..(582)

SEQ ID NO: 45773 - protein, 193 aa, Oceanobacillus iheyensis; identical to SEQ ID NO: 632

SEQ ID NO: 45774 - DNA, 648 bp, Bifidobacterium longum; identical to SEQ ID NO: 633
  CDS (1)..(648)

SEQ ID NO: 45775 - protein, 215 aa, Bifidobacterium longum; identical to SEQ ID NO: 634

SEQ ID NO: 45776 - DNA, 1005 bp, Arabidopsis thaliana; identical to SEQ ID NO: 635
  CDS (1)..(1005)

SEQ ID NO: 45777 - protein, 334 aa, Arabidopsis thaliana; identical to SEQ ID NO: 636

SEQ ID NO: 45778 - DNA, 645 bp, Xanthomonas campestris; identical to SEQ ID NO: 637
  CDS (1)..(645)

SEQ ID NO: 45779 - protein, 214 aa, Xanthomonas campestris; identical to SEQ ID NO: 638

SEQ ID NO: 45780 - DNA, 645 bp, Xanthomonas axonopodis; identical to SEQ ID NO: 639
  CDS (1)..(645)

SEQ ID NO: 45781 - protein, 214 aa, Xanthomonas axonopodis; identical to SEQ ID NO: 640

SEQ ID NO: 45782 - DNA, 621 bp, Thermoanaerobacter tengcongensis; identical to SEQ ID NO: 641
  CDS (1)..(621)

SEQ ID NO: 45783 - protein, 206 aa, Thermoanaerobacter tengcongensis; identical to SEQ ID NO: 642

SEQ ID NO: 45784 - DNA, 582 bp, Rhizobium loti; identical to SEQ ID NO: 643
  CDS (1)..(582)

SEQ ID NO: 45785 - protein, 193 aa, Rhizobium loti; identical to SEQ ID NO: 644

SEQ ID NO: 45786 - DNA, 651 bp, Pasteurella multocida; identical to SEQ ID NO: 645
  CDS (1)..(651)

SEQ ID NO: 45787 - protein, 216 aa, Pasteurella multocida; identical to SEQ ID NO: 646

SEQ ID NO: 45788 - DNA, 597 bp, Streptomyces coelicolor; identical to SEQ ID NO: 647
  CDS (1)..(597)

SEQ ID NO: 45789 - protein, 198 aa, Streptomyces coelicolor; identical to SEQ ID NO: 648

SEQ ID NO: 45790 - DNA, 600 bp, Streptomyces coelicolor; identical to SEQ ID NO: 649
  CDS (1)..(600)

SEQ ID NO: 45791 - protein, 199 aa, Streptomyces coelicolor; identical to SEQ ID NO: 650

SEQ ID NO: 45792 - DNA, 660 bp, Gloeobacter violaceus; identical to SEQ ID NO: 651
  CDS (1)..(660)

SEQ ID NO: 45793 - protein, 219 aa, Gloeobacter violaceus; identical to SEQ ID NO: 652

SEQ ID NO: 45794 - DNA, 621 bp, Bartonella henselae; identical to SEQ ID NO: 653
  CDS (1)..(621)

SEQ ID NO: 45795 - protein, 206 aa, Bartonella henselae; identical to SEQ ID NO: 654

SEQ ID NO: 45796 - DNA, 681 bp, Parachlamydia sp; identical to SEQ ID NO: 655
  CDS (1)..(681)

SEQ ID NO: 45797 - protein, 226 aa, Parachlamydia sp; identical to SEQ ID NO: 656

SEQ ID NO: 45798 - DNA, 636 bp, Rhizobium meliloti; identical to SEQ ID NO: 657
  CDS (1)..(636)

SEQ ID NO: 45799 - protein, 211 aa, Rhizobium meliloti; identical to SEQ ID NO: 658

SEQ ID NO: 45800 - DNA, 648 bp, Escherichia coli O6; identical to SEQ ID NO: 659
  CDS (1)..(648)

SEQ ID NO: 45801 - protein, 215 aa, Escherichia coli O6; identical to SEQ ID NO: 660

SEQ ID NO: 45802 - DNA, 648 bp, Photorhabdus luminescens; identical to SEQ ID NO: 661
  CDS (1)..(648)

SEQ ID NO: 45803 - protein, 215 aa, Photorhabdus luminescens; identical to SEQ ID NO: 662

SEQ ID NO: 45804 - DNA, 648 bp, Salmonella typhimurium; identical to SEQ ID NO: 663
  CDS (1)..(648)

SEQ ID NO: 45805 - protein, 215 aa, Salmonella typhimurium; identical to SEQ ID NO: 664

SEQ ID NO: 45806 - DNA, 22 bp, Artificial sequence
  Primer sequence
atgccttcgctaacccccagat

SEQ ID NO: 45807 - DNA, 23 bp, Artificial sequence
  Primer sequence
ttacacatcgccatgctgggatt

SEQ ID NO: 45808 - protein, 289 aa, Artificial sequence; identical to SEQ ID NO: 34983
  Consensus
  Variant (2)..(2): Xaa in position 2 is any amino acid
  Variant (8)..(8): Xaa in position 8 is any amino acid
  Variant (10)..(10): Xaa in position 10 is any amino acid
  Variant (12)..(18): Xaa in position 12 to 18 is any amino acid
  Variant (20)..(21): Xaa in position 20 to 21 is any amino acid
  Variant (22)..(22): Xaa in position 22 is any or no amino acid
  Variant (24)..(25): Xaa in position 24 to 25 is any amino acid
  Variant (27)..(29): Xaa in position 27 to 29 is any amino acid
  Variant (31)..(33): Xaa in position 31 to 33 is any amino acid
  Variant (35)..(37): Xaa in position 35 to 37 is any amino acid
  Variant (39)..(40): Xaa in position 39 to 40 is any amino acid
  Variant (42)..(49): Xaa in position 42 to 49 is any amino acid
  Variant (50)..(60): Xaa in position 50 to 60 is any or no amino acid
  Variant (62)..(64): Xaa in position 62 to 64 is any amino acid
  Variant (66)..(68): Xaa in position 66 to 68 is any amino acid
  Variant (70)..(83): Xaa in position 70 to 83 is any amino acid
  Variant (84)..(116): Xaa in position 84 to 116 is any or no amino acid
  Variant (118)..(118): Xaa in position 118 is any amino acid
  Variant (120)..(122): Xaa in position 120 to 122 is any amino acid
  Variant (124)..(126): Xaa in position 124 to 126 is any amino acid
  Variant (128)..(153): Xaa in position 128 to 153 is any amino acid
  Variant (154)..(193): Xaa in position 154 to 193 is any or no amino acid
  Variant (195)..(206): Xaa in position 195 to 206 is any amino acid
  Variant (207)..(217): Xaa in position 207 to 217 is any or no amino acid
  Variant (221)..(221): Xaa in position 221 is any amino acid
  Variant (225)..(226): Xaa in position 225 to 226 is any amino acid
  Variant (228)..(229): Xaa in position 228 to 229 is any amino acid
  Variant (231)..(249): Xaa in position 231 to 249 is any amino acid
  Variant (250)..(285): Xaa in position 250 to 285 is any or no amino acid
  Variant (287)..(288): Xaa in position 287 to 288 is any amino acid

SEQ ID NO: 45809 - protein, 65 aa, Artificial sequence; identical to SEQ ID NO: 1307
  Consensus
  Variant (4)..(4): Xaa in position 4 is Glu, Gln, Lys or Ala
  Variant (5)..(5): Xaa in position 5 is Thr or Ser
  Variant (6)..(6): Xaa in position 6 is any amino acid
  Variant (7)..(7): Xaa in position 7 is Trp, Phe or Tyr
  Variant (8)..(8): Xaa in position 8 is Asn, Ser or Ala
  Variant (9)..(13): Xaa in position 9 to 13 is any amino acid
  Variant (14)..(14): Xaa in position 14 is Gln or Thr
  Variant (15)..(15): Xaa in position 15 is Gly or Ser
  Variant (16)..(16): Xaa in position 16 is any amino acid
  Variant (17)..(18): Xaa in position 17 to 18 is any or no amino acid
  Variant (19)..(19): Xaa in position 19 is Asp, Asn or Glu
  Variant (20)..(21): Xaa in position 20 to 21 is any amino acid
  Variant (23)..(25): Xaa in position 23 to 25 is any amino acid
  Variant (26)..(26): Xaa in position 26 is Gly or Ser
  Variant (27)..(29): Xaa in position 27 to 29 is any amino acid
  Variant (30)..(30): Xaa in position 30 is Ala, Met, Val or Ile
  Variant (31)..(36): Xaa in position 31 to 36 is any amino acid
  Variant (37)..(37): Xaa in position 37 is Leu, Ile, Val, Ala or Phe
  Variant (38)..(44): Xaa in position 38 to 44 is any amino acid
  Variant (45)..(55): Xaa in position 45 to 55 is any or no amino acid
  Variant (56)..(56): Xaa in position 56 is Thr, Ser, Ala or Val
  Variant (58)..(60): Xaa in position 58 to 60 is any amino acid
  Variant (62)..(62): Xaa in position 62 is Ala, Thr or Pro
  Variant (63)..(64): Xaa in position 63 to 64 is any amino acid

SEQ ID NO: 45810 - DNA, 1272 bp, Saccharomyces cerevisiae
  CDS (1)..(1272)
atgattctccttctgattctttttccctgtatatattttctccccttctgtataaatcgtacagtcagaagtagtccagaatatagtgctgcagactattacaaaagttcaatacaatatcataaaagttatagtaacatgcctcactcagttacaccatccatagaacaagattcgttaaaaattgccattttaggtgctgccggtggtatcgggcagtcgttatcgctgcttttgaaagctcagttgcaataccagttaaaggagagcaaccggagcgttacccacattcatctggctctttacgatgtcaaccaagaagccatcaacggtgttaccgccgacttgtctcatatagacacccccatttccgtgtcgagccactctcctgcaggtggcattgagaactgtttgcataacgcttctattgttgtcattcctgcaggtgttccaagaaaacctggcatgactcgtgatgacttatttaacgtgaatgctggtatcattagccagctcggtgattctattgcagaatgttgtgatctttccaaggtcttcgttcttgtcatttccaaccctgttaattctttagtcccagtgatggtttctaacattcttaagaaccatcctcagtctagaaattccggcattgaaagaaggatcatgggtgtcaccaagctcgacattgtcagagcgtccacttttctacgtgagataaacattgagtcagggctaactcctcgtgttaactccatgcctgacgtccctgtaattggcgggcattctggcgagactattattccgttgttttcacagtcaaacttcctatcgagattaaatgaggatcaattgaaatatttaatacatagagtccaatacggtggtgatgaagtggtcaaggccaagaacggtaaaggtagtgctaccttatcgatggcccatgccggttataagtgtgttgtccaatttgtttctttgttattgggtaacattgagcagatccatggaacctactatgtgccattaaaagatgcgaacaacttccccattgctcctggggcagatcaattattgcctctggtggacggtgcagactactttgccataccattaactattactacaaagggtgtttcctatgtggattatgacatcgttaataggatgaacgacatggaacgcaaccaaatgttgccaatttgcgtctcccagttaaagaaaaatatcgataagggcttggaattcgttgcatcgagatctgcatcatcttaa

SEQ ID NO: 45811 - protein, 423 aa, Saccharomyces cerevisiae
MILLLILFPCIYFLPFCINRTVRSSPEYSAADYYKSSIQYHKSYSNMPHSVTPSIEQDSLKIAILGAAGGIGQSLSLLLKAQLQYQLKESNRSVTHIHLALYDVNQEAINGVTADLSHIDTPISVSSHSPAGGIENCLHNASIVVIPAGVPRKPGMTRDDLFNVNAGIISQLGDSIAECCDLSKVFVLVISNPVNSLVPVMVSNILKNHPQSRNSGIERRIMGVTKLDIVRASTFLREINIESGLTPRVNSMPDVPVIGGHSGETIIPLFSQSNFLSRLNEDQLKYLIHRVQYGGDEVVKAKNGKGSATLSMAHAGYKCVVQFVSLLLGNIEQIHGTYYVPLKDANNFPIAPGADQLLPLVDGADYFAIPLTITTKGVSYVDYDIVNRMNDMERNQMLPICVSQLKKNIDKGLEFVASRSASS

SEQ ID NO: 45812 - DNA, 1032 bp, Saccharomyces cerevisiae; identical to SEQ ID NO: 44996
  CDS (1)..(1032)

SEQ ID NO: 45813 - protein, 343 aa, Saccharomyces cerevisiae; identical to SEQ ID NO: 44997

SEQ ID NO: 45814 - DNA, 1017 bp, Rattus norvegicus
  CDS (1)..(1017)
atgctgtccgctctcgcccgtcctgtcggtgccgctctccgccgcagcttcagcacttcagcccagaacaatgctaaagtagctgtcctgggagcttctgggggcattgggcaacccctttcactcctcctgaagaacagtcccctcgtgagccgcctgaccctctatgacatcgctcacacacctggtgtggcagcagatctgagtcacatcgagaccagagcaaatgtgaaaggctacctcgggccggagcagctgccggactgcctaaaaggttgtgatgtggtggtcatcccagctggagtgcccaggaagccaggaatgacacgagatgacctgttcaacaccaatgctaccattgtggccacattgacggctgcctgtgcccagcactgtcctgaagccatgatttgcatcatttccaacccagttaactccaccatccccatcacagccgaagttttcaagaagcatggcgtatacaaccccaacaagatattcggtgtgacaacccttgacatcgtcagagcaaacacatttgtggcagagctaaagggtttggacccagctcgagtcaatgtgcctgtcattggtggccacgccgggaagacgatcatccccctgatctctcagtgtacccccaaggttgactttccccaagaccagctggccacactcaccgggaggatccaggaggctggcactgaagtcgtgaaggccaaggctggagcaggctctgccactctgtccatggcttatgctggagcccgctttgtcttctccctggtggacgccatgaatgggaaggaaggagtcatcgagtgctcttttgttcagtccaaagagacagagtgcacttatttctctacacccttgctgttggggaaaaaaggcctggagaagaacctaggcattggcaaaatcactccttttgaggagaaaatgattgccgaggccatccctgagctgaaagcctccatcaagaaaggcgaggactttgtgaagaacatgaagtga

SEQ ID NO: 45815 - protein, 338 aa, Rattus norvegicus
MLSALARPVGAALRRSFSTSAQNNAKVAVLGASGGIGQPLSLLLKNSPLVSRLTLYDIAHTPGVAADLSHIETRANVKGYLGPEQLPDCLKGCDVVVIPAGVPRKPGMTRDDLFNTNATIVATLTAACAQHCPEAMICIISNPVNSTIPITAEVFKKHGVYNPNKIFGVTTLDIVRANTFVAELKGLDPARVNVPVIGGHAGKTIIPLISQCTPKVDFPQDQLATLTGRIQEAGTEVVKAKAGAGSATLSMAYAGARFVFSLVDAMNGKEGVIECSFVQSKETECTYFSTPLLLGKKGLEKNLGIGKITPFEEKMIAEAIPELKASIKKGEDFVKNMK

SEQ ID NO: 45816 - DNA, 1026 bp, Arabidopsis thaliana; identical to SEQ ID NO: 45004
  CDS (1)..(1026)

SEQ ID NO: 45817 - protein, 341 aa, Arabidopsis thaliana; identical to SEQ ID NO: 45005

SEQ ID NO: 45818 - DNA, 1062 bp, Vibrio cholerae O1 biovar eltor str. N16961
  CDS (1)..(1062): transl_table=11
ttgcgcaaagtcgcaaagctgacgttaattgattgtaatcagattgtgattactatagcgtttgacggtcggatacacctaatcaccctacaaacatataagagattactctcaaggagatttacgatgaaagtcgctgttattggtgccgctggcggcattggtcaagcccttgctctgttactcaaaaaccgtcttcctgctggttctgatctcgcgctgtatgatattgcgcctgtcacaccgggtgtcgctgcggatctgagtcatatcccaacaccagttaccatcaaaggctatgcgggtgaagacccaacgcctgcgctggaaggtgcggatgtggttctggtttctgcgggtgttgcacgtaagccgggtatggatcgtgcggatctgttcaatgtgaacgctggcattgtgaaagcattggcagaaaaaattgctgtggtgtgtccgaaggcctgtgttggcattattactaacccagtgaacacaacggtccctatcgcagccgaagtgctgaaaaaagccggtgtgtatgacaagcgtaagctatttggtgtcaccacactggatgtgatccgctctgaaaccttcgttgccgcgctgaaagataaagatccgggccaagttcgtgtgcctgtgattggtggtcactcaggggttactattctgcctctgttgtcgcaagtagaaggcgtaagctttaccgatgaagaagttgccgctttgactaaacgtatccaaaacgcgggtaccgaggtggttgaagctaaggcgggtggcggttcagcgactctttctatgggccaagcggcatgtcgttttggtcttgcactggttaaagcactgcaaggcgaatctgatgttgttgagtacgcgtatgtagaaggtgagggggagtacgctccattctttgcccaacctatcaagctaggtaaaaatggcgttgaagcgttgctggatatcggcaaactgagcgcttatgagcaagccgcgctggatggcatgttagatacactcaaaggcgacattcaaatcggtgttgagtttgtaaaataa

SEQ ID NO: 45819 - protein, 353 aa, Vibrio cholerae O1 biovar eltor str. N16961
MRKVAKLTLIDCNQIVITIAFDGRIHLITLQTYKRLLSRRFTMKVAVIGAAGGIGQALALLLKNRLPAGSDLALYDIAPVTPGVAADLSHIPTPVTIKGYAGEDPTPALEGADVVLVSAGVARKPGMDRADLFNVNAGIVKALAEKIAVVCPKACVGIITNPVNTTVPIAAEVLKKAGVYDKRKLFGVTTLDVIRSETFVAALKDKDPGQVRVPVIGGHSGVTILPLLSQVEGVSFTDEEVAALTKRIQNAGTEVVEAKAGGGSATLSMGQAACRFGLALVKALQGESDVVEYAYVEGEGEYAPFFAQPIKLGKNGVEALLDIGKLSAYEQAALDGMLDTLKGDIQIGVEFVK

SEQ ID NO: 45820 - DNA, 1026 bp, Schizosaccharomyces pombe; identical to SEQ ID NO: 45014
  CDS (1)..(1026)

SEQ ID NO: 45821 - protein, 341 aa, Schizosaccharomyces pombe; identical to SEQ ID NO: 45015

SEQ ID NO: 45822 - DNA, 1050 bp, Drosophila melanogaster; identical to SEQ ID NO: 45016
  CDS (1)..(1050)

SEQ ID NO: 45823 - protein, 349 aa, Drosophila melanogaster; identical to SEQ ID NO: 45017

SEQ ID NO: 45824 - DNA, 1044 bp, Drosophila melanogaster; identical to SEQ ID NO: 45018
  CDS (1)..(1044)

SEQ ID NO: 45825 - protein, 347 aa, Drosophila melanogaster; identical to SEQ ID NO: 45019

SEQ ID NO: 45826 - DNA, 1011 bp, Drosophila melanogaster; identical to SEQ ID NO: 45020
  CDS (1)..(1011)

SEQ ID NO: 45827 - protein, 336 aa, Drosophila melanogaster; identical to SEQ ID NO: 45021

SEQ ID NO: 45828 - DNA, 942 bp, Plasmodium falciparum 3D7
  CDS (1)..(942)
atgactaaaattgccttaataggtagtggtcaaatcggagcaattgttggagaattgtgtttgctggaaaatcttggagaccttattttatatgatgtagtcccaggtataccacaaggaaaggctttagatttaaaacattttagtaccatattaggagtaaatagaaacattcttggtactaatcagatcgaagatattaaggatgcagatataatagttattacagcaggtgtacaaagaaaagaaggaatgactagagaagatttgataggggtcaatgggaaaataatgaaaagtgtagctgaatcagttaaattacattgttccaaagcttttgttatttgtgttagtaacccacttgatattatggtaaatgtttttcataagtttagtaatttacctcatgaaaaaatttgtggtatggcaggtatattagatacttctagatattgttcattaattgctgataaattaaaagtatcagctgaagatgttaatgctgttattttaggaggacatggggacttaatggtacccttacaaagatatacatcggtaaatggtgttcctttatctgaatttgtcaagaaaaatatgattagccaaaatgaaatacaagaaataattcaaaaaactagaaatatgggtgctgaaattattaaactagctaaagcatctgcagcatttgccccagctgctgctattacaaaaatgattaaatcatatttgtataatgaaaataatttatttacatgtgctgtttatttaaatggacattataactgttctaatttatttgttggatctactgctaaaattaataataagggggcacatccagttgaattccctttaacaaaggaggaacaagatctttacacggaatcgatagctagcgttcaaagcaacacacaaaaagctttcgacttaattaaataa

SEQ ID NO: 45829 - protein, 313 aa, Plasmodium falciparum 3D7
MTKIALIGSGQIGAIVGELCLLENLGDLILYDVVPGIPQGKALDLKHFSTILGVNRNILGTNQIEDIKDADIIVITAGVQRKEGMTREDLIGVNGKIMKSVAESVKLHCSKAFVICVSNPLDIMVNVFHKFSNLPHEKICGMAGILDTSRYCSLIADKLKVSAEDVNAVILGGHGDLMVPLQRYTSVNGVPLSEFVKKNMISQNEIQEIIQKTRNMGAEIIKLAKASAAFAPAAAITKMIKSYLYNENNLFTCAVYLNGHYNCSNLFVGSTAKINNKGAHPVEFPLTKEEQDLYTESIASVQSNTQKAFDLIK

SEQ ID NO: 45830 - DNA, 1215 bp, Oryza sativa (japonica cultivar-group); identical to SEQ ID NO: 45022
  CDS (1)..(1215)

SEQ ID NO: 45831 - protein, 404 aa, Oryza sativa (japonica cultivar-group); identical to SEQ ID NO: 45023

SEQ ID NO: 45832 - DNA, 1023 bp, Oryza sativa (japonica cultivar-group); identical to SEQ ID NO: 45024
  CDS (1)..(1023)

SEQ ID NO: 45833 - protein, 340 aa, Oryza sativa (japonica cultivar-group); identical to SEQ ID NO: 45025

SEQ ID NO: 45834 - DNA, 1215 bp, Oryza sativa (japonica cultivar-group); identical to SEQ ID NO: 45026
  CDS (1)..(1215)

SEQ ID NO: 45835 - protein, 404 aa, Oryza sativa (japonica cultivar-group); identical to SEQ ID NO: 45027

SEQ ID NO: 45836 - DNA, 1065 bp, Oryza sativa (japonica cultivar-group); identical to SEQ ID NO: 45028
  CDS (1)..(1065)

SEQ ID NO: 45837 - protein, 354 aa, Oryza sativa (japonica cultivar-group); identical to SEQ ID NO: 45029

SEQ ID NO: 45838 - DNA, 1146 bp, Eremothecium gossypii; identical to SEQ ID NO: 45030
  CDS (1)..(1146)

SEQ ID NO: 45839 - protein, 381 aa, Eremothecium gossypii; identical to SEQ ID NO: 45031

SEQ ID NO: 45840 - DNA, 999 bp, Eremothecium gossypii; identical to SEQ ID NO: 45032
  CDS (1)..(999)

SEQ ID NO: 45841 - protein, 332 aa, Eremothecium gossypii; identical to SEQ ID NO: 45033

SEQ ID NO: 45842 - DNA, 1458 bp, Eremothecium gossypii; identical to SEQ ID NO: 45034
  CDS (1)..(1458)

SEQ ID NO: 45843 - protein, 485 aa, Eremothecium gossypii; identical to SEQ ID NO: 45035

SEQ ID NO: 45844 - DNA, 1014 bp, Danio rerio; identical to SEQ ID NO: 45036
  CDS (1)..(1014)

SEQ ID NO: 45845 - protein, 337 aa, Danio rerio; identical to SEQ ID NO: 45037

SEQ ID NO: 45846 - DNA, 1011 bp, Neurospora crassa; identical to SEQ ID NO: 45038
  CDS (1)..(1011)

SEQ ID NO: 45847 - protein, 336 aa, Neurospora crassa; identical to SEQ ID NO: 45039

SEQ ID NO: 45848 - DNA, 993 bp, Neurospora crassa; identical to SEQ ID NO: 45040
  CDS (1)..(993)

SEQ ID NO: 45849 - protein, 330 aa, Neurospora crassa; identical to SEQ ID NO: 45041

SEQ ID NO: 45850 - DNA, 993 bp, Magnaporthe grisea 70-15; identical to SEQ ID NO: 45042
  CDS (1)..(993)

SEQ ID NO: 45851 - protein, 330 aa, Magnaporthe grisea 70-15; identical to SEQ ID NO: 45043

SEQ ID NO: 45852 - DNA, 1011 bp, Magnaporthe grisea 70-15; identical to SEQ ID NO: 45044
  CDS (1)..(1011)

SEQ ID NO: 45853 - protein, 336 aa, Magnaporthe grisea 70-15; identical to SEQ ID NO: 45045

SEQ ID NO: 45854 - DNA, 1011 bp, Gibberella zeae PH-1; identical to SEQ ID NO: 45046
  CDS (1)..(1011)

SEQ ID NO: 45855 - protein, 336 aa, Gibberella zeae PH-1; identical to SEQ ID NO: 45047

SEQ ID NO: 45856 - DNA, 993 bp, Gibberella zeae PH-1; identical to SEQ ID NO: 45048
  CDS (1)..(993)

SEQ ID NO: 45857 - protein, 330 aa, Gibberella zeae PH-1; identical to SEQ ID NO: 45049

SEQ ID NO: 45858 - DNA, 1035 bp, Ustilago maydis 521; identical to SEQ ID NO: 45052
  CDS (1)..(1035)

SEQ ID NO: 45859 - protein, 344 aa, Ustilago maydis 521; identical to SEQ ID NO: 45053

SEQ ID NO: 45860 - DNA, 1374 bp, Ustilago maydis 521; identical to SEQ ID NO: 45054
  CDS (1)..(1374)

SEQ ID NO: 45861 - protein, 457 aa, Ustilago maydis 521; identical to SEQ ID NO: 45055

SEQ ID NO: 45862 - DNA, 972 bp, Aspergillus nidulans FGSC A4; identical to SEQ ID NO: 45056
  CDS (1)..(972)

SEQ ID NO: 45863 - protein, 323 aa, Aspergillus nidulans FGSC A4; identical to SEQ ID NO: 45057

SEQ ID NO: 45864 - DNA, 963 bp, Aspergillus nidulans FGSC A4; identical to SEQ ID NO: 45058
  CDS (1)..(963)

SEQ ID NO: 45865 - protein, 320 aa, Aspergillus nidulans FGSC A4; identical to SEQ ID NO: 45059

SEQ ID NO: 45866 - DNA, 1077 bp, Aspergillus nidulans FGSC A4; identical to SEQ ID NO: 45060
  CDS (1)..(1077)

SEQ ID NO: 45867 - protein, 358 aa, Aspergillus nidulans FGSC A4; identical to SEQ ID NO: 45061

SEQ ID NO: 45868 - DNA, 1056 bp, Gallus gallus; identical to SEQ ID NO: 45062
  CDS (1)..(1056)

SEQ ID NO: 45869 - protein, 351 aa, Gallus gallus; identical to SEQ ID NO: 45063

SEQ ID NO: 45870 - DNA, 1089 bp, Candida glabrata CBS138; identical to SEQ ID NO: 45064
  CDS (1)..(1089)

SEQ ID NO: 45871 - protein, 362 aa, Candida glabrata CBS138; identical to SEQ ID NO: 45065

SEQ ID NO: 45872 - DNA, 1011 bp, Candida glabrata CBS138; identical to SEQ ID NO: 45066
  CDS (1)..(1011)

SEQ ID NO: 45873 - protein, 336 aa, Candida glabrata CBS138; identical to SEQ ID NO: 45067

SEQ ID NO: 45874 - DNA, 1122 bp, Candida glabrata CBS138; identical to SEQ ID NO: 45068
  CDS (1)..(1122)

SEQ ID NO: 45875 - protein, 373 aa, Candida glabrata CBS138; identical to SEQ ID NO: 45069

SEQ ID NO: 45876 - DNA, 1215 bp, Kluyveromyces lactis NRRL Y-1140; identical to SEQ ID NO: 45070
  CDS (1)..(1215)

SEQ ID NO: 45877 - protein, 404 aa, Kluyveromyces lactis NRRL Y-1140; identical to SEQ ID NO: 45071

SEQ ID NO: 45878 - DNA, 1017 bp, Kluyveromyces lactis NRRL Y-1140; identical to SEQ ID NO: 45072
  CDS (1)..(1017)

SEQ ID NO: 45879 - protein, 338 aa, Kluyveromyces lactis NRRL Y-1140; identical to SEQ ID NO: 45073

SEQ ID NO: 45880 - DNA, 1017 bp, Kluyveromyces lactis NRRL Y-1140; identical to SEQ ID NO: 45074
  CDS (1)..(1017)

SEQ ID NO: 45881 - protein, 338 aa, Kluyveromyces lactis NRRL Y-1140; identical to SEQ ID NO: 45075

SEQ ID NO: 45882 - DNA, 1017 bp, Debaryomyces hansenii CBS767; identical to SEQ ID NO: 45076
  CDS (1)..(1017)

SEQ ID NO: 45883 - protein, 338 aa, Debaryomyces hansenii CBS767; identical to SEQ ID NO: 45077

SEQ ID NO: 45884 - DNA, 999 bp, Debaryomyces hansenii CBS767; identical to SEQ ID NO: 45078
  CDS (1)..(999)

SEQ ID NO: 45885 - protein, 332 aa, Debaryomyces hansenii CBS767; identical to SEQ ID NO: 45079

SEQ ID NO: 45886 - DNA, 1041 bp, Debaryomyces hansenii CBS767; identical to SEQ ID NO: 45080
  CDS (1)..(1041)

SEQ ID NO: 45887 - protein, 346 aa, Debaryomyces hansenii CBS767; identical to SEQ ID NO: 45081

SEQ ID NO: 45888 - DNA, 1023 bp, Oryza sativa (japonica cultivar-group); identical to SEQ ID NO: 45082
  CDS (1)..(1023)

SEQ ID NO: 45889 - protein, 340 aa, Oryza sativa (japonica cultivar-group); identical to SEQ ID NO: 45083

SEQ ID NO: 45890 - DNA, 1194 bp, Oryza sativa (japonica cultivar-group); identical to SEQ ID NO: 45084
  CDS (1)..(1194)

SEQ ID NO: 45891 - protein, 397 aa, Oryza sativa (japonica cultivar-group); identical to SEQ ID NO: 45085

SEQ ID NO: 45892 - DNA, 1017 bp, Yarrowia lipolytica CLIB99; identical to SEQ ID NO: 45086
  CDS (1)..(1017)

SEQ ID NO: 45893 - protein, 338 aa, Yarrowia lipolytica CLIB99; identical to SEQ ID NO: 45087

SEQ ID NO: 45894 - DNA, 948 bp, Symbiobacterium thermophilum IAM 14863; identical to SEQ ID NO: 45090
  CDS (1)..(948): transl_table=11

SEQ ID NO: 45895 - protein, 315 aa, Symbiobacterium thermophilum IAM 14863; identical to SEQ ID NO: 45091

SEQ ID NO: 45896 - DNA, 939 bp, Mannheimia succiniciproducens MBEL55E; identical to SEQ ID NO: 45094
  CDS (1)..(939): transl_table=11

SEQ ID NO: 45897 - protein, 312 aa, Mannheimia succiniciproducens MBEL55E; identical to SEQ ID NO: 45095

SEQ ID NO: 45898 - DNA, 954 bp, Actinobacillus pleuropneumoniae serovar 1 str. 4074; identical to SEQ ID NO: 45106
  CDS (1)..(954)

SEQ ID NO: 45899 - protein, 317 aa, Actinobacillus pleuropneumoniae serovar 1 str. 4074; identical to SEQ ID NO: 45107

SEQ ID NO: 45900 - DNA, 936 bp, Haemophilus influenzae R2846
  CDS (1)..(936)
atgaaagttgctgtattaggagccgcaggtggtattggtcaagcattagcgttattactaaaacttcagttgccagcaggcaccgacttagcattatatgatattgccccagtaacaccaggtgttgcagtagatgtgagccatattccaacggcagtgaatgtgaaaggtttttctggcgaagatccaacacctgcacttgaaggtgcggatgttgtattaatttctgctggtgttgcacgtaaacctggtatggatcgttcagatttattcaatattaatgcaggtattgttcgtggtttaattgaaaaagtcgcggttacttgccctaaagcctgtgttggtattatcactaacccagtaaatactactgttgcgattgcggctgaagtgttgaaaaaagcaggtgtttacgacaaacgtaaattatttggtgtgacaactttagacgtgttacgttctgaaacttttgtggctgaattaaaaggtttaaatgtttctcgcaccagcgttcctgttattggtggtcactcaggtgtgactattcttccattactttctcaagttcaatatgcaaaatggaatgaagatgaaatcgaaccattaacaaaacgtatccaaaatgcaggtacagaagtggtcaatgcaaaagcgggtggtggttctgcaaccctttcaatggcgcaagctgcagcacgttttgctcgttctttagtgaaaggattgagtggcgagacagttgttgaatgtacttatgttgaaggcgatggcaaatatgctcgtttcttctctcagcccgttcgtttaggcaaagagggtgtagaagaaattttaccaattggcccattaagcaattttgaacaacaagccttagaaaatatgttgccaactttacgtgcagatattgaattaggcgaaaaatttattaatggttaa

SEQ ID NO: 45901 - protein, 311 aa, Haemophilus influenzae R2846
MKVAVLGAAGGIGQALALLLKLQLPAGTDLALYDIAPVTPGVAVDVSHIPTAVNVKGFSGEDPTPALEGADVVLISAGVARKPGMDRSDLFNINAGIVRGLIEKVAVTCPKACVGIITNPVNTTVAIAAEVLKKAGVYDKRKLFGVTTLDVLRSETFVAELKGLNVSRTSVPVIGGHSGVTILPLLSQVQYAKWNEDEIEPLTKRIQNAGTEVVNAKAGGGSATLSMAQAAARFARSLVKGLSGETVVECTYVEGDGKYARFFSQPVRLGKEGVEEILPIGPLSNFEQQALENMLPTLRADIELGEKFING

SEQ ID NO: 45902 - DNA, 957 bp, Rhodospirillum rubrum; identical to SEQ ID NO: 45116
  CDS (1)..(957)

SEQ ID NO: 45903 - protein, 318 aa, Rhodospirillum rubrum; identical to SEQ ID NO: 45117

SEQ ID NO: 45904 - DNA, 969 bp, Ferroplasma acidarmanus; identical to SEQ ID NO: 45122
  CDS (1)..(969)

SEQ ID NO: 45905 - protein, 322 aa, Ferroplasma acidarmanus; identical to SEQ ID NO: 45123

SEQ ID NO: 45906 - DNA, 957 bp, Trypanosoma brucei; identical to SEQ ID NO: 45132
  CDS (1)..(957)

SEQ ID NO: 45907 - protein, 318 aa, Trypanosoma brucei; identical to SEQ ID NO: 45133

SEQ ID NO: 45908 - DNA, 1077 bp, Medicago sativa; identical to SEQ ID NO: 45134
  CDS (1)..(1077)

SEQ ID NO: 45909 - protein, 358 aa, Medicago sativa; identical to SEQ ID NO: 45135

SEQ ID NO: 45910 - DNA, 1032 bp, Medicago sativa; identical to SEQ ID NO: 45136
  CDS (1)..(1032)

SEQ ID NO: 45911 - protein, 343 aa, Medicago sativa; identical to SEQ ID NO: 45137

SEQ ID NO: 45912 - DNA, 1227 bp, Medicago sativa; identical to SEQ ID NO: 45138
  CDS (1)..(1227)

SEQ ID NO: 45913 - protein, 408 aa, Medicago sativa; identical to SEQ ID NO: 45139

SEQ ID NO: 45914 - DNA, 972 bp, Trypanosoma cruzi; identical to SEQ ID NO: 45140
  CDS (1)..(972)

SEQ ID NO: 45915 - protein, 323 aa, Trypanosoma cruzi; identical to SEQ ID NO: 45141

SEQ ID NO: 45916 - DNA, 972 bp, Trypanosoma brucei; identical to SEQ ID NO: 45142
  CDS (1)..(972)

SEQ ID NO: 45917 - protein, 323 aa, Trypanosoma brucei; identical to SEQ ID NO: 45143

SEQ ID NO: 45918 - DNA, 1242 bp, Glycine max; identical to SEQ ID NO: 45144
  CDS (1)..(1242)

SEQ ID NO: 45919 - protein, 413 aa, Glycine max; identical to SEQ ID NO: 45145

SEQ ID NO: 45920 - DNA, 1197 bp, Pisum sativum; identical to SEQ ID NO: 45146
  CDS (1)..(1197)

SEQ ID NO: 45921 - protein, 398 aa, Pisum sativum; identical to SEQ ID NO: 45147

SEQ ID NO: 45922 - DNA, 1212 bp, Arabidopsis thaliana; identical to SEQ ID NO: 45148
  CDS (1)..(1212)

SEQ ID NO: 45923 - protein, 403 aa, Arabidopsis thaliana; identical to SEQ ID NO: 45149

SEQ ID NO: 45924 - DNA, 951 bp, Piromyces sp; identical to SEQ ID NO: 45150
  CDS (1)..(951)

SEQ ID NO: 45925 - protein, 316 aa, Piromyces sp; identical to SEQ ID NO: 45151

SEQ ID NO: 45926 - DNA, 1068 bp, Chlamydomonas reinhardtii; identical to SEQ ID NO: 45152
  CDS (1)..(1068)

SEQ ID NO: 45927 - protein, 355 aa, Chlamydomonas reinhardtii; identical to SEQ ID NO: 45153

SEQ ID NO: 45928 - DNA, 939 bp, Actinobacillus succinogenes; identical to SEQ ID NO: 45154
  CDS (1)..(939): transl_table=11

SEQ ID NO: 45929 - protein, 312 aa, Actinobacillus succinogenes; identical to SEQ ID NO: 45155

SEQ ID NO: 45930 - DNA, 1074 bp, Lycopersicon esculentum; identical to SEQ ID NO: 45158
  CDS (1)..(1074)

SEQ ID NO: 45931 - protein, 357 aa, Lycopersicon esculentum; identical to SEQ ID NO: 45159

SEQ ID NO: 45932 - DNA, 1041 bp, Lycopersicon esculentum; identical to SEQ ID NO: 45160
  misc_feature (766)..(766): n is a, c, g, or t
  CDS (1)..(1041)

SEQ ID NO: 45933 - protein, 346 aa, Lycopersicon esculentum; identical to SEQ ID NO: 45161
  misc_feature (256)..(256): Xaa can be any naturally occuring amino acid

SEQ ID NO: 45934 - DNA, 939 bp, Moritella yayanosii
  CDS (1)..(939): transl_table=11
atgaaagtcgctgtattaggtgctgctggcggtatcggtcaagctttagccctacttttgaaaactcaactacctgctggttctgatttatcactttatgatatcgcccctgtaactccaggtgttgctgttgatttaagccatatccctacagacgttactattgctggttttgctggtacagatcctactgaagcacttgttggtgctgacgtggtacttatctctgcgggtgttgctcgtaaaccaggtatggaccgttcagatctattcaatatcaatgctgggatcatcaaaaatctagctgctaaatgtgcggaagtatgtccaaatgcatgtatcggcattatcactaacccagttaacaccacggtgccaattgctgctgaagtacttaagcaagcgggtgtttatgacaaacgtaaactattcggtatcaccacgctggatgttatccgttctgaaacttttgtaagtgagcttaaaggcatttcacttgctgacgttgaagtaccagtaattggtggtcactcaggcgtaacaattctgccgctactttctcaagtgaaaggcgttgaatttactgctgaagaaattgtgacacttacagcacgcattcaaaacgcaggtactgaagttgttgaagctaaagcgggtggcggttctgcgacactttctatgggtcaagcggcggcacgtttcggcctttctctggttcgcgcactacaaggtgaacaaggtatagttgagtgtacttatgttgatggtggctctgagcacgcaacattcttcgcacaacctgtactactaggtaaaaacggcgttgaagaagtactcgcatacggtgaactaagcgaatttgaagcaagcgcacgtgatgcaatgttagaagaactaaaagcgaacatcacgctaggtgaagaattcgttgctggttaa

SEQ ID NO: 45935 - protein, 312 aa, Moritella yayanosii
MKVAVLGAAGGIGQALALLLKTQLPAGSDLSLYDIAPVTPGVAVDLSHIPTDVTIAGFAGTDPTEALVGADVVLISAGVARKPGMDRSDLFNINAGIIKNLAAKCAEVCPNACIGIITNPVNTTVPIAAEVLKQAGVYDKRKLFGITTLDVIRSETFVSELKGISLADVEVPVIGGHSGVTILPLLSQVKGVEFTAEEIVTLTARIQNAGTEVVEAKAGGGSATLSMGQAAARFGLSLVRALQGEQGIVECTYVDGGSEHATFFAQPVLLGKNGVEEVLAYGELSEFEASARDAMLEELKANITLGEEFVAG

SEQ ID NO: 45936 - DNA, 1017 bp, Xenopus laevis; identical to SEQ ID NO: 45166
  CDS (1)..(1017)

SEQ ID NO: 45937 - protein, 338 aa, Xenopus laevis; identical to SEQ ID NO: 45167

SEQ ID NO: 45938 - DNA, 939 bp, Moritella sp; identical to SEQ ID NO: 45168
  CDS (1)..(939): transl_table=11

SEQ ID NO: 45939 - protein, 312 aa, Moritella sp; identical to SEQ ID NO: 45169

SEQ ID NO: 45940 - DNA, 936 bp, Shewanella sp; identical to SEQ ID NO: 45170
  CDS (1)..(936): transl_table=11

SEQ ID NO: 45941 - protein, 311 aa, Shewanella sp; identical to SEQ ID NO: 45171

SEQ ID NO: 45942 - DNA, 939 bp, Moritella sp; identical to SEQ ID NO: 45172
  CDS (1)..(939): transl_table=11

SEQ ID NO: 45943 - protein, 312 aa, Moritella sp; identical to SEQ ID NO: 45173

SEQ ID NO: 45944 - DNA, 939 bp, Moritella sp; identical to SEQ ID NO: 45174
  CDS (1)..(939): transl_table=11

SEQ ID NO: 45945 - protein, 312 aa, Moritella sp; identical to SEQ ID NO: 45175

SEQ ID NO: 45946 - DNA, 936 bp, Shewanella sp; identical to SEQ ID NO: 45176
  CDS (1)..(936): transl_table=11

SEQ ID NO: 45947 - protein, 311 aa, Shewanella sp; identical to SEQ ID NO: 45177

SEQ ID NO: 45948 - DNA, 939 bp, Moritella sp; identical to SEQ ID NO: 45178
  CDS (1)..(939): transl_table=11

SEQ ID NO: 45949 - protein, 312 aa, Moritella sp; identical to SEQ ID NO: 45179

SEQ ID NO: 45950 - DNA, 939 bp, Moritella sp; identical to SEQ ID NO: 45180
  CDS (1)..(939): transl_table=11

SEQ ID NO: 45951 - protein, 312 aa, Moritella sp; identical to SEQ ID NO: 45181

SEQ ID NO: 45952 - DNA, 939 bp, Moritella sp; identical to SEQ ID NO: 45182
  CDS (1)..(939): transl_table=11

SEQ ID NO: 45953 - protein, 312 aa, Moritella sp; identical to SEQ ID NO: 45183

SEQ ID NO: 45954 - DNA, 951 bp, Toxoplasma gondii; identical to SEQ ID NO: 45184
  CDS (1)..(951)

SEQ ID NO: 45955 - protein, 316 aa, Toxoplasma gondii; identical to SEQ ID NO: 45185

SEQ ID NO: 45956 - DNA, 1017 bp, Homo sapiens; identical to SEQ ID NO: 45186
  CDS (1)..(1017)

SEQ ID NO: 45957 - protein, 338 aa, Homo sapiens [sequence omitted]

SEQ ID NO: 45958 - DNA, 1017 bp, Xenopus laevis; identical to SEQ ID NO: 45188
  CDS (1)..(1017)

SEQ ID NO: 45959 - protein, 338 aa, Xenopus laevis; identical to SEQ ID NO: 45189

SEQ ID NO: 45960 - DNA, 951 bp, Cryptosporidium parvum; identical to SEQ ID NO: 45192
  CDS (1)..(951)

SEQ ID NO: 45961 - protein, 316 aa, Cryptosporidium parvum; identical to SEQ ID NO: 45193

SEQ ID NO: 45962 - DNA, 1023 bp, Branchiostoma belcheri tsingtaunese; identical to SEQ ID NO: 45194
  CDS (1)..(1023)

SEQ ID NO: 45963 - protein, 340 aa, Branchiostoma belcheri tsingtaunese; identical to SEQ ID NO: 45195

SEQ ID NO: 45964 - DNA, 1017 bp, Echinococcus granulosus; identical to SEQ ID NO: 45196
  CDS (1)..(1017)

SEQ ID NO: 45965 - protein, 338 aa, Echinococcus granulosus; identical to SEQ ID NO: 45197

SEQ ID NO: 45966 - DNA, 1023 bp, Paracoccidioides brasiliensis; identical to SEQ ID NO: 45198
  CDS (1)..(1023)

SEQ ID NO: 45967 - protein, 340 aa, Paracoccidioides brasiliensis; identical to SEQ ID NO: 45199

SEQ ID NO: 45968 - DNA, 990 bp, Entamoeba histolytica
  CDS (1)..(990)
atgcaacaaccaattccttgggaaaaagtcaatagaactgaaccattacatgttttaattactggggctgctggtcaaattggatataatttatgttttctcattggaaggggatttttatttgattgtgatgttattcttcatttgtatgatctaaatgatatggcattaaaaggattatcaatggaattaactgattgttgtttgccaaaactaaaaggaattatttctactacagaaattgcacttgcttttagtaatgttgatgttgcaattattgttgcaggtgttccacgaaaacctggaatgcaacgtagtgatttaattaatgtaaataaaaaagtaatggaaatgaatggaaaagcacttggaacttattcaaataaagatgttcgtgtggttgttgttgctaatcctgcaaacactaatgcctatgttatttgtaaaacatcaggtattccacctgagcacataactgcactaacacgtttagaccaaaatagagcaactgcgtttgttgctaatgaagttgggtgtcaacctgaatttgttcataatattattgtttggggaaatcactctaatacaatgcaaccagacctttcatattcatatcttgctgaccaaaatgggattaaaccattagctaattgtattgaagattttgatgcttttactgaaaaagttagatgtcgtggtgaagaagtaatcagtacaagaaaagcaagttctgctggatctgctgctcatgcaatttgtcaacacattaaagattggatttatggaactaagccaggaattatggttagtatgggagtttctagtaatggagaatatggaattgatacaggtcttttttattcaatgccagtgacatgttcagaaggagagtatcatattgttgattctttagtaatagaaccaagaatcaaagactcattaattctttcagaattagagttaattgatgaacgaaatattgttaattga

SEQ ID NO: 45969 - protein, 329 aa, Entamoeba histolytica
MQQPIPWEKVNRTEPLHVLITGAAGQIGYNLCFLIGRGFLFDCDVILHLYDLNDMALKGLSMELTDCCLPKLKGIISTTEIALAFSNVDVAIIVAGVPRKPGMQRSDLINVNKKVMEMNGKALGTYSNKDVRVVVVANPANTNAYVICKTSGIPPEHITALTRLDQNRATAFVANEVGCQPEFVHNIIVWGNHSNTMQPDLSYSYLADQNGIKPLANCIEDFDAFTEKVRCRGEEVISTRKASSAGSAAHAICQHIKDWIYGTKPGIMVSMGVSSNGEYGIDTGLFYSMPVTCSEGEYHIVDSLVIEPRIKDSLILSELELIDERNIVN

SEQ ID NO: 45970 - DNA, 1068 bp, Entamoeba histolytica
  CDS (1)..(1068)
atgaatactggtttagacattagtaaaacttggaaaagaattaatgttgatccaaatgttgaatcaaaaccacttcatgttcttgtaactggagctgcaggtcaaattggatataatcttcttttcttaattgctcatggtttaatgtttggtccaaatcaaacagtttatttacatttatatgatattatggttgaagctatggaaggagtaaaaatggaattagctgattgttgtttcccacttgttaaaggagttgtagcttcaaataaaacagaagttgcatttaaagatgttgaatgtgctattttagttgctggtatgccaagaaaagtaggtatggaaagaaaagaattaattggcattaacactagaattatgaaagaacaagctcttgctcttaagaattttgctaatcctcatgttagagttttagttgttgctaatccagctaatactaatgcacttgtagttgctaataatgctggaattgatgttaaacaaattacttgtttaactcgacttgatcaaaatagggctattgctcaaattgcaagtaaattaaattgtaaagttgaagatgtttctgatgcttttgtatggggaaatcattcagaaaaacaatgtccagatatttctcatgcagttgttcaaacaccaaatggaccaaaaagagtagctgaccttgttgaagagtcatggttagaatcttttaataaaactgttcaagaaagaggagctaaagtaattgaaatgagaaaggcatcatcagctgcttcagctgccaaagcaattgttgatcattttagagattggtgtcttggaacaaataaagaaaagatagtttgtatgggagtttatagtgaaggacaatatggtattccaaaaggaatattctttagtatgccagttgtctgttatggaggtgaatatcatattgttgatgacttagtactcagtgaatcaactagaacaatgttgaagaattctgaagaagaattattagaagaaaagaaattagagatagcatatgaagaaattaaacaacattccaatgttcacgaataa

SEQ ID NO: 45971 - protein, 355 aa, Entamoeba histolytica
MNTGLDISKTWKRINVDPNVESKPLHVLVTGAAGQIGYNLLFLIAHGLMFGPNQTVYLHLYDIMVEAMEGVKMELADCCFPLVKGVVASNKTEVAFKDVECAILVAGMPRKVGMERKELIGINTRIMKEQALALKNFANPHVRVLVVANPANTNALVVANNAGIDVKQITCLTRLDQNRAIAQIASKLNCKVEDVSDAFVWGNHSEKQCPDISHAVVQTPNGPKRVADLVEESWLESFNKTVQERGAKVIEMRKASSAASAAKAIVDHFRDWCLGTNKEKIVCMGVYSEGQYGIPKGIFFSMPVVCYGGEYHIVDDLVLSESTRTMLKNSEEELLEEKKLEIAYEEIKQHSNVHE

SEQ ID NO: 45972 - DNA, 960 bp, Francisella tularensis subsp; identical to SEQ ID NO: 45200
  CDS (1)..(960): transl_table=11

SEQ ID NO: 45973 - protein, 319 aa, Francisella tularensis subsp; identical to SEQ ID NO: 45201

SEQ ID NO: 45974 - DNA, 1035 bp, Solanum tuberosum; identical to SEQ ID NO: 45202
  CDS (1)..(1035)

SEQ ID NO: 45975 - protein, 344 aa, Solanum tuberosum; identical to SEQ ID NO: 45203

SEQ ID NO: 45976 - DNA, 1041 bp, Solanum tuberosum; identical to SEQ ID NO: 45204
  CDS (1)..(1041)

SEQ ID NO: 45977 - protein, 346 aa, Solanum tuberosum; identical to SEQ ID NO: 45205

SEQ ID NO: 45978 - DNA, 1041 bp, Solanum tuberosum; identical to SEQ ID NO: 45206
  CDS (1)..(1041)

SEQ ID NO: 45979 - protein, 346 aa, Solanum tuberosum; identical to SEQ ID NO: 45207

SEQ ID NO: 45980 - DNA, 1026 bp, Arabidopsis thaliana; identical to SEQ ID NO: 45208
  CDS (1)..(1026)

SEQ ID NO: 45981 - protein, 341 aa, Arabidopsis thaliana; identical to SEQ ID NO: 45209

SEQ ID NO: 45982 - DNA, 1044 bp, Drosophila melanogaster
  CDS (1)..(1044)
atgtttttggcctctagattgttaagccatgttggcaacttgcctcccaaggtccagcagcttggatatatcagccgaggtctcaaggtcgccgttgtgggatcggtgggtggaatcggtcagccgctgtcccttcttctcaagcataatccgcaaatctcgaccctgtcgctgtacgacattaagaatacaaccggtgtaggagtagacttatctcatatcaacacccgtgcttcagtgtgcccattcgagggtaagaatggtttaaaaaaagctatggataaggctgatatagtggtgataccggcgggtttgccacgtaagcccggaatgaagcgcgaagatttggtggacgtgaatgccagcgttgcctgcgaagtggcttttgcggctagcgaagtttgtcccggtgccatgcttgccttcataacgaaccccatcaatgtgatagtacccatcgtggccacgatccttaaagcaaagggtacatacgatccgaatcgactatttggtgtcaccactctggatgtggtacgagcccagacctttgtagcggacattctcaacgttgatccacagaaagtgaatatacccgtaatcggtggccatacaggtcggaccatcctgcccatactgtcgcagtgtgatcccccctttaagggtaccgataaggagcgcgaagcgttgatccaacgcatccaaaatgcgggcacagaagtggttaatgccaaggatggcctgggctcggccaccctatcgatggcctttgcagccactcagtttgtaaactcgttgataaagggtatcaagggttcaaaggacgagtgcattgtggaatgtgcctatgtggagtctgatgtcacggaggcccagttcttcgccaccccactgatactgggaccccagggtgtcaaggaaaacacaggattgcccgatttggacgatgaggaaaggaaggctctaaatggtatgctacccattttgaaggagagtatcgcaaagggcatcaaattgggcgagggtatgatatgcagttgtgcataa

SEQ ID NO: 45983 - protein, 347 aa, Drosophila melanogaster
MFLASRLLSHVGNLPPKVQQLGYISRGLKVAVVGSVGGIGQPLSLLLKHNPQISTLSLYDIKNTTGVGVDLSHINTRASVCPFEGKNGLKKAMDKADIVVIPAGLPRKPGMKREDLVDVNASVACEVAFAASEVCPGAMLAFITNPINVIVPIVATILKAKGTYDPNRLFGVTTLDVVRAQTFVADILNVDPQKVNIPVIGGHTGRTILPILSQCDPPFKGTDKEREALIQRIQNAGTEVVNAKDGLGSATLSMAFAATQFVNSLIKGIKGSKDECIVECAYVESDVTEAQFFATPLILGPQGVKENTGLPDLDDEERKALNGMLPILKESIAKGIKLGEGMICSCA

SEQ ID NO: 45984 - DNA, 1020 bp, Talaromyces emersonii; identical to SEQ ID NO: 45212
  CDS (1)..(1020)

SEQ ID NO: 45985 - protein, 339 aa, Talaromyces emersonii; identical to SEQ ID NO: 45213

SEQ ID NO: 45986 - DNA, 1014 bp, Sphyraena idiastes; identical to SEQ ID NO: 45214
  CDS (1)..(1014)

SEQ ID NO: 45987 - protein, 337 aa, Sphyraena idiastes; identical to SEQ ID NO: 45215

SEQ ID NO: 45988 - DNA, 1065 bp, Arabidopsis thaliana; identical to SEQ ID NO: 45216
  CDS (1)..(1065)

SEQ ID NO: 45989 - protein, 354 aa, Arabidopsis thaliana; identical to SEQ ID NO: 45217

SEQ ID NO: 45990 - DNA, 1029 bp, Nucella lapillus; identical to SEQ ID NO: 45218
  CDS (1)..(1029)

SEQ ID NO: 45991 - protein, 342 aa, Nucella lapillus; identical to SEQ ID NO: 45219

SEQ ID NO: 45992 - DNA, 969 bp, Phytomonas sp; identical to SEQ ID NO: 45220
  CDS (1)..(969)

SEQ ID NO: 45993 - protein, 322 aa, Phytomonas sp; identical to SEQ ID NO: 45221

SEQ ID NO: 45994 - DNA, 969 bp, Phytomonas sp; identical to SEQ ID NO: 45222
  CDS (1)..(969)

SEQ ID NO: 45995 - protein, 322 aa, Phytomonas sp; identical to SEQ ID NO: 45223

SEQ ID NO: 45996 - DNA, 1059 bp, Vitis vinifera; identical to SEQ ID NO: 45224
  CDS (1)..(1059)

SEQ ID NO: 45997 - protein, 352 aa, Vitis vinifera; identical to SEQ ID NO: 45225

SEQ ID NO: 45998 - DNA, 1026 bp, Nucella lapillus; identical to SEQ ID NO: 45226
  CDS (1)..(1026)

SEQ ID NO: 45999 - protein, 341 aa, Nucella lapillus; identical to SEQ ID NO: 45227

SEQ ID NO: 46000 - DNA, 1038 bp, Glycine max; identical to SEQ ID NO: 45228
  CDS (1)..(1038)

SEQ ID NO: 46001 - protein, 345 aa, Glycine max; identical to SEQ ID NO: 45229

SEQ ID NO: 46002 - DNA, 969 bp, Leishmania major; identical to SEQ ID NO: 45230
  CDS (1)..(969)

SEQ ID NO: 46003 - protein, 322 aa, Leishmania major; identical to SEQ ID NO: 45231

SEQ ID NO: 46004 - DNA, 1239 bp, Nicotiana tabacum; identical to SEQ ID NO: 45232
  CDS (1)..(1239): transl_table=11

SEQ ID NO: 46005 - protein, 412 aa, Nicotiana tabacum; identical to SEQ ID NO: 45233

SEQ ID NO: 46006 - DNA, 1029 bp, Malassezia furfur; identical to SEQ ID NO: 45234
  CDS (1)..(1029)

SEQ ID NO: 46007 - protein, 342 aa, Malassezia furfur; identical to SEQ ID NO: 45235

SEQ ID NO: 46008 - DNA, 1008 bp, Aquifex aeolicus; identical to SEQ ID NO: 45236
  CDS (1)..(1008): transl_table=11

SEQ ID NO: 46009 - protein, 335 aa, Aquifex aeolicus; identical to SEQ ID NO: 45237

SEQ ID NO: 46010 - DNA, 1005 bp, Aquifex aeolicus; identical to SEQ ID NO: 45238
  CDS (1)..(1005): transl_table=11

SEQ ID NO: 46011 - protein, 334 aa, Aquifex aeolicus; identical to SEQ ID NO: 45239

SEQ ID NO: 46012 - DNA, 1065 bp, Arabidopsis thaliana; identical to SEQ ID NO: 45240
  CDS (1)..(1065)

SEQ ID NO: 46013 - protein, 354 aa, Arabidopsis thaliana; identical to SEQ ID NO: 45241

SEQ ID NO: 46014 - DNA, 1077 bp, Brassica napus; identical to SEQ ID NO: 45242
  CDS (1)..(1077)

SEQ ID NO: 46015 - protein, 358 aa, Brassica napus; identical to SEQ ID NO: 45243

SEQ ID NO: 46016 - DNA, 1071 bp, Citrullus lanatus; identical to SEQ ID NO: 45244
  CDS (1)..(1071)

SEQ ID NO: 46017 - protein, 356 aa, Citrullus lanatus; identical to SEQ ID NO: 45245

SEQ ID NO: 46018 - DNA, 1071 bp, Cucumis sativus; identical to SEQ ID NO: 45246
  CDS (1)..(1071)

SEQ ID NO: 46019 - protein, 356 aa, Cucumis sativus; identical to SEQ ID NO: 45247

SEQ ID NO: 46020 - DNA, 1071 bp, Oryza sativa; identical to SEQ ID NO: 45248
  CDS (1)..(1071)

SEQ ID NO: 46021 - protein, 356 aa, Oryza sativa; identical to SEQ ID NO: 45249

SEQ ID NO: 46022 - DNA, 1077 bp, Brassica napus; identical to SEQ ID NO: 45250
  CDS (1)..(1077)

SEQ ID NO: 46023 - protein, 358 aa, Brassica napus; identical to SEQ ID NO: 45251

SEQ ID NO: 46024 - DNA, 1065 bp, Arabidopsis thaliana
  CDS (1)..(1065)
atggatccaaaccaacgtatcgcgagaatctctgctcatctcaatcctcctaatcttcataatcagattgctgacgggtcaggtttgaatcgggtggcttgtcgggcaaaaggtggatcacccggattcaaagtggcgatacttggagcagctggtggaattggacaacctcttgcgatgttgatgaagatgaatcctttggtttcggttcttcatctctatgatgttgctaatgctcctggtgttactgctgatattagtcatatggatactagtgccgttgttcgtggatttctcgggcagccgcagttagaggaagcacttacgggtatggatttagtgatcatacctgctggtgttccgaggaaaccagggatgacgagggatgatctgtttaacattaatgctgggattgtgaggacactctctgaagctatagctaaatgttgtcctaaagcaattgtgaatataatcagtaatccggtgaactccacggtgccaatcgcagctgaggttttcaagaaagctggaacctttgatccaaagaaactcatgggtgtcactatgcttgatgttgttagagctaatacctttgtggcggaagtaatgagtcttgatccccgtgaagttgaagttccggttgttggaggacacgcaggagttacgattttaccactgctttcgcaggtgaaacctccttgctcgttcactcaaaaagagattgaatatctcacagaccgcatccaaaacggtggcactgaagttgttgaggctaaagctggagcaggttctgcaacactatccatggcatatgcagcagtggagtttgcagatgcttgcctcaggggtctacgaggtgatgcaaacatcgttgagtgcgcatatgtggcatcccatgtgactgagcttcccttcttcgcatcgaaggtgcgtctgggacgatgtgggatcgatgaagtgtacggccttggaccattgaacgaatatgagaggatgggattagagaaggcaaagaaagagctttcagtaagtattcataaaggtgttacctttgcgaagaaataa

SEQ ID NO: 46025 - protein, 354 aa, Arabidopsis thaliana
MDPNQRIARISAHLNPPNLHNQIADGSGLNRVACRAKGGSPGFKVAILGAAGGIGQPLAMLMKMNPLVSVLHLYDVANAPGVTADISHMDTSAVVRGFLGQPQLEEALTGMDLVIIPAGVPRKPGMTRDDLFNINAGIVRTLSEAIAKCCPKAIVNIISNPVNSTVPIAAEVFKKAGTFDPKKLMGVTMLDVVRANTFVAEVMSLDPREVEVPVVGGHAGVTILPLLSQVKPPCSFTQKEIEYLTDRIQNGGTEVVEAKAGAGSATLSMAYAAVEFADACLRGLRGDANIVECAYVASHVTELPFFASKVRLGRCGIDEVYGLGPLNEYERMGLEKAKKELSVSIHKGVTFAKK

SEQ ID NO: 46026 - DNA, 1026 bp, Arabidopsis thaliana
  CDS (1)..(1026)
atgttcagatctatgctcgtccgatcttctgcctccgcgaagcaggcggttatccgccgtagcttctcctccggctccgtccccgagcgtaaagtcgccatccttggtgccgccggtggaattggtcagcctcttgctctcctcatgaagcttaatcctcttgtctcttccctctccctctacgatatcgctaacactcctggagttgctgctgatgttggtcacatcaacaccagatctgaggttgttggatacatgggcgatgataacttggccaaagctcttgaaggagctgatctcgttatcattccagctggtgtaccaaggaagcctggtatgacccgtgacgatcttttcaacattaatgctggaattgtcaagaacctttgcactgccatcgccaagtactgcccacatgcgcttattaatatgatcagcaaccctgtgaactctactgttccaattgcagctgagatatttaagaaggctggtatgtacgatgaaaagaaattgtttggtgttaccactcttgacgtcgtcagggccaggactttctatgctggaaaggcaaatgtcccagttgcagaagttaatgttccggtgattggtggtcatgctggggttactattctccctctcttctctcaggcaactcctcaagccaacttgtcaagtgacatacttaccgcccttactaagcgtacccaagatggaggtacagaagtcgtggaggcaaaagcaggaaaaggttcagctacattgtccatggcctatgccggagcattgttcgctgatgcatgcttgaaaggactcaacggtgttccagatgtcatagaatgctcatacgtgcaatctacaatcaccgagcttcctttctttgcctcgaaggtgaggttggggaagaatggtgtggaggaggttcttgacttgggaccactctcagactttgagaaggaaggcttggaagcattgaagccagaactcaagtcctccatagaaaagggagtcaagtttgccaaccagtga

SEQ ID NO: 46027 - protein, 341 aa, Arabidopsis thaliana
MFRSMLVRSSASAKQAVIRRSFSSGSVPERKVAILGAAGGIGQPLALLMKLNPLVSSLSLYDIANTPGVAADVGHINTRSEVVGYMGDDNLAKALEGADLVIIPAGVPRKPGMTRDDLFNINAGIVKNLCTAIAKYCPHALINMISNPVNSTVPIAAEIFKKAGMYDEKKLFGVTTLDVVRARTFYAGKANVPVAEVNVPVIGGHAGVTILPLFSQATPQANLSSDILTALTKRTQDGGTEVVEAKAGKGSATLSMAYAGALFADACLKGLNGVPDVIECSYVQSTITELPFFASKVRLGKNGVEEVLDLGPLSDFEKEGLEALKPELKSSIEKGVKFANQ

SEQ ID NO: 46028 - DNA, 1026 bp, Brassica napus; identical to SEQ ID NO: 45252
  CDS (1)..(1026)

SEQ ID NO: 46029 - protein, 341 aa, Brassica napus; identical to SEQ ID NO: 45253

SEQ ID NO: 46030 - DNA, 1026 bp, Caenorhabditis elegans; identical to SEQ ID NO: 45254
  CDS (1)..(1026)

SEQ ID NO: 46031 - protein, 341 aa, Caenorhabditis elegans; identical to SEQ ID NO: 45255

SEQ ID NO: 46032 - DNA, 1122 bp, Chlamydomonas reinhardtii; identical to SEQ ID NO: 45256
  CDS (1)..(1122)

SEQ ID NO: 46033 - protein, 373 aa, Chlamydomonas reinhardtii; identical to SEQ ID NO: 45257

SEQ ID NO: 46034 - DNA, 1044 bp, Citrullus lanatus; identical to SEQ ID NO: 45258
  CDS (1)..(1044)

SEQ ID NO: 46035 - protein, 347 aa, Citrullus lanatus; identical to SEQ ID NO: 45259

SEQ ID NO: 46036 - DNA, 1044 bp, Eucalyptus gunnii; identical to SEQ ID NO: 45260
  CDS (1)..(1044)

SEQ ID NO: 46037 - protein, 347 aa, Eucalyptus gunnii; identical to SEQ ID NO: 45261

SEQ ID NO: 46038 - DNA, 1005 bp, Saccharomyces cerevisiae; identical to SEQ ID NO: 45262
  CDS (1)..(1005)

SEQ ID NO: 46039 - protein, 334 aa, Saccharomyces cerevisiae; identical to SEQ ID NO: 45263

SEQ ID NO: 46040 - DNA, 963 bp, Bartonella henselae; identical to SEQ ID NO: 45274
  CDS (1)..(963): transl_table=11

SEQ ID NO: 46041 - protein, 320 aa, Bartonella henselae; identical to SEQ ID NO: 45275

SEQ ID NO: 46042 - DNA, 969 bp, Bradyrhizobium japonicum; identical to SEQ ID NO: 45278
  CDS (1)..(969)

SEQ ID NO: 46043 - protein, 322 aa, Bradyrhizobium japonicum; identical to SEQ ID NO: 45279

SEQ ID NO: 46044 - DNA, 963 bp, Brucella melitensis
  CDS (1)..(963)
atggcacgcaacaagattgccctcatcggctccggcatgatcggcggtacgctcgctcacctggccggtctgaaggaactcggtgacgtcgtccttttcgacattgcggaaggcaccccgcagggcaaggggctggatatcgccgaatcttctccggtcgatggtttcgatgcgaagttcactggcgcgaacgattacgccgccattgaaggcgcagacgtcgtcatcgtcaccgcaggggtgccgcgcaagccgggcatgagccgcgacgatctcctgggcatcaacctgaaggtgatggaacaggtgggcgcgggcatcaagaaatatgcgccggaagctttcgtcatctgcatcaccaacccgctcgacgccatggtctgggcgctgcagaagttctccggccttccggcccacaaggttgtcggcatggctggcgttctcgacagcgcccgcttccgttatttcctctcggaagaattcaacgtttcggtcgaggacgtcacggcattcgtgctgggtggccacggcgattcgatggttccgctggcgcgctactcgaccgttgccggcattccgctgtctgatctcgtcaagatgggctggaccagccaggacaagctcgacaagatcatccagcgcacccgtgacggcggcgcggaaatcgtgggccttctcaagaccggctcggctttctacgctccggcggcatcggccatccagatggctgaatcctacctcaaggacaagaagcgcgtcctgccggtcgcagcccagctttcgggccagtatggcgtgaaggacatgtatgtgggcgttccgaccgtgatcggcgccaatggcgtggagcgcatcatcgagatcgatctcgacaaggacgagaaggcgcagttcgacaagtcggtggcctccgtcgccggtctgtgcgaagcctgcatcggtattgctccgtcgctgaaataa

SEQ ID NO: 46045 - protein, 320 aa, Brucella melitensis
MARNKIALIGSGMIGGTLAHLAGLKELGDVVLFDIAEGTPQGKGLDIAESSPVDGFDAKFTGANDYAAIEGADVVIVTAGVPRKPGMSRDDLLGINLKVMEQVGAGIKKYAPEAFVICITNPLDAMVWALQKFSGLPAHKVVGMAGVLDSARFRYFLSEEFNVSVEDVTAFVLGGHGDSMVPLARYSTVAGIPLSDLVKMGWTSQDKLDKIIQRTRDGGAEIVGLLKTGSAFYAPAASAIQMAESYLKDKKRVLPVAAQLSGQYGVKDMYVGVPTVIGANGVERIIEIDLDKDEKAQFDKSVASVAGLCEACIGIAPSLK

SEQ ID NO: 46046 - DNA, 933 bp, Chlorobium tepidum
  CDS (1)..(933): transl_table=11
atgaaaatcaccgttattggcgcaggcaacgttggggcaaccacggctttccgtcttgcagaaaaacagcttgcaagagagctcgtgttgctcgatgtcgtcgaaggcatacctcagggaaaagcacttgacatgtacgaaagcggcccggtcggcctgttcgacacgaaggtaaccggctcaaacgactatgccgacactgcaaattccgatatcgtcgtcatcaccgccggtctgccgagaaaaccaggcatgactcgcgaggatctgctttcgatgaatgccggtatcgtcagggaggtgaccggacggatcatggagcactcgaaaaatccgatcatcgtggtggtttccaacccgctcgatatcatgacgcacgtggcctggcagaaaagcggattaccgaaagagcgggtcatcggcatggccggtgtgcttgactcggcgcgcttccgctccttcatcgccatggaacttggcgtttcgatgcaggatgtgaccgcatgcgtgctcggcggccacggcgacgcaatggtgccggtagtcaaatacaccacggtggcaggcattccggttgccgacctcatttccgcagaaaggatcgcggagctggtcgagcgcacccgcaccggcggcgcagagatcgtcaaccacctcaagcagggttcggcattttacgctccggcaacatcggtggtcgaaatggtagagtcgatcgtgctggatcgcaagcgcgtgctgacctgcgctgtaagcctcgacgggcagtacggcatcgacggcaccttcgttggcgtcccggtcaagctcggcaaaaacggcgtcgagcacatctacgaaatcaagctcgaccagagtgacctcgacctgttgcagaaatcggcaaagatcgtcgatgaaaactgcaaaatgctcgatgcatcgcagggctga

SEQ ID NO: 46047 - protein, 310 aa, Chlorobium tepidum
MKITVIGAGNVGATTAFRLAEKQLARELVLLDVVEGIPQGKALDMYESGPVGLFDTKVTGSNDYADTANSDIVVITAGLPRKPGMTREDLLSMNAGIVREVTGRIMEHSKNPIIVVVSNPLDIMTHVAWQKSGLPKERVIGMAGVLDSARFRSFIAMELGVSMQDVTACVLGGHGDAMVPVVKYTTVAGIPVADLISAERIAELVERTRTGGAEIVNHLKQGSAFYAPATSVVEMVESIVLDRKRVLTCAVSLDGQYGIDGTFVGVPVKLGKNGVEHIYEIKLDQSDLDLLQKSAKIVDENCKMLDASQG

SEQ ID NO: 46048 - DNA, 960 bp, Francisella novicida; identical to SEQ ID NO: 45284
  CDS (1)..(960): transl_table=11

SEQ ID NO: 46049 - protein, 319 aa, Francisella novicida; identical to SEQ ID NO: 45285

SEQ ID NO: 46050 - DNA, 975 bp, Haemophilus ducreyi; identical to SEQ ID NO: 45288
  CDS (1)..(975): transl_table=11

SEQ ID NO: 46051 - protein, 324 aa, Haemophilus ducreyi; identical to SEQ ID NO: 45289

SEQ ID NO: 46052 - DNA, 936 bp, Haemophilus influenzae; identical to SEQ ID NO: 45290
  CDS (1)..(936): transl_table=11

SEQ ID NO: 46053 - protein, 311 aa, Haemophilus influenzae; identical to SEQ ID NO: 45291

SEQ ID NO: 46054 - DNA, 963 bp, Methylobacterium extorquens; identical to SEQ ID NO: 45296
  CDS (1)..(963): transl_table=11

SEQ ID NO: 46055 - protein, 320 aa, Methylobacterium extorquens; identical to SEQ ID NO: 45297

SEQ ID NO: 46056 - DNA, 942 bp, Methanococcus jannaschii; identical to SEQ ID NO: 45298
  CDS (1)..(942): transl_table=11

SEQ ID NO: 46057 - protein, 313 aa, Methanococcus jannaschii; identical to SEQ ID NO: 45299

SEQ ID NO: 46058 - DNA, 939 bp, Moritella sp; identical to SEQ ID NO: 45306
  CDS (1)..(939): transl_table=11

SEQ ID NO: 46059 - protein, 312 aa, Moritella sp; identical to SEQ ID NO: 45307

SEQ ID NO: 46060 - DNA, 939 bp, Photorhabdus luminescens; identical to SEQ ID NO: 45314
  CDS (1)..(939): transl_table=11

SEQ ID NO: 46061 - protein, 312 aa, Photorhabdus luminescens; identical to SEQ ID NO: 45315

SEQ ID NO: 46062 - DNA, 939 bp, Photobacterium profundum
  CDS (1)..(939): transl_table=11
atgaaagttgctgtaattggtgctgcaggtggtattggccaggcattggctttactgttgaaaaacggcttacctgcaggttctgatcttgcgctatatgatattgctccagtaactcctggtgttgcggctgatcttagccatatcccaactcctgtttctattaagggttatggtggtgtcgatccaacacctgcactggaaggtgctgatgttgtattaatctctgctggtgttgcacgtaaacctggaatggatcgttctgatcttttcaacgtcaatgcgggtatcattaaatctttagctgaaaaaattgctgtagtatgtcctaaagcatgcgtcggtattattacgaaccctgtaaatacaacagtggcgattgctgctgatgtattgaaaaaagcaggtgtatacgacaagcgtcgtttatttggtatcacaacacttgatattattcgttcagaaacatttgttgctgaattaaaaggcaaaaccccaagtgacattcaagtgccagtcatcggtggtcactcaggtgtgactattctacctttattgtctcaagttgaaggtgttgagttttctgacgaagaaattaaagcattaacgccacgcattcaaaatgcaggtactgaagtagtagaagctaaagcgggtggtggttctgcaacactgtctatgggtcaagcggcttatcgctttggtctttcacttgttcgcgccctacaaggcgagcaaggtattgttgagtgtgcttatgttgaaggtgacggtaagcatgcacgtttctttgcacagcccgttctattaggcaaagatggtgtagaagaagtgattgattacggcaagttaagtacttttgaacaagaagcactaaataacatgctagataccctgacttcagatattacactaggtgaagagtttgctgctaaatag

SEQ ID NO: 46063 - protein, 312 aa, Photobacterium profundum
MKVAVIGAAGGIGQALALLLKNGLPAGSDLALYDIAPVTPGVAADLSHIPTPVSIKGYGGVDPTPALEGADVVLISAGVARKPGMDRSDLFNVNAGIIKSLAEKIAVVCPKACVGIITNPVNTTVAIAADVLKKAGVYDKRRLFGITTLDIIRSETFVAELKGKTPSDIQVPVIGGHSGVTILPLLSQVEGVEFSDEEIKALTPRIQNAGTEVVEAKAGGGSATLSMGQAAYRFGLSLVRALQGEQGIVECAYVEGDGKHARFFAQPVLLGKDGVEEVIDYGKLSTFEQEALNNMLDTLTSDITLGEEFAAK

SEQ ID NO: 46064 - DNA, 969 bp, Rhodopseudomonas palustris; identical to SEQ ID NO: 45326
  CDS (1)..(969): transl_table=11

SEQ ID NO: 46065 - protein, 322 aa, Rhodopseudomonas palustris; identical to SEQ ID NO: 45327

SEQ ID NO: 46066 - DNA, 945 bp, Rickettsia prowazekii; identical to SEQ ID NO: 45330
  CDS (1)..(945): transl_table=11

SEQ ID NO: 46067 - protein, 314 aa, Rickettsia prowazekii; identical to SEQ ID NO: 45331

SEQ ID NO: 46068 - DNA, 939 bp, Salmonella paratyphi
  CDS (1)..(939): transl_table=11
atgaaagtcgcagtcctcggcgctgctggtggtatcggtcaggcgctggcattacttttaaaaaaccaactgccttcaggttcagaactctccctgtacgacatcgctccagtgactcccggtgtggccgttgatttaagccacatccccaccgctgtaaaaatcaaaggtttctccggtgaagacgcaaccccggcgcttgaaggcgctgacgtagtactgatttctgcgggtgtggcgcgtaagccgggtatggaccgttccgacctgtttaacgttaacgccggcatcgtgaaaaacctggtgcagcagatcgctaaaacctgcccgaaagcgtgcgtgggcattatcaccaacccggtgaacaccaccgttgcgattgcggcggaagtgttgaaaaaagcaggcgtatacgacaaaaacaaactgtttggcgttaccacgctggatatcatccgctctaatacctttgtcgcagagctgaaaggtaagctgccaacggaagttgaagttccggtgattggcgggcactccggcgtgacgattctgccgctgctatcgcagattccaggcgtaagttttaccgaacaagaagcggccgagctgactaaacgtattcagaacgccggtactgaagtcgtcgaggcgaaagccggcggcggatcggcaaccctctctatgggccaggctgccgcgcgtttcggtctttctctggttcgcgctctgcagggcgaaaaaggcgtggtggaatgcgcctatgtggaaggcgacggtcagtatgcccgtttcttctctcagccgctgctgctgggtaaaaacggcgtagaagagcgtaaatccatcggcacactgagcactttcgagcaacattcgctggacgctatgctggatacgctgaaaaaagatattcagttgggtgaagattttattaataaataa

SEQ ID NO: 46069 - protein, 312 aa, Salmonella paratyphi
MKVAVLGAAGGIGQALALLLKNQLPSGSELSLYDIAPVTPGVAVDLSHIPTAVKIKGFSGEDATPALEGADVVLISAGVARKPGMDRSDLFNVNAGIVKNLVQQIAKTCPKACVGIITNPVNTTVAIAAEVLKKAGVYDKNKLFGVTTLDIIRSNTFVAELKGKLPTEVEVPVIGGHSGVTILPLLSQIPGVSFTEQEAAELTKRIQNAGTEVVEAKAGGGSATLSMGQAAARFGLSLVRALQGEKGVVECAYVEGDGQYARFFSQPLLLGKNGVEERKSIGTLSTFEQHSLDAMLDTLKKDIQLGEDFINK

SEQ ID NO: 46070 - DNA, 936 bp, Shewanella oneidensis; identical to SEQ ID NO: 45334
  CDS (1)..(936): transl_table=11

SEQ ID NO: 46071 - protein, 311 aa, Shewanella oneidensis; identical to SEQ ID NO: 45335

SEQ ID NO: 46072 - DNA, 978 bp, Thermoplasma acidophilum; identical to SEQ ID NO: 45338
  CDS (1)..(978): transl_table=11

SEQ ID NO: 46073 - protein, 325 aa, Thermoplasma acidophilum; identical to SEQ ID NO: 45339

SEQ ID NO: 46074 - DNA, 978 bp, Thermoplasma volcanium; identical to SEQ ID NO: 45340
  CDS (1)..(978)

SEQ ID NO: 46075 - protein, 325 aa, Thermoplasma volcanium; identical to SEQ ID NO: 45341

SEQ ID NO: 46076 - DNA, 951 bp, Wolbachia pipientis wMel; identical to SEQ ID NO: 45344
  CDS (1)..(951): transl_table=11

SEQ ID NO: 46077 - protein, 316 aa, Wolbachia pipientis wMel; identical to SEQ ID NO: 45345

SEQ ID NO: 46078 - DNA, 939 bp, Yersinia pestis
  CDS (1)..(939): transl_table=11
atgaaagttgcagttctcggtgccgctggtgggattggccaggccctcgctcttctactcaagacccagcttccttcaggttcagacctctctttatatgatatcgcgccagtaacgcctggtgttgctgttgatctgagccatatccctacagccgttaacattaaaggcttcagcggcgaagatgctacaccagcccttcaaggggcagatattgtgctgatttctgctggtgtcgcacgtaaacctggtatggatcgttcggatctgttcaacgtcaatgcgggcattgttcgtaatctggttgagcaaattgcacgtacttgcccgaacgcattgattggtatcatcactaacccagtcaacacaaccgtcgctattgcggctgaagtgctaaaaaaagcaggcgtttatgacaagaataagctgtttggtattaccactctggataccattcgctccaatacctttgttgccgaattaaaaggtaagcaaccccaggatatcgaagtgccggttattggtggccactctggtgtgactatcttgccattgctatcacagatccctggcgttagctttacagaacaagaagttgcagatttgaccaaacgtatccagaacgcgggtaccgaggttgtagaagctaaagccggtggcgggtccgcgacgctgtctatggggcaagctgcggcacgttttggtctttctttggtacgtgccctgcaaggtgaaagcaatgttgttgaatgctcttatgttgaaggcgatggcaaatatgcccgcttctttgctcagcctattctactgggtaaaaacggtgtcgctgaacgtaaagatatcggtaaactgagtgcttttgagcaacaagcgctggaaaatatgcttgatgttttacacaaagatatcgagttaggtgagaagttcgttaatcaataa

SEQ ID NO: 46079 - protein, 312 aa, Yersinia pestis
MKVAVLGAAGGIGQALALLLKTQLPSGSDLSLYDIAPVTPGVAVDLSHIPTAVNIKGFSGEDATPALQGADIVLISAGVARKPGMDRSDLFNVNAGIVRNLVEQIARTCPNALIGIITNPVNTTVAIAAEVLKKAGVYDKNKLFGITTLDTIRSNTFVAELKGKQPQDIEVPVIGGHSGVTILPLLSQIPGVSFTEQEVADLTKRIQNAGTEVVEAKAGGGSATLSMGQAAARFGLSLVRALQGESNVVECSYVEGDGKYARFFAQPILLGKNGVAERKDIGKLSAFEQQALENMLDVLHKDIELGEKFVNQ

SEQ ID NO: 46080 - DNA, 26 bp, Artificial sequence
  Primer sequence
atgattctccttctgattctttttcc

SEQ ID NO: 46081 - DNA, 25 bp, Artificial sequence
  Primer sequence
ttaagatgatgcagatctcgatgca

SEQ ID NO: 46082 - protein, 536 aa, Artificial sequence
  Consensus
  Variant (3)..(3): Xaa in position 3 is any amino acid
  Variant (14)..(14): Xaa in position 14 is any amino acid
  Variant (21)..(26): Xaa in position 21 to 26 is any amino acid
  Variant (27)..(38): Xaa in position 27 to 38 is any or no amino acid
  Variant (40)..(40): Xaa in position 40 is any amino acid
  Variant (45)..(48): Xaa in position 45 to 48 is any amino acid
  Variant (49)..(54): Xaa in position 49 to 54 is any or no amino acid
  Variant (58)..(58): Xaa in position 58 is any amino acid
  Variant (63)..(64): Xaa in position 63 to 64 is any amino acid
  Variant (66)..(80): Xaa in position 66 to 80 is any amino acid
  Variant (81)..(89): Xaa in position 81 to 89 is any or no amino acid
  Variant (91)..(93): Xaa in position 91 to 93 is any amino acid
  Variant (99)..(99): Xaa in position 99 is any amino acid
  Variant (103)..(103): Xaa in position 103 is any amino acid
  Variant (115)..(242): Xaa in position 115 to 242 is any or no amino acid
  Variant (245)..(245): Xaa in position 245 is any amino acid
  Variant (248)..(249): Xaa in position 248 to 249 is any amino acid
  Variant (251)..(254): Xaa in position 251 to 254 is any amino acid
  Variant (256)..(258): Xaa in position 256 to 258 is any amino acid
  Variant (260)..(260): Xaa in position 260 is any amino acid
  Variant (261)..(262): Xaa in position 261 to 262 is any or no amino acid
  Variant (264)..(264): Xaa in position 264 is any or no amino acid
  Variant (266)..(266): Xaa in position 266 is any amino acid
  Variant (275)..(275): Xaa in position 275 is any amino acid
  Variant (277)..(277): Xaa in position 277 is any amino acid
  Variant (279)..(284): Xaa in position 279 to 284 is any amino acid
  Variant (285)..(295): Xaa in position 285 to 295 is any or no amino acid
  Variant (297)..(299): Xaa in position 297 to 299 is any amino acid
  Variant (302)..(302): Xaa in position 302 is any amino acid
  Variant (306)..(306): Xaa in position 306 is any amino acid
  Variant (307)..(307): Xaa in position 307 is any or no amino acid
  Variant (310)..(311): Xaa in position 310 to 311 is any amino acid
  Variant (314)..(315): Xaa in position 314 to 315 is any amino acid
  Variant (319)..(328): Xaa in position 319 to 328 is any amino acid
  Variant (329)..(346): Xaa in position 329 to 346 is any or no amino acid
  Variant (348)..(348): Xaa in position 348 is any amino acid
  Variant (356)..(356): Xaa in position 356 is any amino acid
  Variant (362)..(362): Xaa in position 362 is any amino acid
  Variant (364)..(375): Xaa in position 364 to 375 is any amino acid
  Variant (376)..(387): Xaa in position 376 to 387 is any or no amino acid
  Variant (389)..(390): Xaa in position 389 to 390 is any amino acid
  Variant (392)..(392): Xaa in position 392 is any amino acid
  Variant (394)..(394): Xaa in position 394 is any amino acid
  Variant (397)..(397): Xaa in position 397 is any amino acid
  Variant (401)..(401): Xaa in position 401 is any amino acid
  Variant (404)..(404): Xaa in position 404 is any amino acid
  Variant (406)..(406): Xaa in position 406 is any amino acid
  Variant (408)..(409): Xaa in position 408 to 409 is any or no amino acid
  Variant (417)..(417): Xaa in position 417 is any amino acid
  Variant (420)..(423): Xaa in position 420 to 423 is any amino acid
  Variant (424)..(428): Xaa in position 424 to 428 is any or no amino acid
  Variant (430)..(430): Xaa in position 430 is any amino acid
  Variant (432)..(435): Xaa in position 432 to 435 is any amino acid
  Variant (437)..(442): Xaa in position 437 to 442 is any amino acid
  Variant (443)..(454): Xaa in position 443 to 454 is any or no amino acid
  Variant (457)..(464): Xaa in position 457 to 464 is any amino acid
  Variant (465)..(485): Xaa in position 465 to 485 is any or no amino acid
  Variant (489)..(490): Xaa in position 489 to 490 is any amino acid
  Variant (492)..(492): Xaa in position 492 is any amino acid
  Variant (495)..(496): Xaa in position 495 to 496 is any amino acid
  Variant (498)..(499): Xaa in position 498 to 499 is any amino acid
  Variant (500)..(506): Xaa in position 500 to 506 is any or no amino acid
  Variant (508)..(509): Xaa in position 508 to 509 is any amino acid
  Variant (511)..(513): Xaa in position 511 to 513 is any amino acid
  Variant (515)..(523): Xaa in position 515 to 523 is any amino acid
  Variant (524)..(525): Xaa in position 524 to 525 is any or no amino acid
  Variant (527)..(529): Xaa in position 527 to 529 is any amino acid
  Variant (531)..(532): Xaa in position 531 to 532 is any amino acid
  Variant (534)..(535): Xaa in position 534 to 535 is any amino acid
KVXVLGAAGGIGQXLSLLLKXXXXXXXXXXXXXXXXXXLXLYDIXXXXXXXXXXGVAXDLSHXXTXXXXXXXXXXXXXXXXXXXXXXXXLXXXDVVVIXAGVXRKPGMTRDDLFXXXXXXXXXXXXXXXXXXXXXXXXXXXXXXXXXXXXXXXXXXXXXXXXXXXXXXXXXXXXXXXXXXXXXXXXXXXXXXXXXXXXXXXXXXXXXXXXXXXXXXXXXXXXXXXXXXXXXXXXXXXXXXXXNAXIVXXLXXXXAXXXPXXXAXVXIISNPVNSXVXIXXXXXXXXXXXXXXXXXYXXXKLXGVTXXLDXXRAXXFVAXXXXXXXXXXXXXXXXXXXXXXXXXXXXVXVIGGHSGXTILPLXSXXXXXXXXXXXXXXXXXXXXXXXXLXXRXQXGGXEVVXAKXGXGXXSATLSMAXAGXXXXXXXXXSXLXXXXGXXXXXXXXXXXXXXXXXXYVXXXXXXXXXXXXXXXXXXXXXXXXXXXXXFFAXXVXLGXXGXXXXXXXXXLXXLXXXEXXXXXXXXXXXLXXXIXXGXXF

SEQ ID NO: 46083 - protein, 13 aa, Artificial sequence
  Consensus
  Variant (2)..(2): Xaa in position 2 is Ala or Ser
  Variant (3)..(3): Xaa in position 3 is Ala, Gly, Asn, Ser or Val
  Variant (6)..(6): Xaa in position 6 is any or no amino acid
  Variant (9)..(9): Xaa in position 9 is Ala, Pro, Ser or Thr
  Variant (11)..(11): Xaa in position 11 is Ala, Gly or Ser
  Variant (12)..(12): Xaa in position 12 is Leu or Met
GXXGGXGQXLXXL

SEQ ID NO: 46084 - protein, 20 aa, Artificial sequence
  Consensus
  Variant (2)..(2): Xaa in position 2 is any amino acid
  Variant (4)..(4): Xaa in position 4 is Phe or Tyr
  Variant (6)..(10): Xaa in position 6 to 10 is any amino acid
  Variant (11)..(12): Xaa in position 11 to 12 is any or no amino acid
  Variant (14)..(14): Xaa in position 14 is any amino acid
  Variant (15)..(15): Xaa in position 15 is Ala, Gly or Thr
  Variant (16)..(16): Xaa in position 16 is any amino acid
  Variant (18)..(18): Xaa in position 18 is Ile, Leu or Val
  Variant (19)..(19): Xaa in position 19 is Gly or Ser
LXLXDXXXXXXXGXXXDXXH

SEQ ID NO: 46085 - protein, 20 aa, Artificial sequence
  Consensus
  Variant (2)..(2): Xaa in position 2 is any or no amino acid
  Variant (4)..(4): Xaa in position 4 is any amino acid
  Variant (5)..(5): Xaa in position 5 is any or no amino acid
  Variant (8)..(8): Xaa in position 8 is Ile, Leu or Val
  Variant (9)..(9): Xaa in position 9 is Ala or Pro
  Variant (15)..(15): Xaa in position 15 is any amino acid
  Variant (17)..(17): Xaa in position 17 is Ala, Asp, Glu or Ser
  Variant (20)..(20): Xaa in position 20 is Phe, Ile, Leu or Val
VXIXXAGXXRKPGMXRXDLX

SEQ ID NO: 46086 - protein, 30 aa, Artificial sequence
  Consensus
  Variant (2)..(2): Xaa in position 2 is Ala, Ile or Leu
  Variant (3)..(3): Xaa in position 3 is any amino acid
  Variant (4)..(4): Xaa in position 4 is Ile or Val
  Variant (5)..(5): Xaa in position 5 is Ile, Leu or Val
  Variant (6)..(7): Xaa in position 6 to 7 is any amino acid
  Variant (8)..(8): Xaa in position 8 is Phe, Ile, Leu or Val
  Variant (9)..(15): Xaa in position 9 to 15 is any amino acid
  Variant (16)..(16): Xaa in position 16 is Ala, Cys or Ser
  Variant (17)..(18): Xaa in position 17 to 18 is any amino acid
  Variant (19)..(19): Xaa in position 19 is Ala or Ser
  Variant (20)..(22): Xaa in position 20 to 22 is any amino acid
  Variant (23)..(23): Xaa in position 23 is Ile, Leu, Met or Val
  Variant (24)..(24): Xaa in position 24 is Ile, Leu or Val
  Variant (25)..(25): Xaa in position 25 is Ala, Ser or Thr
  Variant (29)..(29): Xaa in position 29 is Asp or Asn
  Variant (30)..(30): Xaa in position 30 is Ala, Ser, Thr or Val
NXXXXXXXXXXXXXXXXXXXXXXXXNPVXX

SEQ ID NO: 46087 - protein, 13 aa, Artificial sequence
  Consensus
  Variant (2)..(2): Xaa in position 2 is Ile or Val
  Variant (3)..(3): Xaa in position 3 is Ser or Thr
  Variant (4)..(4): Xaa in position 4 is any amino acid
  Variant (7)..(7): Xaa in position 7 is any amino acid
  Variant (8)..(8): Xaa in position 8 is Ala, Ile, Leu or Val
  Variant (10)..(10): Xaa in position 10 is Ala or Ser
  Variant (11)..(12): Xaa in position 11 to 12 is any amino acid
GXXXLDXXRXXXF

SEQ ID NO: 46088 - protein, 12 aa, Artificial sequence
  Consensus
  Variant (2)..(2): Xaa in position 2 is Ile, Leu or Val
  Variant (6)..(6): Xaa in position 6 is any or no amino acid
  Variant (8)..(8): Xaa in position 8 is any amino acid
  Variant (10)..(10): Xaa in position 10 is Ile or Met
  Variant (11)..(11): Xaa in position 11 is Ile, Leu or Val
VXGGHXGXTXXP

SEQ ID NO: 46089 - protein, 27 aa, Artificial sequence
  Consensus
  Variant (2)..(4): Xaa in position 2 to 4 is any amino acid
  Variant (5)..(6): Xaa in position 5 to 6 is Ala or Gly
  Variant (7)..(7): Xaa in position 7 is any amino acid
  Variant (9)..(9): Xaa in position 9 is any or no amino acid
  Variant (11)..(11): Xaa in position 11 is any amino acid
  Variant (12)..(12): Xaa in position 12 is any or no amino acid
  Variant (15)..(15): Xaa in position 15 is any amino acid
  Variant (17)..(17): Xaa in position 17 is any amino acid
  Variant (21)..(21): Xaa in position 21 is Ala or Thr
  Variant (23)..(23): Xaa in position 23 is Ala or Ser
  Variant (25)..(25): Xaa in position 25 is Ala or Gly
  Variant (26)..(26): Xaa in position 26 is any amino acid
  Variant (27)..(27): Xaa in position 27 is Ala or Ser
RXXXXXXEXVXXAKXGXGSAXLXMXXX

SEQ ID NO: 46090 - DNA, 1992 bp, Saccharomyces cerevisiae
  CDS (1)..(1992)
atgaagttactttttaaaagatattcgtctagtcatattggtaagctgattaaggactctttaatcactcctgaaatactaccacagctagggcgacagccatcatcgcataaacgtttaccaaataacaaaagaactaactcaataactgataaatggttgaaggatgcgctaacaagaaaagataaactgaatgaagataagctccaaaatgtaaatttacgattaaatgtggtactgactactctacagaagcttcgtacatccgataatcctgctttgtattttgcgttgttgaatcgtattggcacaggtcacataaaatggctaaataaaagtggccgacagattgatgcattcccacctgatcggctgcctttggaattttatcatgagctatctaatatgctctataaactatcgcttcggtccgcaaatgacaaaattgcactagctaaattttcattgcaattattggatcgctattattttcttaaaaccaaatctttaactatagaaggaaaatttcgggcaaacataaaatttttgaggaattgtactcttttaattgttaaatcccaatcgaactactacttaagggcaatacagcggttgttcgcggaaaattcggagggtcaattattagccaatttatcccagctggcattttatgtggagacctcccaatggacaagtatgttggatattttatcctcatgtgtaccggattctggtttaagaggttcgaaggagcgtgaaagagctattcaattgttggagttatttagtccatgcctagtcaaaagtctaaaagtaatgatagcacaaaatatggagaatgaagcttgtcagattttaaggagcttgtctgaatggaactttcattttgatcagcatgattcctccaacttgatacaattatcccagaaccattcttgcctcaaagttattgaaaccatgaatggattatcatcaactaccgctgtcactaggcaattcggacttgaaaaattaccaactgacgtgagtttgaagcagagcatacatattttatcaaaagataatttcgaacctctcaagcaagattcatttcttcaatttctatcgtttaaattaagtgatttgcctctgaacttagaagtatggaaaaagcacattaaggaggttgatgaccaaatgcaggctgagtccaacctgcattccttaagagctttttttattgatatgctactgtgtcacttatctgtgcgcaaggatttcgattttatgctttcattggtcgagcacatagtatacgaaaaaaatttatggcagccattattactcacagataatatagttggaaacaaagaaaattccacttttcattgcctctttcatggcgcctctcaagatatttctaccaaacttactctactggcattgtataaccagttgaatgaaatcggctatcaatttacctcccacgattttctctcgatgttgaaagtctgcaaaaactactctgattctgattttttctattttgctttctataatttgttggttacacaaagtcacaaattttttcttttcgataagtttagtgataagttttcgtggaggttgccaatacaaatcggagatgcaatttctgaatggctatccagcttagaaattgatatacaagaaaacaccgatagagttttgcagataacagatgacgtcggcgaatggtatgttgagaataaaccatttaagtcagaaaaagggaccattcaaccaataaacataatggaattgcgcaaaatttttggggagcgaaaaactctatttcatatggattcagaaattttccaaaaatctaaagcaaaaagagataaagaaatgcggaatgaagctttatttaccgcaaatgatgcggaatataattttgctgcggatgtatcctatgcaaagagagtagaaaatctattttcttacataagatctaagcaaatgcaacaaaaataa

SEQ ID NO: 46091 - protein, 663 aa, Saccharomyces cerevisiae
MKLLFKRYSSSHIGKLIKDSLITPEILPQLGRQPSSHKRLPNNKRTNSITDKWLKDALTRKDKLNEDKLQNVNLRLNVVLTTLQKLRTSDNPALYFALLNRIGTGHIKWLNKSGRQIDAFPPDRLPLEFYHELSNMLYKLSLRSANDKIALAKFSLQLLDRYYFLKTKSLTIEGKFRANIKFLRNCTLLIVKSQSNYYLRAIQRLFAENSEGQLLANLSQLAFYVETSQWTSMLDILSSCVPDSGLRGSKERERAIQLLELFSPCLVKSLKVMIAQNMENEACQILRSLSEWNFHFDQHDSSNLIQLSQNHSCLKVIETMNGLSSTTAVTRQFGLEKLPTDVSLKQSIHILSKDNFEPLKQDSFLQFLSFKLSDLPLNLEVWKKHIKEVDDQMQAESNLHSLRAFFIDMLLCHLSVRKDFDFMLSLVEHIVYEKNLWQPLLLTDNIVGNKENSTFHCLFHGASQDISTKLTLLALYNQLNEIGYQFTSHDFLSMLKVCKNYSDSDFFYFAFYNLLVTQSHKFFLFDKFSDKFSWRLPIQIGDAISEWLSSLEIDIQENTDRVLQITDDVGEWYVENKPFKSEKGTIQPINIMELRKIFGERKTLFHMDSEIFQKSKAKRDKEMRNEALFTANDAEYNFAADVSYAKRVENLFSYIRSKQMQQK

SEQ ID NO: 46092 - DNA, 28 bp, Artificial sequence
  Primer sequence
atgaagttactttttaaaagatattcgt

SEQ ID NO: 46093 - DNA, 27 bp, Artificial sequence
  Primer sequence
ttatttttgttgcatttgcttagatct

SEQ ID NO: 46094 - DNA, 1047 bp, Escherichia coli K12; identical to SEQ ID NO: 1323
  CDS (1)..(1047)

SEQ ID NO: 46095 - protein, 348 aa, Escherichia coli K12; identical to SEQ ID NO: 1324

SEQ ID NO: 46096 - DNA, 1235 bp, Salmonella typhimurium; identical to SEQ ID NO: 1325
  CDS (165)..(1235)

SEQ ID NO: 46097 - protein, 356 aa, Salmonella typhimurium; identical to SEQ ID NO: 1326

SEQ ID NO: 46098 - DNA, 1086 bp, Deinococcus radiodurans; identical to SEQ ID NO: 1327
  CDS (1)..(1086)

SEQ ID NO: 46099 - protein, 361 aa, Deinococcus radiodurans; identical to SEQ ID NO: 1328

SEQ ID NO: 46100 - DNA, 1056 bp, Neisseria meningitidis; identical to SEQ ID NO: 1329
  CDS (1)..(1056)

SEQ ID NO: 46101 - protein, 351 aa, Neisseria meningitidis; identical to SEQ ID NO: 1330

SEQ ID NO: 46102 - DNA, 1047 bp, Yersinia pestis; identical to SEQ ID NO: 1331
  CDS (1)..(1047)

SEQ ID NO: 46103 - protein, 348 aa, Yersinia pestis; identical to SEQ ID NO: 1332

SEQ ID NO: 46104 - DNA, 1071 bp, Escherichia coli; identical to SEQ ID NO: 1333
  CDS (1)..(1071)

SEQ ID NO: 46105 - protein, 356 aa, Escherichia coli; identical to SEQ ID NO: 1334

SEQ ID NO: 46106 - DNA, 1131 bp, Nostoc sp. PCC 7120; identical to SEQ ID NO: 1335
  CDS (1)..(1131)

SEQ ID NO: 46107 - protein, 376 aa, Nostoc sp. PCC 7120; identical to SEQ ID NO: 1336

SEQ ID NO: 46108 - DNA, 1053 bp, Salmonella enterica subsp. enterica serovar Typhi; identical to SEQ ID NO: 1337
  CDS (1)..(1053)

SEQ ID NO: 46109 - protein, 350 aa, Salmonella enterica subsp. enterica serovar Typhi; identical to SEQ ID NO: 1338

SEQ ID NO: 46110 - DNA, 1077 bp, Pseudomonas aeruginosa; identical to SEQ ID NO: 1339
  CDS (1)..(1077)

SEQ ID NO: 46111 - protein, 358 aa, Pseudomonas aeruginosa; identical to SEQ ID NO: 1340

SEQ ID NO: 46112 - DNA, 1047 bp, Buchnera sp; identical to SEQ ID NO: 1341
  CDS (1)..(1047)

SEQ ID NO: 46113 - protein, 348 aa, Buchnera sp; identical to SEQ ID NO: 1342

SEQ ID NO: 46114 - DNA, 1074 bp, Vibrio cholerae; identical to SEQ ID NO: 1343
  CDS (1)..(1074)

SEQ ID NO: 46115 - protein, 357 aa, Vibrio cholerae; identical to SEQ ID NO: 1344

SEQ ID NO: 46116 - DNA, 1038 bp, Lactococcus lactis subsp. lactis; identical to SEQ ID NO: 1345
  CDS (1)..(1038)

SEQ ID NO: 46117 - protein, 345 aa, Lactococcus lactis subsp. lactis; identical to SEQ ID NO: 1346

SEQ ID NO: 46118 - DNA, 1023 bp, Lactococcus lactis subsp. lactis; identical to SEQ ID NO: 1347
  CDS (1)..(1023)

SEQ ID NO: 46119 - protein, 340 aa, Lactococcus lactis subsp. lactis; identical to SEQ ID NO: 1348

SEQ ID NO: 46120 - DNA, 1032 bp, Streptococcus pneumoniae; identical to SEQ ID NO: 1349
  CDS (1)..(1032)

SEQ ID NO: 46121 - protein, 343 aa, Streptococcus pneumoniae; identical to SEQ ID NO: 1350

SEQ ID NO: 46122 - DNA, 1095 bp, Pseudomonas aeruginosa; identical to SEQ ID NO: 1351
  CDS (1)..(1095)

SEQ ID NO: 46123 - protein, 364 aa, Pseudomonas aeruginosa; identical to SEQ ID NO: 1352

SEQ ID NO: 46124 - DNA, 1110 bp, Caulobacter crescentus; identical to SEQ ID NO: 1353
  CDS (1)..(1110)

SEQ ID NO: 46125 - protein, 369 aa, Caulobacter crescentus; identical to SEQ ID NO: 1354

SEQ ID NO: 46126 - DNA, 1032 bp, Streptococcus pneumoniae; identical to SEQ ID NO: 1355
  CDS (1)..(1032)

SEQ ID NO: 46127 - protein, 343 aa, Streptococcus pneumoniae; identical to SEQ ID NO: 1356

SEQ ID NO: 46128 - DNA, 1047 bp, Buchnera aphidicola; identical to SEQ ID NO: 1357
  CDS (1)..(1047)

SEQ ID NO: 46129 - protein, 348 aa, Buchnera aphidicola; identical to SEQ ID NO: 1358

SEQ ID NO: 46130 - DNA, 1089 bp, Haemophilus influenzae; identical to SEQ ID NO: 1359
  CDS (1)..(1089)

SEQ ID NO: 46131 - protein, 362 aa, Haemophilus influenzae; identical to SEQ ID NO: 1360

SEQ ID NO: 46132 - DNA, 1502 bp, Candida albicans; identical to SEQ ID NO: 1361
  CDS (336)..(1442)

SEQ ID NO: 46133 - protein, 368 aa, Candida albicans; identical to SEQ ID NO: 1362

SEQ ID NO: 46134 - DNA, 1113 bp, Saccharomyces cerevisiae; identical to SEQ ID NO: 1363
  CDS (1)..(1113)

SEQ ID NO: 46135 - protein, 370 aa, Saccharomyces cerevisiae; identical to SEQ ID NO: 1364

SEQ ID NO: 46136 - DNA, 2048 bp, Saccharomyces cerevisiae; identical to SEQ ID NO: 1365
  CDS (619)..(1731)

SEQ ID NO: 46137 - protein, 370 aa, Saccharomyces cerevisiae; identical to SEQ ID NO: 1366

SEQ ID NO: 46138 - DNA, 1107 bp, Schizosaccharomyces pombe; identical to SEQ ID NO: 1367
  CDS (1)..(1107)

SEQ ID NO: 46139 - protein, 368 aa, Schizosaccharomyces pombe; identical to SEQ ID NO: 1368

SEQ ID NO: 46140 - DNA, 1089 bp, Amycolatopsis orientalis; identical to SEQ ID NO: 1369
  CDS (1)..(1089)

SEQ ID NO: 46141 - protein, 362 aa, Amycolatopsis orientalis; identical to SEQ ID NO: 1370

SEQ ID NO: 46142 - DNA, 1119 bp, Schizosaccharomyces pombe; identical to SEQ ID NO: 1371
  CDS (1)..(1119)

SEQ ID NO: 46143 - protein, 372 aa, Schizosaccharomyces pombe; identical to SEQ ID NO: 1372

SEQ ID NO: 46144 - DNA, 1248 bp, Corynebacterium glutamicum; identical to SEQ ID NO: 1373
  CDS (101)..(1228)

SEQ ID NO: 46145 - protein, 375 aa, Corynebacterium glutamicum; identical to SEQ ID NO: 1374

SEQ ID NO: 46146 - DNA, 1083 bp, Methylophilus methylotrophus; identical to SEQ ID NO: 1375
  CDS (1)..(1083)

SEQ ID NO: 46147 - protein, 360 aa, Methylophilus methylotrophus; identical to SEQ ID NO: 1376

SEQ ID NO: 46148 - DNA, 1107 bp, Debaryomyces hansenii; identical to SEQ ID NO: 1377
  CDS (1)..(1107)

SEQ ID NO: 46149 - protein, 368 aa, Debaryomyces hansenii; identical to SEQ ID NO: 1378

SEQ ID NO: 46150 - DNA, 1074 bp, Yarrowia lipolytica; identical to SEQ ID NO: 1379
  CDS (1)..(1074)

SEQ ID NO: 46151 - protein, 357 aa, Yarrowia lipolytica; identical to SEQ ID NO: 1380

SEQ ID NO: 46152 - DNA, 1089 bp, Yarrowia lipolytica; identical to SEQ ID NO: 1381
  CDS (1)..(1089)

SEQ ID NO: 46153 - protein, 362 aa, Yarrowia lipolytica; identical to SEQ ID NO: 1382

SEQ ID NO: 46154 - DNA, 1119 bp, Kluyveromyces lactis; identical to SEQ ID NO: 1383
  CDS (1)..(1119)

SEQ ID NO: 46155 - protein, 372 aa, Kluyveromyces lactis; identical to SEQ ID NO: 1384

SEQ ID NO: 46156 - DNA, 1095 bp, Kluyveromyces lactis; identical to SEQ ID NO: 1385
  CDS (1)..(1095)

SEQ ID NO: 46157 - protein, 364 aa, Kluyveromyces lactis; identical to SEQ ID NO: 1386

SEQ ID NO: 46158 - DNA, 1074 bp, Erwinia carotovora subsp; identical to SEQ ID NO: 1387
  CDS (1)..(1074)

SEQ ID NO: 46159 - protein, 357 aa, Erwinia carotovora subsp; identical to SEQ ID NO: 1388

SEQ ID NO: 46160 - DNA, 1047 bp, Erwinia carotovora subsp; identical to SEQ ID NO: 1389
  CDS (1)..(1047)

SEQ ID NO: 46161 - protein, 348 aa, Erwinia carotovora subsp; identical to SEQ ID NO: 1390

SEQ ID NO: 46162 - DNA, 1056 bp, Erwinia carotovora subsp; identical to SEQ ID NO: 1391
  CDS (1)..(1056)

SEQ ID NO: 46163 - protein, 351 aa, Erwinia carotovora subsp; identical to SEQ ID NO: 1392

SEQ ID NO: 46164 - DNA, 1113 bp, Acinetobacter sp; identical to SEQ ID NO: 1393
  CDS (1)..(1113)

SEQ ID NO: 46165 - protein, 370 aa, Acinetobacter sp; identical to SEQ ID NO: 1394

SEQ ID NO: 46166 - DNA, 1056 bp, Acinetobacter sp; identical to SEQ ID NO: 1395
  CDS (1)..(1056)

SEQ ID NO: 46167 - protein, 351 aa, Acinetobacter sp; identical to SEQ ID NO: 1396

SEQ ID NO: 46168 - DNA, 1119 bp, Candida glabrata; identical to SEQ ID NO: 1397
  CDS (1)..(1119)

SEQ ID NO: 46169 - protein, 372 aa, Candida glabrata; identical to SEQ ID NO: 1398

SEQ ID NO: 46170 - DNA, 1071 bp, Candida glabrata; identical to SEQ ID NO: 1399
  CDS (1)..(1071)

SEQ ID NO: 46171 - protein, 356 aa, Candida glabrata; identical to SEQ ID NO: 1400

SEQ ID NO: 46172 - DNA, 1083 bp, Photobacterium profundum; identical to SEQ ID NO: 1401
  CDS (1)..(1083)

SEQ ID NO: 46173 - protein, 360 aa, Photobacterium profundum; identical to SEQ ID NO: 1402

SEQ ID NO: 46174 - DNA, 1053 bp, Photobacterium profundum; identical to SEQ ID NO: 1403
  CDS (1)..(1053)

SEQ ID NO: 46175 - protein, 350 aa, Photobacterium profundum; identical to SEQ ID NO: 1404

SEQ ID NO: 46176 - DNA, 1113 bp, Photobacterium profundum; identical to SEQ ID NO: 1405
  CDS (1)..(1113)

SEQ ID NO: 46177 - protein, 370 aa, Photobacterium profundum; identical to SEQ ID NO: 1406

SEQ ID NO: 46178 - DNA, 1056 bp, Photobacterium profundum; identical to SEQ ID NO: 1407
  CDS (1)..(1056)

SEQ ID NO: 46179 - protein, 351 aa, Photobacterium profundum; identical to SEQ ID NO: 1408

SEQ ID NO: 46180 - DNA, 1092 bp, Parachlamydia sp; identical to SEQ ID NO: 1409
  CDS (1)..(1092)

SEQ ID NO: 46181 - protein, 363 aa, Parachlamydia sp; identical to SEQ ID NO: 1410

SEQ ID NO: 46182 - DNA, 1095 bp, Rhodopseudomonas palustris; identical to SEQ ID NO: 1411
  CDS (1)..(1095)

SEQ ID NO: 46183 - protein, 364 aa, Rhodopseudomonas palustris; identical to SEQ ID NO: 1412

SEQ ID NO: 46184 - DNA, 1100 bp, Amycolatopsis methanolica; identical to SEQ ID NO: 1413
  CDS (1)..(1086)

SEQ ID NO: 46185 - protein, 361 aa, Amycolatopsis methanolica; identical to SEQ ID NO: 1414

SEQ ID NO: 46186 - DNA, 1071 bp, Treponema denticola; identical to SEQ ID NO: 1415
  CDS (1)..(1071)

SEQ ID NO: 46187 - protein, 356 aa, Treponema denticola; identical to SEQ ID NO: 1416

SEQ ID NO: 46188 - DNA, 1068 bp, Geobacter sulfurreducens; identical to SEQ ID NO: 1417
  CDS (1)..(1068)

SEQ ID NO: 46189 - protein, 355 aa, Geobacter sulfurreducens; identical to SEQ ID NO: 1418

SEQ ID NO: 46190 - DNA, 1095 bp, Ashbya gossypii; identical to SEQ ID NO: 1419
  CDS (1)..(1095)

SEQ ID NO: 46191 - protein, 364 aa, Ashbya gossypii; identical to SEQ ID NO: 1420

SEQ ID NO: 46192 - DNA, 1122 bp, Ashbya gossypii; identical to SEQ ID NO: 1421
  CDS (1)..(1122)

SEQ ID NO: 46193 - protein, 373 aa, Ashbya gossypii; identical to SEQ ID NO: 1422

SEQ ID NO: 46194 - DNA, 1098 bp, Amycolatopsis balhimycina; identical to SEQ ID NO: 1423
  CDS (1)..(1098)

SEQ ID NO: 46195 - protein, 365 aa, Amycolatopsis balhimycina; identical to SEQ ID NO: 1424

SEQ ID NO: 46196 - DNA, 1071 bp, Vibrio vulnificus; identical to SEQ ID NO: 1425
  CDS (1)..(1071)

SEQ ID NO: 46197 - protein, 356 aa, Vibrio vulnificus; identical to SEQ ID NO: 1426

SEQ ID NO: 46198 - DNA, 1047 bp, Photorhabdus luminescens; identical to SEQ ID NO: 1427
  CDS (1)..(1047)

SEQ ID NO: 46199 - protein, 348 aa, Photorhabdus luminescens; identical to SEQ ID NO: 1428

SEQ ID NO: 46200 - DNA, 1053 bp, Photorhabdus luminescens; identical to SEQ ID NO: 1429
  CDS (1)..(1053)

SEQ ID NO: 46201 - protein, 350 aa, Photorhabdus luminescens; identical to SEQ ID NO: 1430

SEQ ID NO: 46202 - DNA, 1095 bp, Photorhabdus luminescens; identical to SEQ ID NO: 1431
  CDS (1)..(1095)

SEQ ID NO: 46203 - protein, 364 aa, Photorhabdus luminescens; identical to SEQ ID NO: 1432

SEQ ID NO: 46204 - DNA, 1119 bp, Gloeobacter violaceus; identical to SEQ ID NO: 1433
  CDS (1)..(1119)

SEQ ID NO: 46205 - protein, 372 aa, Gloeobacter violaceus; identical to SEQ ID NO: 1434

SEQ ID NO: 46206 - DNA, 1107 bp, Chromobacterium violaceum; identical to SEQ ID NO: 1435
  CDS (1)..(1107)

SEQ ID NO: 46207 - protein, 368 aa, Chromobacterium violaceum; identical to SEQ ID NO: 1436

SEQ ID NO: 46208 - DNA, 1059 bp, Chromobacterium violaceum; identical to SEQ ID NO: 1437
  CDS (1)..(1059)

SEQ ID NO: 46209 - protein, 352 aa, Chromobacterium violaceum; identical to SEQ ID NO: 1438

SEQ ID NO: 46210 - DNA, 1140 bp, Neurospora crassa; identical to SEQ ID NO: 1439
  CDS (1)..(1140)

SEQ ID NO: 46211 - protein, 379 aa, Neurospora crassa; identical to SEQ ID NO: 1440

SEQ ID NO: 46212 - DNA, 1092 bp, Neurospora crassa; identical to SEQ ID NO: 1441
  CDS (1)..(1092)

SEQ ID NO: 46213 - protein, 363 aa, Neurospora crassa; identical to SEQ ID NO: 1442

SEQ ID NO: 46214 - DNA, 1068 bp, Synechococcus sp; identical to SEQ ID NO: 1443
  CDS (1)..(1068)

SEQ ID NO: 46215 - protein, 355 aa, Synechococcus sp; identical to SEQ ID NO: 1444

SEQ ID NO: 46216 - DNA, 1053 bp, Rhodopirellula baltica; identical to SEQ ID NO: 1445
  CDS (1)..(1053)

SEQ ID NO: 46217 - protein, 350 aa, Rhodopirellula baltica; identical to SEQ ID NO: 1446

SEQ ID NO: 46218 - DNA, 1068 bp, Prochlorococcus marinus subsp; identical to SEQ ID NO: 1447
  CDS (1)..(1068)

SEQ ID NO: 46219 - protein, 355 aa, Prochlorococcus marinus subsp; identical to SEQ ID NO: 1448

SEQ ID NO: 46220 - DNA, 1083 bp, Prochlorococcus marinus; identical to SEQ ID NO: 1449
  CDS (1)..(1083)

SEQ ID NO: 46221 - protein, 360 aa, Prochlorococcus marinus; identical to SEQ ID NO: 1450

SEQ ID NO: 46222 - DNA, 1074 bp, Prochlorococcus marinus; identical to SEQ ID NO: 1451
  CDS (1)..(1074)

SEQ ID NO: 46223 - protein, 357 aa, Prochlorococcus marinus; identical to SEQ ID NO: 1452

SEQ ID NO: 46224 - DNA, 1113 bp, Haemophilus ducreyi; identical to SEQ ID NO: 1453
  CDS (1)..(1113)

SEQ ID NO: 46225 - protein, 370 aa, Haemophilus ducreyi; identical to SEQ ID NO: 1454

SEQ ID NO: 46226 - DNA, 1080 bp, Haemophilus ducreyi; identical to SEQ ID NO: 1455
  CDS (1)..(1080)

SEQ ID NO: 46227 - protein, 359 aa, Haemophilus ducreyi; identical to SEQ ID NO: 1456

SEQ ID NO: 46228 - DNA, 1086 bp, Candidatus Blochmannia floridanus; identical to SEQ ID NO: 1457
  CDS (1)..(1086)

SEQ ID NO: 46229 - protein, 361 aa, Candidatus Blochmannia floridanus; identical to SEQ ID NO: 1458

SEQ ID NO: 46230 - DNA, 1074 bp, Bordetella pertussis; identical to SEQ ID NO: 1459
  CDS (1)..(1074)

SEQ ID NO: 46231 - protein, 357 aa, Bordetella pertussis; identical to SEQ ID NO: 1460

SEQ ID NO: 46232 - DNA, 1119 bp, Bordetella bronchiseptica; identical to SEQ ID NO: 1461
  CDS (1)..(1119)

SEQ ID NO: 46233 - protein, 372 aa, Bordetella bronchiseptica; identical to SEQ ID NO: 1462

SEQ ID NO: 46234 - DNA, 1179 bp, Nitrosomonas europaea; identical to SEQ ID NO: 1463
  CDS (1)..(1179)

SEQ ID NO: 46235 - protein, 392 aa, Nitrosomonas europaea; identical to SEQ ID NO: 1464

SEQ ID NO: 46236 - DNA, 1083 bp, Coxiella burnetii; identical to SEQ ID NO: 1465
  CDS (1)..(1083)

SEQ ID NO: 46237 - protein, 360 aa, Coxiella burnetii; identical to SEQ ID NO: 1466

SEQ ID NO: 46238 - DNA, 834 bp, Vibrio anguillarum; identical to SEQ ID NO: 1467
  CDS (1)..(834)

SEQ ID NO: 46239 - protein, 277 aa, Vibrio anguillarum; identical to SEQ ID NO: 1468

SEQ ID NO: 46240 - DNA, 1143 bp, Xylella fastidiosa; identical to SEQ ID NO: 1469
  CDS (1)..(1143)

SEQ ID NO: 46241 - protein, 380 aa, Xylella fastidiosa; identical to SEQ ID NO: 1470

SEQ ID NO: 46242 - DNA, 1053 bp, Vibrio parahaemolyticus; identical to SEQ ID NO: 1471
  CDS (1)..(1053)

SEQ ID NO: 46243 - protein, 350 aa, Vibrio parahaemolyticus; identical to SEQ ID NO: 1472

SEQ ID NO: 46244 - DNA, 1053 bp, Vibrio parahaemolyticus; identical to SEQ ID NO: 1473
  CDS (1)..(1053)

SEQ ID NO: 46245 - protein, 350 aa, Vibrio parahaemolyticus; identical to SEQ ID NO: 1474

SEQ ID NO: 46246 - DNA, 1074 bp, Vibrio parahaemolyticus; identical to SEQ ID NO: 1475
  CDS (1)..(1074)

SEQ ID NO: 46247 - protein, 357 aa, Vibrio parahaemolyticus; identical to SEQ ID NO: 1476

SEQ ID NO: 46248 - DNA, 1083 bp, Pseudomonas syringae; identical to SEQ ID NO: 1477
  CDS (1)..(1083)

SEQ ID NO: 46249 - protein, 360 aa, Pseudomonas syringae; identical to SEQ ID NO: 1478

SEQ ID NO: 46250 - DNA, 1077 bp, Pseudomonas syringae; identical to SEQ ID NO: 1479
  CDS (1)..(1077)

SEQ ID NO: 46251 - protein, 358 aa, Pseudomonas syringae; identical to SEQ ID NO: 1480

SEQ ID NO: 46252 - DNA, 1062 bp, Pseudomonas putida; identical to SEQ ID NO: 1481
  CDS (1)..(1062)

SEQ ID NO: 46253 - protein, 353 aa, Pseudomonas putida; identical to SEQ ID NO: 1482

SEQ ID NO: 46254 - DNA, 1113 bp, Pseudomonas putida; identical to SEQ ID NO: 1483
  CDS (1)..(1113)

SEQ ID NO: 46255 - protein, 370 aa, Pseudomonas putida; identical to SEQ ID NO: 1484

SEQ ID NO: 46256 - DNA, 1086 bp, Bradyrhizobium japonicum; identical to SEQ ID NO: 1485
  CDS (1)..(1086)

SEQ ID NO: 46257 - protein, 361 aa, Bradyrhizobium japonicum; identical to SEQ ID NO: 1486

SEQ ID NO: 46258 - DNA, 1053 bp, Yersinia pestis; identical to SEQ ID NO: 1487
  CDS (1)..(1053)

SEQ ID NO: 46259 - protein, 350 aa, Yersinia pestis; identical to SEQ ID NO: 1488

SEQ ID NO: 46260 - DNA, 1077 bp, Yersinia pestis; identical to SEQ ID NO: 1489
  CDS (1)..(1077)

SEQ ID NO: 46261 - protein, 358 aa, Yersinia pestis; identical to SEQ ID NO: 1490

SEQ ID NO: 46262 - DNA, 1038 bp, Wigglesworthia glossinidia brevipalpis; identical to SEQ ID NO: 1491
  CDS (1)..(1038)

SEQ ID NO: 46263 - protein, 345 aa, Wigglesworthia glossinidia brevipalpis; identical to SEQ ID NO: 1492

SEQ ID NO: 46264 - DNA, 1053 bp, Vibrio vulnificus; identical to SEQ ID NO: 1493
  CDS (1)..(1053)

SEQ ID NO: 46265 - protein, 350 aa, Vibrio vulnificus; identical to SEQ ID NO: 1494

SEQ ID NO: 46266 - DNA, 1053 bp, Vibrio vulnificus; identical to SEQ ID NO: 1495
  CDS (1)..(1053)

SEQ ID NO: 46267 - protein, 350 aa, Vibrio vulnificus; identical to SEQ ID NO: 1496

SEQ ID NO: 46268 - DNA, 1071 bp, Vibrio vulnificus; identical to SEQ ID NO: 1497
  CDS (1)..(1071)

SEQ ID NO: 46269 - protein, 356 aa, Vibrio vulnificus; identical to SEQ ID NO: 1498

SEQ ID NO: 46270 - DNA, 1062 bp, Synechococcus elongatus; identical to SEQ ID NO: 1499
  CDS (1)..(1062)

SEQ ID NO: 46271 - protein, 353 aa, Synechococcus elongatus; identical to SEQ ID NO: 1500

SEQ ID NO: 46272 - DNA, 1032 bp, Streptococcus mutans; identical to SEQ ID NO: 1501
  CDS (1)..(1032)

SEQ ID NO: 46273 - protein, 343 aa, Streptococcus mutans; identical to SEQ ID NO: 1502

SEQ ID NO: 46274 - DNA, 1035 bp, Streptococcus mutans; identical to SEQ ID NO: 1503
  CDS (1)..(1035)

SEQ ID NO: 46275 - protein, 344 aa, Streptococcus mutans; identical to SEQ ID NO: 1504

SEQ ID NO: 46276 - DNA, 1008 bp, Streptococcus agalactiae; identical to SEQ ID NO: 1505
  CDS (1)..(1008)

SEQ ID NO: 46277 - protein, 335 aa, Streptococcus agalactiae; identical to SEQ ID NO: 1506

SEQ ID NO: 46278 - DNA, 1065 bp, Shewanella oneidensis; identical to SEQ ID NO: 1507
  CDS (1)..(1065)

SEQ ID NO: 46279 - protein, 354 aa, Shewanella oneidensis; identical to SEQ ID NO: 1508

SEQ ID NO: 46280 - DNA, 1092 bp, Shewanella oneidensis; identical to SEQ ID NO: 1509
  CDS (1)..(1092)

SEQ ID NO: 46281 - protein, 363 aa, Shewanella oneidensis; identical to SEQ ID NO: 1510

SEQ ID NO: 46282 - DNA, 1059 bp, Shewanella oneidensis; identical to SEQ ID NO: 1511
  CDS (1)..(1059)

SEQ ID NO: 46283 - protein, 352 aa, Shewanella oneidensis; identical to SEQ ID NO: 1512

SEQ ID NO: 46284 - DNA, 1053 bp, Escherichia coli O6; identical to SEQ ID NO: 1513
  CDS (1)..(1053)

SEQ ID NO: 46285 - protein, 350 aa, Escherichia coli O6; identical to SEQ ID NO: 1514

SEQ ID NO: 46286 - DNA, 1170 bp, Corynebacterium efficiens; identical to SEQ ID NO: 1515
  CDS (1)..(1170)

SEQ ID NO: 46287 - protein, 389 aa, Corynebacterium efficiens; identical to SEQ ID NO: 1516

SEQ ID NO: 46288 - DNA, 1134 bp, Bifidobacterium longum; identical to SEQ ID NO: 1517
  CDS (1)..(1134)

SEQ ID NO: 46289 - protein, 377 aa, Bifidobacterium longum; identical to SEQ ID NO: 1518

SEQ ID NO: 46290 - DNA, 1233 bp, Bifidobacterium longum; identical to SEQ ID NO: 1519
  CDS (1)..(1233)

SEQ ID NO: 46291 - protein, 410 aa, Bifidobacterium longum; identical to SEQ ID NO: 1520

SEQ ID NO: 46292 - DNA, 1221 bp, Phytophthora infestans; identical to SEQ ID NO: 1521
  CDS (20)..(1153)

SEQ ID NO: 46293 - protein, 377 aa, Phytophthora infestans; identical to SEQ ID NO: 1522

SEQ ID NO: 46294 - DNA, 1062 bp, Chlorobium tepidum; identical to SEQ ID NO: 1523
  CDS (1)..(1062)

SEQ ID NO: 46295 - protein, 353 aa, Chlorobium tepidum; identical to SEQ ID NO: 1524

SEQ ID NO: 46296 - DNA, 1074 bp, Xanthomonas campestris; identical to SEQ ID NO: 1525
  CDS (1)..(1074)

SEQ ID NO: 46297 - protein, 357 aa, Xanthomonas campestris; identical to SEQ ID NO: 1526

SEQ ID NO: 46298 - DNA, 1074 bp, Xanthomonas axonopodis; identical to SEQ ID NO: 1527
  CDS (1)..(1074)

SEQ ID NO: 46299 - protein, 357 aa, Xanthomonas axonopodis; identical to SEQ ID NO: 1528

SEQ ID NO: 46300 - DNA, 1080 bp, Ralstonia solanacearum; identical to SEQ ID NO: 1529
  CDS (1)..(1080)

SEQ ID NO: 46301 - protein, 359 aa, Ralstonia solanacearum; identical to SEQ ID NO: 1530

SEQ ID NO: 46302 - DNA, 1179 bp, Ralstonia solanacearum; identical to SEQ ID NO: 1531
  CDS (1)..(1179)

SEQ ID NO: 46303 - protein, 392 aa, Ralstonia solanacearum; identical to SEQ ID NO: 1532

SEQ ID NO: 46304 - DNA, 1065 bp, Synechococcus sp; identical to SEQ ID NO: 1533
  CDS (1)..(1065)

SEQ ID NO: 46305 - protein, 354 aa, Synechococcus sp; identical to SEQ ID NO: 1534

SEQ ID NO: 46306 - DNA, 1035 bp, Escherichia coli; identical to SEQ ID NO: 1535
  CDS (1)..(1035)

SEQ ID NO: 46307 - protein, 344 aa, Escherichia coli; identical to SEQ ID NO: 1536

SEQ ID NO: 46308 - DNA, 1200 bp, Stigmatella aurantiaca; identical to SEQ ID NO: 1537
  CDS (62)..(1147)

SEQ ID NO: 46309 - protein, 361 aa, Stigmatella aurantiaca; identical to SEQ ID NO: 1538

SEQ ID NO: 46310 - DNA, 1092 bp, Rhizobium loti; identical to SEQ ID NO: 1539
  CDS (1)..(1092)

SEQ ID NO: 46311 - protein, 363 aa, Rhizobium loti; identical to SEQ ID NO: 1540

SEQ ID NO: 46312 - DNA, 1083 bp, Amycolatopsis mediterranei; identical to SEQ ID NO: 1541
  CDS (1)..(1083)

SEQ ID NO: 46313 - protein, 360 aa, Amycolatopsis mediterranei; identical to SEQ ID NO: 1542

SEQ ID NO: 46314 - DNA, 1053 bp, Pasteurella multocida; identical to SEQ ID NO: 1543
  CDS (1)..(1053)

SEQ ID NO: 46315 - protein, 350 aa, Pasteurella multocida; identical to SEQ ID NO: 1544

SEQ ID NO: 46316 - DNA, 1086 bp, Pasteurella multocida; identical to SEQ ID NO: 1545
  CDS (1)..(1086)

SEQ ID NO: 46317 - protein, 361 aa, Pasteurella multocida; identical to SEQ ID NO: 1546

SEQ ID NO: 46318 - DNA, 1125 bp, Emericella nidulans; identical to SEQ ID NO: 1547
  CDS (1)..(1125)

SEQ ID NO: 46319 - protein, 374 aa, Emericella nidulans; identical to SEQ ID NO: 1548

SEQ ID NO: 46320 - DNA, 1089 bp, Emericella nidulans; identical to SEQ ID NO: 1549
  CDS (1)..(1089)

SEQ ID NO: 46321 - protein, 362 aa, Emericella nidulans; identical to SEQ ID NO: 1550

SEQ ID NO: 46322 - DNA, 1239 bp, Vibrio cholerae; identical to SEQ ID NO: 1551
  CDS (114)..(1175)

SEQ ID NO: 46323 - protein, 353 aa, Vibrio cholerae; identical to SEQ ID NO: 1552

SEQ ID NO: 46324 - DNA, 2184 bp, Candida albicans; identical to SEQ ID NO: 1553
  CDS (461)..(1573)

SEQ ID NO: 46325 - protein, 370 aa, Candida albicans; identical to SEQ ID NO: 1554

SEQ ID NO: 46326 - DNA, 1047 bp, Buchnera aphidicola; identical to SEQ ID NO: 1555
  CDS (1)..(1047)

SEQ ID NO: 46327 - protein, 348 aa, Buchnera aphidicola; identical to SEQ ID NO: 1556

SEQ ID NO: 46328 - DNA, 1047 bp, Buchnera aphidicola; identical to SEQ ID NO: 1557
  CDS (1)..(1047)

SEQ ID NO: 46329 - protein, 348 aa, Buchnera aphidicola; identical to SEQ ID NO: 1558

SEQ ID NO: 46330 - DNA, 1047 bp, Erwinia herbicola; identical to SEQ ID NO: 1559
  CDS (1)..(1047)

SEQ ID NO: 46331 - protein, 348 aa, Erwinia herbicola; identical to SEQ ID NO: 1560

SEQ ID NO: 46332 - DNA, 1047 bp, Salmonella typhimurium; identical to SEQ ID NO: 1561
  CDS (1)..(1047)

SEQ ID NO: 46333 - protein, 348 aa, Salmonella typhimurium; identical to SEQ ID NO: 1562

SEQ ID NO: 46334 - DNA, 23 bp, Artificial sequence
  Primer sequence
atgaacagaactgacgaactccg

SEQ ID NO: 46335 - DNA, 24 bp, Artificial sequence
  Primer sequence
ttagaagcgggtatctaccgcaga

SEQ ID NO: 46336 - protein, 352 aa, Artificial sequence; identical to SEQ ID NO: 19007
  Consensus
  Variant (2)..(3): Xaa in position 2 to 3 is any amino acid
  Variant (5)..(11): Xaa in position 5 to 11 is any amino acid
  Variant (13)..(24): Xaa in position 13 to 24 is any amino acid
  Variant (26)..(30): Xaa in position 26 to 30 is any amino acid
  Variant (32)..(33): Xaa in position 32 to 33 is any amino acid
  Variant (35)..(35): Xaa in position 35 is any amino acid
  Variant (37)..(40): Xaa in position 37 to 40 is any amino acid
  Variant (42)..(43): Xaa in position 42 to 43 is any amino acid
  Variant (45)..(46): Xaa in position 45 to 46 is any amino acid
  Variant (51)..(51): Xaa in position 51 is any amino acid
  Variant (54)..(55): Xaa in position 54 to 55 is any amino acid
  Variant (58)..(59): Xaa in position 58 to 59 is any amino acid
  Variant (62)..(63): Xaa in position 62 to 63 is any amino acid
  Variant (65)..(76): Xaa in position 65 to 76 is any amino acid
  Variant (78)..(80): Xaa in position 78 to 80 is any amino acid
  Variant (83)..(83): Xaa in position 83 is any amino acid
  Variant (85)..(85): Xaa in position 85 is any amino acid
  Variant (91)..(93): Xaa in position 91 to 93 is any amino acid
  Variant (100)..(100): Xaa in position 100 is any amino acid
  Variant (103)..(112): Xaa in position 103 to 112 is any amino acid
  Variant (115)..(117): Xaa in position 115 to 117 is any amino acid
  Variant (119)..(119): Xaa in position 119 is any amino acid
  Variant (121)..(128): Xaa in position 121 to 128 is any amino acid
  Variant (130)..(130): Xaa in position 130 is any amino acid
  Variant (132)..(132): Xaa in position 132 is any amino acid
  Variant (134)..(134): Xaa in position 134 is any amino acid
  Variant (136)..(136): Xaa in position 136 is any amino acid
  Variant (139)..(142): Xaa in position 139 to 142 is any amino acid
  Variant (144)..(146): Xaa in position 144 to 146 is any amino acid
  Variant (148)..(152): Xaa in position 148 to 152 is any amino acid
  Variant (163)..(163): Xaa in position 163 is any amino acid
  Variant (166)..(167): Xaa in position 166 to 167 is any amino acid
  Variant (170)..(170): Xaa in position 170 is any amino acid
  Variant (173)..(173): Xaa in position 173 is any amino acid
  Variant (175)..(175): Xaa in position 175 is any amino acid
  Variant (180)..(180): Xaa in position 180 is any amino acid
  Variant (182)..(182): Xaa in position 182 is any amino acid
  Variant (184)..(187): Xaa in position 184 to 187 is any amino acid
  Variant (189)..(190): Xaa in position 189 to 190 is any amino acid
  Variant (192)..(194): Xaa in position 192 to 194 is any amino acid
  Variant (196)..(198): Xaa in position 196 to 198 is any amino acid
  Variant (200)..(200): Xaa in position 200 is any amino acid
  Variant (202)..(207): Xaa in position 202 to 207 is any amino acid
  Variant (209)..(214): Xaa in position 209 to 214 is any amino acid
  Variant (216)..(216): Xaa in position 216 is any amino acid
  Variant (219)..(221): Xaa in position 219 to 221 is any amino acid
  Variant (223)..(224): Xaa in position 223 to 224 is any amino acid
  Variant (229)..(237): Xaa in position 229 to 237 is any amino acid
  Variant (240)..(268): Xaa in position 240 to 268 is any amino acid
  Variant (270)..(270): Xaa in position 270 is any amino acid
  Variant (273)..(273): Xaa in position 273 is any amino acid
  Variant (276)..(276): Xaa in position 276 is any amino acid
  Variant (278)..(281): Xaa in position 278 to 281 is any amino acid
  Variant (283)..(284): Xaa in position 283 to 284 is any amino acid
  Variant (286)..(291): Xaa in position 286 to 291 is any amino acid
  Variant (293)..(295): Xaa in position 293 to 295 is any amino acid
  Variant (297)..(304): Xaa in position 297 to 304 is any amino acid
  Variant (306)..(306): Xaa in position 306 is any amino acid
  Variant (308)..(308): Xaa in position 308 is any amino acid
  Variant (311)..(314): Xaa in position 311 to 314 is any amino acid
  Variant (316)..(316): Xaa in position 316 is any amino acid
  Variant (318)..(333): Xaa in position 318 to 333 is any amino acid
  Variant (336)..(336): Xaa in position 336 is any amino acid
  Variant (338)..(338): Xaa in position 338 is any amino acid
  Variant (341)..(341): Xaa in position 341 is any amino acid
  Variant (343)..(344): Xaa in position 343 to 344 is any amino acid
  Variant (346)..(347): Xaa in position 346 to 347 is any amino acid
  Variant (349)..(351): Xaa in position 349 to 351 is any amino acid

SEQ ID NO: 46337 - protein, 24 aa, Artificial sequence
  Consensus
  Variant (2)..(2): Xaa in position 2 is any amino acid
  Variant (3)..(3): Xaa in position 3 is Leu, Val, Phe, Ile, Ala or Met
  Variant (4)..(4): Xaa in position 4 is Val, Ile, Leu or Ala
  Variant (5)..(5): Xaa in position 5 is Val or Ile
  Variant (6)..(6): Xaa in position 6 is Val, Ile, Cys or Thr
  Variant (11)..(11): Xaa in position 11 is Ile, Val, Ser or Leu
  Variant (12)..(12): Xaa in position 12 is His or Asp
  Variant (13)..(13): Xaa in position 13 is Asp or Asn
  Variant (14)..(15): Xaa in position 14 to 15 is any amino acid
  Variant (16)..(16): Xaa in position 16 is Ala, Ser, Gln or Thr
  Variant (17)..(17): Xaa in position 17 is Ala, Val or Gly
  Variant (18)..(18): Xaa in position 18 is any amino acid
  Variant (19)..(19): Xaa in position 19 is Glu, Asp, Ala or Gln
  Variant (21)..(21): Xaa in position 21 is Ala, Gly, Cys or Ser
  Variant (22)..(22): Xaa in position 22 is any amino acid
  Variant (23)..(23): Xaa in position 23 is Arg, Lys, Gln, His or Leu
  Variant (24)..(24): Xaa in position 24 is Leu, Ile or Phe
RXXXXXGPCSXXXXXXXXXYXXXX

SEQ ID NO: 46338 - protein, 42 aa, Artificial sequence; identical to SEQ ID NO: 2884
  Consensus
  Variant (1)..(1): Xaa in position 1 is Leu, Ile, Phe or Met
  Variant (2)..(2): Xaa in position 2 is any amino acid
  Variant (3)..(3): Xaa in position 3 is Ile, Val, Leu or Met
  Variant (4)..(4): Xaa in position 4 is Val, Ile or Leu
  Variant (7)..(7): Xaa in position 7 is Val, Ala or Thr
  Variant (9)..(9): Xaa in position 9 is Phe, Leu, Thr or Val
  Variant (10)..(10): Xaa in position 10 is Glu or Ala
  Variant (15)..(16): Xaa in position 15 to 16 is any amino acid
  Variant (17)..(17): Xaa in position 17 is any or no amino acid
  Variant (19)..(19): Xaa in position 19 is Trp or Tyr
  Variant (20)..(20): Xaa in position 20 is Lys or Arg
  Variant (22)..(22): Xaa in position 22 is Leu, Phe, Met or Tyr
  Variant (23)..(23): Xaa in position 23 is Ile, Val, Ala or Leu
  Variant (24)..(24): Xaa in position 24 is any amino acid
  Variant (25)..(25): Xaa in position 25 is Asp, Glu or Gln
  Variant (27)..(27): Xaa in position 27 is any amino acid
  Variant (28)..(28): Xaa in position 28 is Leu, Met, Ile, Val, Ala or Thr
  Variant (29)..(29): Xaa in position 29 is Asp, Asn or Ser
  Variant (30)..(33): Xaa in position 30 to 33 is any amino acid
  Variant (34)..(34): Xaa in position 34 is Ile, Val, Leu or Met
  Variant (35)..(36): Xaa in position 35 to 36 is any amino acid
  Variant (38)..(38): Xaa in position 38 is Leu, Ile, Met or Val
  Variant (39)..(40): Xaa in position 39 to 40 is any amino acid
  Variant (41)..(41): Xaa in position 41 is Ala, Ser, Gly, Val or Thr

SEQ ID NO: 46339 - protein, 65 aa, Artificial sequence; identical to SEQ ID NO: 2885
  Consensus
  Variant (2)..(2): Xaa in position 2 is any amino acid
  Variant (4)..(4): Xaa in position 4 is Asp, Tyr, Gln, Asn or Glu
  Variant (5)..(9): Xaa in position 5 to 9 is any amino acid
  Variant (10)..(10): Xaa in position 10 is Tyr, Phe or Leu
  Variant (11)..(12): Xaa in position 11 to 12 is any amino acid
  Variant (13)..(13): Xaa in position 13 is Asp or Glu
  Variant (14)..(15): Xaa in position 14 to 15 is any amino acid
  Variant (16)..(16): Xaa in position 16 is Ser, Ala, Thr or Cys
  Variant (17)..(17): Xaa in position 17 is Trp, Phe, Tyr, Leu or Val
  Variant (18)..(18): Xaa in position 18 is any amino acid
  Variant (19)..(19): Xaa in position 19 is Ala or Ser
  Variant (20)..(20): Xaa in position 20 is Ile or Val
  Variant (24)..(24): Xaa in position 24 is Thr, Ser or Asn
  Variant (25)..(25): Xaa in position 25 is Thr, Val, Ala, Ser or Ile
  Variant (26)..(26): Xaa in position 26 is Glu or Ala
  Variant (27)..(27): Xaa in position 27 is Ser, Asp or Asn
  Variant (29)..(29): Xaa in position 29 is any amino acid
  Variant (32)..(32): Xaa in position 32 is Glu, Gln, Phe or Met
  Variant (33)..(33): Xaa in position 33 is Leu, Met, Val, Ile or Phe
  Variant (34)..(34): Xaa in position 34 is Ala, Ser, Thr, Cys or Val
  Variant (36)..(36): Xaa in position 36 is Gly, Ala or Asn
  Variant (37)..(39): Xaa in position 37 to 39 is any amino acid
  Variant (40)..(40): Xaa in position 40 is Pro or Ala
  Variant (41)..(41): Xaa in position 41 is Val, Ile, Thr or Leu
  Variant (43)..(43): Xaa in position 43 is Phe, Met, Tyr or Ile
  Variant (46)..(46): Xaa in position 46 is any amino acid
  Variant (47)..(47): Xaa in position 47 is Thr, Ser or Arg
  Variant (48)..(48): Xaa in position 48 is any amino acid
  Variant (50)..(53): Xaa in position 50 to 53 is any amino acid
  Variant (54)..(54): Xaa in position 54 is Ala or Met
  Variant (55)..(55): Xaa in position 55 is any amino acid
  Variant (56)..(56): Xaa in position 56 is Asp, Asn or Glu
  Variant (57)..(57): Xaa in position 57 is Ala or Gly
  Variant (58)..(59): Xaa in position 58 to 59 is any amino acid
  Variant (60)..(60): Xaa in position 60 is Ala or Ser
  Variant (61)..(61): Xaa in position 61 is Ala, Ser, Val or Thr
  Variant (62)..(64): Xaa in position 62 to 64 is any amino acid
  Variant (65)..(65): Xaa in position 65 is His or Gln

SEQ ID NO: 46340 - protein, 71 aa, Artificial sequence; identical to SEQ ID NO: 2886
  Consensus
  Variant (1)..(1): Xaa in position 1 is Thr or Ser
  Variant (2)..(2): Xaa in position 2 is any amino acid
  Variant (5)..(7): Xaa in position 5 to 7 is any amino acid
  Variant (8)..(8): Xaa in position 8 is His or Phe
  Variant (9)..(9): Xaa in position 9 is Val, Ile, Leu or Ala
  Variant (10)..(10): Xaa in position 10 is Ile or Val
  Variant (11)..(11): Xaa in position 11 is Leu or Met
  Variant (14)..(14): Xaa in position 14 is Gly, Ser or Ala
  Variant (15)..(16): Xaa in position 15 to 16 is any amino acid
  Variant (17)..(22): Xaa in position 17 to 22 is any or no amino acid
  Variant (23)..(23): Xaa in position 23 is Pro, Thr or Ser
  Variant (25)..(25): Xaa in position 25 is Tyr, Phe or His
  Variant (26)..(29): Xaa in position 26 to 29 is any amino acid
  Variant (30)..(30): Xaa in position 30 is Val, Ile or Leu
  Variant (31)..(36): Xaa in position 31 to 36 is any amino acid
  Variant (37)..(37): Xaa in position 37 is Leu, Met, Ile, Tyr or His
  Variant (38)..(40): Xaa in position 38 to 40 is any amino acid
  Variant (41)..(51): Xaa in position 41 to 51 is any or no amino acid
  Variant (52)..(52): Xaa in position 52 is Leu, Ile or Val
  Variant (53)..(53): Xaa in position 53 is Met, Val, Ile or Leu
  Variant (54)..(54): Xaa in position 54 is Ile or Val
  Variant (56)..(56): Xaa in position 56 is Cys, Phe, Ala, Thr, Tyr or Val
  Variant (57)..(57): Xaa in position 57 is Ser, Asn or Ala
  Variant (59)..(59): Xaa in position 59 is Gly, Ala or Asp
  Variant (61)..(61): Xaa in position 61 is Ser or Cys
  Variant (62)..(62): Xaa in position 62 is any amino acid
  Variant (64)..(66): Xaa in position 64 to 66 is any amino acid
  Variant (67)..(67): Xaa in position 67 is Arg, Asn, Lys, Leu or Glu
  Variant (69)..(70): Xaa in position 69 to 70 is any amino acid
  Variant (71)..(71): Xaa in position 71 is Val or Ile

SEQ ID NO: 46341 - protein, 41 aa, Artificial sequence; identical to SEQ ID NO: 2887
  Consensus
  Variant (2)..(2): Xaa in position 2 is any amino acid
  Variant (4)..(4): Xaa in position 4 is Ile, Leu, Val, Ala or Met
  Variant (7)..(7): Xaa in position 7 is His, Asn, Phe or Tyr
  Variant (8)..(8): Xaa in position 8 is Leu or Ile
  Variant (9)..(10): Xaa in position 9 to 10 is any amino acid
  Variant (12)..(12): Xaa in position 12 is any amino acid
  Variant (14)..(19): Xaa in position 14 to 19 is any amino acid
  Variant (20)..(30): Xaa in position 20 to 30 is any or no amino acid
  Variant (32)..(32): Xaa in position 32 is any amino acid
  Variant (34)..(34): Xaa in position 34 is Ile or Val
  Variant (37)..(37): Xaa in position 37 is Ala, Pro, Gly, Lys, Ser or Glu
  Variant (39)..(39): Xaa in position 39 is Ile, Leu or Val
  Variant (40)..(40): Xaa in position 40 is any amino acid
  Variant (41)..(41): Xaa in position 41 is Trp, Ile, Leu or Phe

SEQ ID NO: 46342 - DNA, 819 bp, Escherichia coli
  CDS (1)..(819)
atgatttacatcggtctaccgcaatggtcgcatcctaaatgggtgcggttggggatcaccagccttgaagagtatgcccgccactttaactgcgtggagggcaacaccacgctttacgccctgccgaaacccgaggttgtcctgcgctggcgtgagcagaccacagatgacttccgcttctgttttaagtttccggcgaccatttcgcatcaggcagcattacggcattgcgatgatttagtgactgaatttttgacccgcatgtcaccgttggctccgcgcattgggcaatactggctgcaactgcctgccacattcggcccacgggagctgcctgcgctttggcattttctcgattctcttcctggcgaatttaattatggcgtggaagtccgccatccacagtttttcgccaaaggagaagaggaacaaacgcttaatcgcggtttacatcagcgcggcgttaatcgggtgattttagacagccgcccggttcatgcagcacgtccacacagtgaagctattcgcgacgctcaacgaaaaaaacctaaagttccggtacatgctgtactgacggcgacaaatccgctgatccgttttatcggtagtgatgatatgacgcaaaaccgggaattatttcaggtctggttacaaaaattagcgcagtggcatcagaccactacgccttatctttttttacatacgccagacattgcccaggcaccggaactggtacataccctgtgggaagacttacgtaaaacgcttccagagatcggagcagttccggctattccacagcaatcttctcttttctga

SEQ ID NO: 46343 - protein, 272 aa, Escherichia coli
MIYIGLPQWSHPKWVRLGITSLEEYARHFNCVEGNTTLYALPKPEVVLRWREQTTDDFRFCFKFPATISHQAALRHCDDLVTEFLTRMSPLAPRIGQYWLQLPATFGPRELPALWHFLDSLPGEFNYGVEVRHPQFFAKGEEEQTLNRGLHQRGVNRVILDSRPVHAARPHSEAIRDAQRKKPKVPVHAVLTATNPLIRFIGSDDMTQNRELFQVWLQKLAQWHQTTTPYLFLHTPDIAQAPELVHTLWEDLRKTLPEIGAVPAIPQQSSLF

SEQ ID NO: 46344 - DNA, 774 bp, Thermoplasma volcanium GSS1
  CDS (1)..(774): transl_table=11
atgatattcgtcggctgttcaggctggtcttatgaggaatggaatggcgtattctatccaaaaagtaaaataaataagctaaaattctattccactatgttcaatacggtcgaagtcaattcaacattttacagagaaataaataatgatattataaatagatggatagaaacagtaagaggaaaaaatttcattttttcaataaaagttcctcagaatataacgcataaggccatattagagaaagatagcaattctaaaagcctatacgaaacattcattgacaaaactgttaggccgataagaaacgctagaatgcttggggctgtccttgtacagcttccacctagttttaattcaaatttacagacagaacttcttgataccatatgctgtgaaaacgaatacaggaccgctgtagaagtaagaaataaagatctctattcaaatgaggagctcaggaaagagttagaaaagaggggtatcgcaatagtcgacgtggatagcacagagcatcccttatccaatctcaactctggcttgaaatggtcttatgtaaggctccatggaagggctcagttgggatggaagtcacaaaacccatacgattaccgttactcggagcaagaaatttcagacctctcatcgaagattatggcgaagaattacgatgaaatattcgtatattttaacaatcacccaagaggaagcgcaccgatcaacgcattgaagatggcctcctgcttgggaattagtaataattggtttttttaa

SEQ ID NO: 46345 - protein, 257 aa, Thermoplasma volcanium GSS1
MIFVGCSGWSYEEWNGVFYPKSKINKLKFYSTMFNTVEVNSTFYREINNDIINRWIETVRGKNFIFSIKVPQNITHKAILEKDSNSKSLYETFIDKTVRPIRNARMLGAVLVQLPPSFNSNLQTELLDTICCENEYRTAVEVRNKDLYSNEELRKELEKRGIAIVDVDSTEHPLSNLNSGLKWSYVRLHGRAQLGWKSQNPYDYRYSEQEISDLSSKIMAKNYDEIFVYFNNHPRGSAPINALKMASCLGISNNWFF

SEQ ID NO: 46346 - DNA, 870 bp, Vibrio cholerae O1 biovar eltor str. N16961
  CDS (1)..(870): transl_table=11
gtgacgtcctctcttcccttgcgactcggtttaaccctgtggtctcaccctgcatggcagagtgagttttatggcagcggcacgcaagcttctgaacgccttgcgaaatacgccagcgtttttcacaccgtggaggggaataccaccttttacgcgtcgccctcgcccagtactgtgctcaactggcgcgccgcgactcatgatgactttcgcttcacctttaagctgcccaaaagcattacccaccagcatttactgcgcgactgtaaagaagagctgctgagttttttgcgtttaatgcagcccttgcacgaccgaattggcatgtggacgattcagctgcccgccgcttttgggcctgaacatctggcgcaattgaaaaactttcgagactggtttccagccgattttccactgggcgtggaggtgcgtcatttggccttttttggcaaaggcgaagcggaaaaagcgctcaatcaatggctgattgagcaaaacattgatcgcatcattatggacagtcgccccgttttttcggcgctgccgaataccgaagcggtaattgatgcgcacgagaaaaaaccgaaagtgccggtgcatgcgattgccaccgccaagcatccgatgatccgttttatcggccatcctgagattgaggccaacctaccctttttcggtgcttggctacataaactgcccgagtggattgcccaaggtaagcagccttatctaatgattcatacaccggataatgatttcgcgcctcagctggcggtgcaactttaccaacaattacaacaggctatcgcgctgcctgacttagccccttttcccgtcacaccagaacaaccacaactgagcatgttttga

SEQ ID NO: 46347 - protein, 289 aa, Vibrio cholerae O1 biovar eltor str. N16961
MTSSLPLRLGLTLWSHPAWQSEFYGSGTQASERLAKYASVFHTVEGNTTFYASPSPSTVLNWRAATHDDFRFTFKLPKSITHQHLLRDCKEELLSFLRLMQPLHDRIGMWTIQLPAAFGPEHLAQLKNFRDWFPADFPLGVEVRHLAFFGKGEAEKALNQWLIEQNIDRIIMDSRPVFSALPNTEAVIDAHEKKPKVPVHAIATAKHPMIRFIGHPEIEANLPFFGAWLHKLPEWIAQGKQPYLMIHTPDNDFAPQLAVQLYQQLQQAIALPDLAPFPVTPEQPQLSMF

SEQ ID NO: 46348 - DNA, 867 bp, Pseudomonas aeruginosa PAO1
  CDS (1)..(867): transl_table=11
gtggtttcccttccttatttcctcggttgtccatcctggaacgaggcggcctggcgcggcagcttctatccgcgcgaattgcgttccgccgactacctcggacactacggcggcatcttcaacgcggtcgagggcaataccaccttctatgcccggccttcggcggaaaccgtgcggcgctgggccgagacgatgccggcggggttccgcttctgtgccaagtttccccgcgatatcagtcacgaaggcgacctgcgcgaacggctcgaggccgccggcgacttcctcgaactgctggcgccacttggcgaaagggtcagcccgctgtggctgcaactgtcggcggcgttcaccccgcagcgcctgggcgaactgctgtatttcctcgatgagctgagtccgcgacggattgccgtggaagtacgccacccggcgttcttcgacaaaggcgaggacgagcgcctgctcaaccgccacctgcgcgagcgtggcgtggagcgcatctgcctggattcgcgggcgctgttcagttgccgttcggacgatccggcggtgctccacgcccagtcgaagaagccgcgcctgccgatccgtccggcggccttcagcgatacgccacaggtgcgtttcatcggcggtcccgacctgccggccaacgaggtgttccttttgccctgggtcgacaaggtggccgactggatcgaggccggcctgactccatacgtattcctgcatacccccgacaatcacctggcggcccagcaggcccagcgtttccatgcgctgctgggccagcgcctgccaggcttgccggcgctacccgagccgatcccggccccggaagtggagcaactgggcctgctctga

SEQ ID NO: 46349 - protein, 288 aa, Pseudomonas aeruginosa PAO1
MVSLPYFLGCPSWNEAAWRGSFYPRELRSADYLGHYGGIFNAVEGNTTFYARPSAETVRRWAETMPAGFRFCAKFPRDISHEGDLRERLEAAGDFLELLAPLGERVSPLWLQLSAAFTPQRLGELLYFLDELSPRRIAVEVRHPAFFDKGEDERLLNRHLRERGVERICLDSRALFSCRSDDPAVLHAQSKKPRLPIRPAAFSDTPQVRFIGGPDLPANEVFLLPWVDKVADWIEAGLTPYVFLHTPDNHLAAQQAQRFHALLGQRLPGLPALPEPIPAPEVEQLGLL

SEQ ID NO: 46350 - DNA, 798 bp, Deinococcus radiodurans R1
  CDS (1)..(798): transl_table=11
gtgatgaagctgctcgaaccgccgcagcaccagaagacacagcatgtcgccctgggcacggcaggctggggcctgagccgcgagcagcaggagcgcttcggcccaggcgacagcgtgctgcaacgctacgccacccgcttcaatgccgccgaaatcaattcgtcgttttaccgcccccaccgcccggccacctacgcgcgctgggcggccagcgtgcagcagggctttcgcttcagcgtcaaggtgcccaaagccgtgacgcacacggccagattgcgagagtgcgccgcgccgctggccgagtttgtagagcaggtcagccatctgggtgaaaagctggggccactgctagtgcagttgccacccagcctgagcttcgagcgggacgttgtagaggacttcttcagcttgctgcacgggatgaccctcgcccggactgtgtgcgaaccgcgtcacgccagctggttcaccccggaagtggacgccctgctgcgcgacctgaacgtgagccgcgtggccgccgaccccgcgaaggtgcccgccgccgcgcaccctggcggcagccttagcatggtgtattaccgctggcacggctcaccgaagatgtattccagcagctacttggattcacaactggcaaggttggcagcgcaggtgcaggcgaattctggcgacgtatgggtcatcttcgacaacacggcggtgggggcagcggtagaaaacgggctgattttacggaacttgttgagttcagcacagtcggaaaggcaaacctcttgccagcctgaccccaaatga

SEQ ID NO: 46351 - protein, 265 aa, Deinococcus radiodurans R1
MMKLLEPPQHQKTQHVALGTAGWGLSREQQERFGPGDSVLQRYATRFNAAEINSSFYRPHRPATYARWAASVQQGFRFSVKVPKAVTHTARLRECAAPLAEFVEQVSHLGEKLGPLLVQLPPSLSFERDVVEDFFSLLHGMTLARTVCEPRHASWFTPEVDALLRDLNVSRVAADPAKVPAAAHPGGSLSMVYYRWHGSPKMYSSSYLDSQLARLAAQVQANSGDVWVIFDNTAVGAAVENGLILRNLLSSAQSERQTSCQPDPK

SEQ ID NO: 46352 - DNA, 723 bp, Thermoplasma acidophilum DSM 1728
  CDS (1)..(723): transl_table=11
atgaacatcagaataggctgttcaggatggtattatccgcactgggccggcaagttctacccttctgacctgaataaaagcgagtggttcaggtattatgcacagaaattcgacacggtggagataaattccacgttttattcttttccaaatgcagcccgcgtaagatcctgggtcaagggatctccagagaattttgtgttcagcgtgaaggtgaaccgcaccataacgcatgtgaaaagattgaaggattgtgacgaagaaattggtctgttctatgagatcattgggtcacttgggaaaatgctgggctgtgtactcttccagttccccccatcgttcaaatattcgcatgataatctaatcatgatagaaaaagcattggaccaaagattctgcaacgttgtggaattcaggaacatttcatggttctctgaagatgccaggtgtgatctggagaagagtgatctgcatgtagtcgctgtaagctctgaaaggattccattgtggatcaaagaagattccgttgtatatgtaaggttgcacggcaatgtgaatggctatgctaccgattacaatgaggagtatctgacggatctggcacagaggataattgatgtaaaacctcagtcattgtacgtatatttcaataatgattatagcggctacgctcccaaaaatgcaatcatgctgaaatcgataatcaataatctcattttataa

SEQ ID NO: 46353 - protein, 240 aa, Thermoplasma acidophilum DSM 1728
MNIRIGCSGWYYPHWAGKFYPSDLNKSEWFRYYAQKFDTVEINSTFYSFPNAARVRSWVKGSPENFVFSVKVNRTITHVKRLKDCDEEIGLFYEIIGSLGKMLGCVLFQFPPSFKYSHDNLIMIEKALDQRFCNVVEFRNISWFSEDARCDLEKSDLHVVAVSSERIPLWIKEDSVVYVRLHGNVNGYATDYNEEYLTDLAQRIIDVKPQSLYVYFNNDYSGYAPKNAIMLKSIINNLIL

SEQ ID NO: 46354 - DNA, 843 bp, Listeria monocytogenes EGD-e
  CDS (1)..(843): transl_table=11
atggtaacaatcgggttaactgggtggagtgatcatgattctttattacaaacaaaaaaattaacattggctgattatgcggcacattttcctgtggtggaggttgatacgagtttttatgcgattccttctccgcgaacaacggcaaactgggcggcgcaaactccggatgattttcggtttgtgattaaggccttttcggcgatgacgaaacataaggaatggtcgcagtattttgatagtgaaaatgcgatgtatacggcttatatggatatgattgcaccgataagtgaaacggggaaactacaggcaattttatttcaatttccgccgtattttaattgtacgaaagaaaacgtgacttatttaaaatatattgcgtcgaaaatgggcgatttgccagtggcggttgagtttcgtcataattcttggtataacgagcaaaataccgaaaagacgctggatttgttgcgcgaattaggctttattcatacagttgtcgatgagccgcaagtcggggcgggcagtgtgccgattgtgcttcgcgagacgaatagtgatatgacattagtaaggcttcacggtcgaaatcagtatggctggatgaaagctaacagtcccgagtggcgcgaggttcgcacgctttaccgttacaatgaagaggaaattaacgaatgggctaaatacgtggaacatttgcaaaagttgtccaaagaagttgtcgtgatttttaataataacagcggcggggatgcggctgataatgcgaaacatttacaaaaggcactccaagtcgagtttcaaggcttggctccgatgcaaatggatttattttcggaataa

SEQ ID NO: 46355 - protein, 280 aa, Listeria monocytogenes EGD-e
MVTIGLTGWSDHDSLLQTKKLTLADYAAHFPVVEVDTSFYAIPSPRTTANWAAQTPDDFRFVIKAFSAMTKHKEWSQYFDSENAMYTAYMDMIAPISETGKLQAILFQFPPYFNCTKENVTYLKYIASKMGDLPVAVEFRHNSWYNEQNTEKTLDLLRELGFIHTVVDEPQVGAGSVPIVLRETNSDMTLVRLHGRNQYGWMKANSPEWREVRTLYRYNEEEINEWAKYVEHLQKLSKEVVVIFNNNSGGDAADNAKHLQKALQVEFQGLAPMQMDLFSE

SEQ ID NO: 46356 - DNA, 846 bp, Listeria innocua Clip11262
  CDS (1)..(846): transl_table=11
ttgatgattacaatcgggttaactggatggagtgatcatgattctttattacaaacaaaaaaattaacattagctgattatgcggcacattttcctgtggtagaagtcgatacgagtttttatgcgattccttctccgcgaacaacggcaaactgggcggcgcaaactccggatgattttcgttttgtgataaaggctttttcggcgatgacaaaacataaagaatggtcgcagtattttgatagcgaaaatgcgatgtatacggcttatatggatatgattgcgccgataagtgaaacgggaaaactacaggcaattttatatcaatttccaccgtattttaattgtacgaaagaaaatgtgacttatttaagatatatcgcttcgaaaatgggtgatttgcctgtagcaattgaatttcgtaataactcatggtatagcgaacaaaatacagaaaagacgttagatttactacgagaattaggttttattcatacggttgttgatgaaccacaagttggatctggaagtgtaccaattgtgcttcgtgagacaaatagtgagatgacgctagtaagactgcatggtcggaatcagtatggttggatgaaagcgagtagtccggaatggcgcgaggttcgcacgctttaccgttataatgaggaagaaataaacgagtggaccaaatatgtggaacatttacaaaaattgtccaaagaagttgtcgtgatatttaataataacagcggcggggatgctgctgataatgcgaaacatttacaaaaggcgctccaagtcgagtttcaaggtttggctccgatgcaaatggatttgttttcagaataa

SEQ ID NO: 46357 - protein, 281 aa, Listeria innocua Clip11262
MMITIGLTGWSDHDSLLQTKKLTLADYAAHFPVVEVDTSFYAIPSPRTTANWAAQTPDDFRFVIKAFSAMTKHKEWSQYFDSENAMYTAYMDMIAPISETGKLQAILYQFPPYFNCTKENVTYLRYIASKMGDLPVAIEFRNNSWYSEQNTEKTLDLLRELGFIHTVVDEPQVGSGSVPIVLRETNSEMTLVRLHGRNQYGWMKASSPEWREVRTLYRYNEEEINEWTKYVEHLQKLSKEVVVIFNNNSGGDAADNAKHLQKALQVEFQGLAPMQMDLFSE

SEQ ID NO: 46358 - DNA, 855 bp, Nostoc sp. PCC 7120
  CDS (1)..(855): transl_table=11
gtgaacttctctattggttgtgctgtttgggcttataaaggttgggtaggcgaactttatccccaaggaagtcgtgctggggaatttctccatctctacagtcgtcgcttcactaccgtagaaggtaatactactttctacgcagcaccaaatcaagaaactgtcagccgttgggcaaaagaaacaccaccaggctttgagttttgtttgaaattaccacgggatattacccatcaaggtttattaaaaccctatattcccgccgctttaaaatttctggaggggatgcagcctttgggtaagcatctcggccctatattttcccagttaccaccaagttacgcaccaacattaattgacgatttggctagttttctggaagcttggccgcgcacaacagcaccactagccttagaagtcagacatcctgactggtttcgagaaccccataaaagcaatttgacacagcttttagaaacgctgggtgtaggaagggtactactggattcacgccctatctacacgggagatgatgacccccagttacaatcagaacgacgtaaacccaaattaccgttacaattcagcgtcactgcaccttttagcctgattaggtttatttcccatcctaatttggcggtgaatcaagtatttatggaagagtgggtacaacaaattcaacagtggttacaagcagggacacgaatctatttctttgtacattgtcctatagaagagcgatcgcctaacactgcccgtcacttccaaaaactattagaacagaacggtgtaccagttccacccctaccctggaatcatctggactatccacctcatcaactaaatctctggtaa

SEQ ID NO: 46359 - protein, 284 aa, Nostoc sp. PCC 7120
MNFSIGCAVWAYKGWVGELYPQGSRAGEFLHLYSRRFTTVEGNTTFYAAPNQETVSRWAKETPPGFEFCLKLPRDITHQGLLKPYIPAALKFLEGMQPLGKHLGPIFSQLPPSYAPTLIDDLASFLEAWPRTTAPLALEVRHPDWFREPHKSNLTQLLETLGVGRVLLDSRPIYTGDDDPQLQSERRKPKLPLQFSVTAPFSLIRFISHPNLAVNQVFMEEWVQQIQQWLQAGTRIYFFVHCPIEERSPNTARHFQKLLEQNGVPVPPLPWNHLDYPPHQLNLW

SEQ ID NO: 46360 - DNA, 771 bp, Agrobacterium tumefaciens str. C58
  CDS (1)..(771): transl_table=11
ttgccaatcattgccaccgcagcgtggtcgataccaaaaaaagttgccagtcgttttccggaagagggcagtggcctgcaacggtatgcctccgtctttgacggcgtcgagatcaattccaccttttaccgtcggcacaaaacgtccacattcgcgcggtgggccggctttgtgccagacggctttcggttttctgtaaaaatgcccaaagaaatctcacatacgcgtgcgatgatcgatgtcgccgagccgttttgcagtttcattgaagatatcgccccacttggcgaaaaacgtggaccgcttctgtgccagttgccgccatcattggcttttgagagccgaaccttcgatattgcattcaaaacgatgcgcaataccgacatgggaccgattgtcatcgaggctcggcacaaaagttgggcctcgctcgaagctagcgatctgttgaagacatacgagatcgatagggttctcgctgatcctgccctcgtgtggcctgtcgaagttttcgacacacctcctcgatacattcgtttacatggaaagccaaaaatctactattctgtctacagtgacgaggagatcgagttctttttcaaaaacgtggcgcctgacggatggtgcgtcttcgataacaccgcctctggagctgcaattgagaacgctctgtctatgcttgggtcgagccatgcccctcgcaaaacactccggaaaggcaagagacctccggtggctgaagacgccgcggccaagtcagaaaacggttga

SEQ ID NO: 46361 - protein, 256 aa, Agrobacterium tumefaciens str. C58
MPIIATAAWSIPKKVASRFPEEGSGLQRYASVFDGVEINSTFYRRHKTSTFARWAGFVPDGFRFSVKMPKEISHTRAMIDVAEPFCSFIEDIAPLGEKRGPLLCQLPPSLAFESRTFDIAFKTMRNTDMGPIVIEARHKSWASLEASDLLKTYEIDRVLADPALVWPVEVFDTPPRYIRLHGKPKIYYSVYSDEEIEFFFKNVAPDGWCVFDNTASGAAIENALSMLGSSHAPRKTLRKGKRPPVAEDAAAKSENG

SEQ ID NO: 46362 - DNA, 741 bp, Thermoanaerobacter tengcongensis MB4
  CDS (1)..(741): transl_table=11
atggggaaaaagctctacatagggacatccggttgggcatactcccactggaaagaaattttttatccttctaaccttccttatgaagaaaggcttagcttttattcaaagcattttctgagcgctgaagtaaattcttctttctaccacttacctcaagaaaaaactttgatgaaatggtatacctctactcctgaaggtttcatcttttctgtaaaagcctcccgccacataactcacttaaaaaaactttgtgatgtggaagaagcgtggaacaatttcaaaaaaaggatagacctgttgaaggacaagttaggacctattctcctgcaattccctccaagttttaaaaaagaccaagaaaatgtagaaaaaatcataaactttttaagagggaaagaaaactacaaatttgccttggaattcaggcataaaagctggcttgatgaagaagtctatgaccttatgaggaaattgaaagtcgcctgggtaatagcagattcctcccggtatcctaaggcaaaagttgtcacagcagattttgcttacattagaatgcatgggcctgaagctttgttcagttcctcctattcagaagaagaacttgaggaattggcaaaagacatagaagaatatttaaaaaattgcgatgaaatttacgtgtatttcaacaatgacgtcaacggctgcgcaattcaaaatgccaaaactttaataaaactcacggcacatatgctttga

SEQ ID NO: 46363 - protein, 246 aa, Thermoanaerobacter tengcongensis MB4
MGKKLYIGTSGWAYSHWKEIFYPSNLPYEERLSFYSKHFLSAEVNSSFYHLPQEKTLMKWYTSTPEGFIFSVKASRHITHLKKLCDVEEAWNNFKKRIDLLKDKLGPILLQFPPSFKKDQENVEKIINFLRGKENYKFALEFRHKSWLDEEVYDLMRKLKVAWVIADSSRYPKAKVVTADFAYIRMHGPEALFSSSYSEEELEELAKDIEEYLKNCDEIYVYFNNDVNGCAIQNAKTLIKLTAHML

SEQ ID NO: 46364 - DNA, 768 bp, Streptomyces coelicolor A3(2)
  CDS (1)..(768): transl_table=11
atgaccctgttcgtcggcacgtctggctggcagtaccgggactggcgggagagcttctacccgcccggtctgccggtccggcgctggctggagcactatgcggccgccttcgcgacggtcgagatcaacaacgccttctaccgcctgcccgcccgggagaccttcaccgcctggcgggaccgcgtcccaccggacttcacggtcgcggtcaaggccagccgctacctgacgcacatcaaacgcctgcgcgacccggccgagccggtcgaccgcctgatgacccacgcggccggtctgggcgaccgtctcggcccggtcctgctgcaactgcccccgaccctgcgcgccgacccggacctcctggacgcctgcctggcctgcttcccgccgggcacccgggtcgcggtggaaccccggcacgagtcctggtggacggccgagacccgcgaggttctcgtcgcccggcgcgcggccctgtgctgggcggatgtccgcgcccgcccggtcaccccgttgtggcgcaccaccgactggggctacgtccgcttccacgagggccgggccgcggcctggccgcactacggccgccgctccctggtcacgtggatcgaccgcatcacggcggcctggccgcatacgagcgacgtctacacctacttcaacaacgacccgaacacggcggcggtgcaggacgccgcgacgttcgcacagtcggctcgcacgtcggcgctgacggtcacacgtacgccctcaggggcgcggggctga

SEQ ID NO: 46365 - protein, 255 aa, Streptomyces coelicolor A3(2)
MTLFVGTSGWQYRDWRESFYPPGLPVRRWLEHYAAAFATVEINNAFYRLPARETFTAWRDRVPPDFTVAVKASRYLTHIKRLRDPAEPVDRLMTHAAGLGDRLGPVLLQLPPTLRADPDLLDACLACFPPGTRVAVEPRHESWWTAETREVLVARRAALCWADVRARPVTPLWRTTDWGYVRFHEGRAAAWPHYGRRSLVTWIDRITAAWPHTSDVYTYFNNDPNTAAVQDAATFAQSARTSALTVTRTPSGARG

SEQ ID NO: 46366 - DNA, 771 bp, Xanthomonas axonopodis pv. citri str. 306
  CDS (1)..(771): transl_table=11
atgccagctcgtccatccggtgccattgcacgtgtgcgttgtggttgcgcaggctggtcgattcccgccgcagaccgcgcacagttcgacgagggcgccagcgtattgcagcgctacgccacgcgtttggacgcggtggaaatcaactcctcgttctatcgtccgcaccgcgccagcacctacgcgcgatgggccgacagcgtgccggaggactttcgtttttcggtcaagctgccacgcagcatcagccacgacgcacgcctgcacggcaccgggccgctgctggatgccttcctggcgcaggccggcgcgctgggaacacgactgggctgcctgctgctgcaactgccgcccagcgcggccttcgatgccgcggtggccgcgcggtttttcgcgatgctgcgccggcgctgggacggcggcgtggtctgcgaaccgcgccacgccagctggtttgccgcacctgcgcaggcgctgctggcgcgccatcggattgcacgctgcgccgccgacccggcgccggtgcccgcggcctcactgccgagcccggctgctgcaccgctgtattggcgctggcatggcgccccgcgtcgctactacagcagctacgcgcacaccgcactgcaggcgctggccgccacggtgcgcgccagccacccaggcagcacgcagcctccggccgaacgctgggtgatcttcgacaacaccgcagccgggtgcgcaacctccaatgcgctggaattgcagcgcttgctgaggaacgaacgctag

SEQ ID NO: 46367 - protein, 256 aa, Xanthomonas axonopodis pv. citri str. 306
MPARPSGAIARVRCGCAGWSIPAADRAQFDEGASVLQRYATRLDAVEINSSFYRPHRASTYARWADSVPEDFRFSVKLPRSISHDARLHGTGPLLDAFLAQAGALGTRLGCLLLQLPPSAAFDAAVAARFFAMLRRRWDGGVVCEPRHASWFAAPAQALLARHRIARCAADPAPVPAASLPSPAAAPLYWRWHGAPRRYYSSYAHTALQALAATVRASHPGSTQPPAERWVIFDNTAAGCATSNALELQRLLRNER

SEQ ID NO: 46368 - DNA, 909 bp, Xanthomonas axonopodis pv. citri str. 306
  CDS (1)..(909): transl_table=11
atgctcggggttatggctatttgcatcggcatttccggctggcgttacgcacgctggcgcggcacgttttacccggccggcctggcccaacggcgcgagctcgaatacgccgcgggctgctttcccagcgtggaaatcaatggctccttctattcgctgcagcgcccggaaagcttccagcgctggcatgacgaaacgcctgaggatttcgtcttttcggtcaagggtcctcgcttcatcacccatatgaagcgcttgcgcgattgcgagcaggcgctggccaacttcttcgcttccggggtgttgcggctgggcgccaaactgggtccgatcctgtggcagctaccgccgaccctacagttcgatgccgagctgctggacgcatttctcggcagcctgccgcgcgatagcgaggccgcgttggcgagggcgcgcaaacgcgacaccgcgctgatgcagggccgcagcgcgctggcgatcgatcgccggcgaccgatccgtcacgcattggaagtgcgtcacgacagcttctgcgatccggcctgcatgcggctgctgcggcgtcacaatgtcgcggtggtggtcgccgacaccgcagggaaattcccgtatctggaggacgtcagcgcagatttcgtctatgtgcgtctgcatggcgatgcgcagttgtacgccagcggctacagcgacaccgcactggatcgctgggcagcacgcatcgccgcgtgggccggcggagccgaaccggacgatgcagcccgcgtcggcgcacgcgcccgcaaacgcgcaatgcgcgatgtgtactgttatttcgacaacgacatgaaggtgcatgcgccgttcgatgcgcgcggcttgatgcaacggctgcagttgcctaccaactgcccggcacgcgaaaacacctag

SEQ ID NO: 46369 - protein, 302 aa, Xanthomonas axonopodis pv. citri str. 306
MLGVMAICIGISGWRYARWRGTFYPAGLAQRRELEYAAGCFPSVEINGSFYSLQRPESFQRWHDETPEDFVFSVKGPRFITHMKRLRDCEQALANFFASGVLRLGAKLGPILWQLPPTLQFDAELLDAFLGSLPRDSEAALARARKRDTALMQGRSALAIDRRRPIRHALEVRHDSFCDPACMRLLRRHNVAVVVADTAGKFPYLEDVSADFVYVRLHGDAQLYASGYSDTALDRWAARIAAWAGGAEPDDAARVGARARKRAMRDVYCYFDNDMKVHAPFDARGLMQRLQLPTNCPARENT

SEQ ID NO: 46370 - DNA, 816 bp, Yersinia pestis KIM
  CDS (1)..(816): transl_table=11
atgtatatcggactgccgcaatggcaacacccggcctggggccgactgggtcttcgagacttggcggactatagccgctattttaattgcgttgagggtaataccaccttttatgcattgccacggccagaaattgtgctgcgctggcgtgatatgacaccggacagtttccgtttctgctttaaattccccgccacaatcagccatcaggcggctctgcgtgactgtgataaagaactacaggctttttatcattgcctggctccgctgaatgatcgcattggtcaactgtggttacaactgcctgccgcctttgggccaaatgaattggaccgtttgtggcagtttatcgataagttacccgctggttttcagtatggcgtggaagtccgacacccagagttttttgccaaaggtgccgcagaattagcccttaatcaagggttacatcagcgttcaattaatcgggtgatgctcgatagccgccctattcacgccgccaagcctttaaccgccgccgttcgtgatgctcaaagtaagaaaccccgtttgccagtacatgctgtcgtcactggcggccaacctttagtgcgctttattggtggcgaccaattggatgacaacttggccctgtttgcaccctggctacaaaaactgcctttatgggaacagcaccatcaaccctacgtttttattcacacgcccgataacggcgactcaccgcagcaagctcaaaaaatttggcaaaagttggcagaagccatcccgacattgcccaccgcacccgattggccagagcaagagacactcttttag

SEQ ID NO: 46371 - protein, 271 aa, Yersinia pestis KIM
MYIGLPQWQHPAWGRLGLRDLADYSRYFNCVEGNTTFYALPRPEIVLRWRDMTPDSFRFCFKFPATISHQAALRDCDKELQAFYHCLAPLNDRIGQLWLQLPAAFGPNELDRLWQFIDKLPAGFQYGVEVRHPEFFAKGAAELALNQGLHQRSINRVMLDSRPIHAAKPLTAAVRDAQSKKPRLPVHAVVTGGQPLVRFIGGDQLDDNLALFAPWLQKLPLWEQHHQPYVFIHTPDNGDSPQQAQKIWQKLAEAIPTLPTAPDWPEQETLF

SEQ ID NO: 46372 - DNA, 870 bp, Pseudomonas putida KT2440
  CDS (1)..(870): transl_table=11
atgaatccctcaccactgccttactttctcggttgcccgtcgtggagcgaaaacgcctggcgcgactacctgtaccccgctgacgccaacagtaaccaaatgcttggcttctacagccaggtgttcaacgccgtcgaaggcaacaccactttctacgcacgtcccgctcccggcaccattgcccgctgggcgcagctcatgcccgagcactttcgcttcactgccaagtttccgcgggatgtcagccatgaaggcgacctgcgagaccagcttgagcctgccttcgacttcacccggctgatggccccgctgggccggcgcgtatcaccctactggctgcagttgccggcccagttcggcccggcgcgtttgggtgagctttgtcacttcctcgatcagattgccgtgcccgtggccgtggaagtgcgcaaccaggccttttttgccaagggtgaggaagaacgcctgctcaaccgcctgctgcacgaacgcggtgtggagcgtatctgcctcgacccgcgtgcgctgttcagttgtacctcgcgcgaccctgccgtgctgcatgcgcagtcgaagaagcccaaggtgcctccgcggccggcagccttcagccagcacccgcaggttcgcttcattggccatcctgaactggaggccaatcacaccttccttagcccttgggtagaaaaagtcgccgcctggatcgaagaaggccgcaatccctatatcttcctgcacacctcggacaatcgcctggctgcggcgctggcccagcgtttccatcaacgcctgatggcacgcctgccgggcctggcacctttgccggaattgccgcgcgcccctgaggtcgaacaattggggctactctga

SEQ ID NO: 46373 - protein, 289 aa, Pseudomonas putida KT2440
MNPSPLPYFLGCPSWSENAWRDYLYPADANSNQMLGFYSQVFNAVEGNTTFYARPAPGTIARWAQLMPEHFRFTAKFPRDVSHEGDLRDQLEPAFDFTRLMAPLGRRVSPYWLQLPAQFGPARLGELCHFLDQIAVPVAVEVRNQAFFAKGEEERLLNRLLHERGVERICLDPRALFSCTSRDPAVLHAQSKKPKVPPRPAAFSQHPQVRFIGHPELEANHTFLSPWVEKVAAWIEEGRNPYIFLHTSDNRLAAALAQRFHQRLMARLPGLAPLPELPRAPEVEQLGLL

SEQ ID NO: 46374 - DNA, 882 bp, Vibrio vulnificus CMCP6
  CDS (1)..(882): transl_table=11
atgcagcgagaaaccatgaacacgcttcctcttcgattgggtctgaccatgtggtcacacaatcagtggcaacaagacttttatggctcggggaccaaacccgcagagcgactggaaaagtacgcacaggtctttcacactgtcgaaggcaatacgaccttctacgcaacgccaaatacaccaaccgtactcaactggcgcgcggcgacgcatgacgattttcgtttcacctttaagttgccaaagcagattacccaccagcagatgcttaaaggctctcagggtttgttacgcgagtttttgagtgtcatggaaccgctgcacccgcgtattggccaatggacaatccaacttcctgcggctttctcaccagagcatttaccgctgctacaacgtttctgctcttactttcccgaagggtttccgctgggaatcgaagtgcgtcatttggctttttttgcgaaaggagaggatgagaaacgcttgaatcaatggttaatggaaacaaagattgatcgcatcatcatggatagccgtccggttttcgcagccccagcaacaacggaggccgttatcgatgcgcaccagaaaaaaccaaaggtgcccgttcacgccatcgcgacgggagagcatccaatgattcgctttattggtcatcccgatttagagagcaacctgcccttctttgccccttggctgagcaaattacccctttggattaccgagggtaagcaaccttatttaatgatccacacaccagataacgtagaaggcccccagttagccaaacgactttaccaacaattacagcaacaagtgaaactacccaatctgtctgattttcctgccaatagtggcaatagccaaatacagatgttctaa

SEQ ID NO: 46375 - protein, 293 aa, Vibrio vulnificus CMCP6
MQRETMNTLPLRLGLTMWSHNQWQQDFYGSGTKPAERLEKYAQVFHTVEGNTTFYATPNTPTVLNWRAATHDDFRFTFKLPKQITHQQMLKGSQGLLREFLSVMEPLHPRIGQWTIQLPAAFSPEHLPLLQRFCSYFPEGFPLGIEVRHLAFFAKGEDEKRLNQWLMETKIDRIIMDSRPVFAAPATTEAVIDAHQKKPKVPVHAIATGEHPMIRFIGHPDLESNLPFFAPWLSKLPLWITEGKQPYLMIHTPDNVEGPQLAKRLYQQLQQQVKLPNLSDFPANSGNSQIQMF

SEQ ID NO: 46376 - DNA, 765 bp, Bradyrhizobium japonicum USDA 110
  CDS (1)..(765): transl_table=11
atgagcgccgtagccgtgccagggagtggtgggcgaggtcgggccaaagcagcgcccgcgctgcggatcggtacggccgggtggagcatcgataaacgctatgccgacggacttccagcgccaggaagtaatctcgaacgctatgcgcgacgtctaaacgccgtcgagatcaattcctcgttccgaagaaggcacaaaccaagcacatacgagcgctgggcgagttcggtgcctgaagagttcaggttctctgtgaagctcccggaagaaatcactcacgatcggggcctggtcggctgcgatgaaatcctgaaaatctttgcggctgaaactgcgggcttgggatcgaaactcgggacgtggctcattcagctgccgccgaagctcgcattcgacgcgaagacattcgacagcttcttcgacttggtcaatggatgcagcgatgccatggtcgcgatcgagccgcggaatgccacttggttcactgaggaagtcgaaagcagattgattgaacgacgcatcgcgcgggtggcagcggatcccgctagggtgctgggctccggagagcctggtggttggcgcggtctggcctatttccgttggcatgggtccccccgcatgtactattccgactacgaccgccaggcccttttctcactggggcggcgtctcgaaagcgctcgcctttggggagccgagacgtggtgcatcttcgacaatacggcggctggggccgcattgggaaatgctctggagatatcgtag

SEQ ID NO: 46377 - protein, 254 aa, Bradyrhizobium japonicum USDA 110
MSAVAVPGSGGRGRAKAAPALRIGTAGWSIDKRYADGLPAPGSNLERYARRLNAVEINSSFRRRHKPSTYERWASSVPEEFRFSVKLPEEITHDRGLVGCDEILKIFAAETAGLGSKLGTWLIQLPPKLAFDAKTFDSFFDLVNGCSDAMVAIEPRNATWFTEEVESRLIERRIARVAADPARVLGSGEPGGWRGLAYFRWHGSPRMYYSDYDRQALFSLGRRLESARLWGAETWCIFDNTAAGAALGNALEIS

SEQ ID NO: 46378 - DNA, 738 bp, Shewanella oneidensis MR-1
  CDS (1)..(738): transl_table=11
atggattcatatttcttaggagtcagtttggagtcacttaagtcactgccgcgccaaaccaatcatttgcgtcttgggcttgccatgtggtcacattaccattggcaagatagtgtttatggttcaacaaccaaacaagccgagcgccttgcccgttatgcaaccatttttaacacggtagaagggaataccagtttttacgctacgccaaatgcacaaactatgatgaactggctcagagctaccccagatgactttcgctttacctttaagctaccgcagacgatcacccatcaaaagcaactacagcattgtcagcaggagcttctgcaattctttcaagtcatgtcgcccttggcagaaaaaaccgggctatggaagatccaacttcccgcccatttcggcccagaaaacttgcctgcgttagcgcaatttctcaatcaagtcccccaagggttaacctatggcgtcgaagtcaggcatgctgcgttttttgccaagggagaggctgagcgagcgctaaaccgcttgctgatggataaacaggtgaaccgcatcattatggacagtcggccactgtttgctctgccacccgctaacgaggcgattatcgatacccataagaaaaaaccgcgggtgccagtgcatgcaatcgcgactgccaatacgcctgtggttcgctttatcgggcaacctgacgatgcatgcagttgcacaactcgcgcagcaaggcgttag

SEQ ID NO: 46379 - protein, 245 aa, Shewanella oneidensis MR-1
MDSYFLGVSLESLKSLPRQTNHLRLGLAMWSHYHWQDSVYGSTTKQAERLARYATIFNTVEGNTSFYATPNAQTMMNWLRATPDDFRFTFKLPQTITHQKQLQHCQQELLQFFQVMSPLAEKTGLWKIQLPAHFGPENLPALAQFLNQVPQGLTYGVEVRHAAFFAKGEAERALNRLLMDKQVNRIIMDSRPLFALPPANEAIIDTHKKKPRVPVHAIATANTPVVRFIGQPDDACSCTTRAARR

SEQ ID NO: 46380 - DNA, 843 bp, Lactobacillus plantarum WCFS1
  CDS (1)..(843): transl_table=11
atgataacaattggcttaacaacttggacggaacaccctagtttactgggtggtactgaaaagctgaccttaactgaatattcgggagtcctaccagtcgtcgaagtggacacgccattctatggtattccgaaagtgacgacggtcgcgaagtggcaaaaggccgtccctgataagtttcagtttattttgaaagcaaatcaggtgatgacgctgcatgacacttatgacgaaggggtttcgatggatgcgctaaagacagcttatcgggaataccgtgcgatgctcaaaccgttaacgcagcaccagcaattaaaagcggtgctcttccaatttccgccgttttttgaacggtcgaaccgcaacttccattacctacaacggatggtcgagtggttacccggtgttccaatcgcagtcgaatttcgtaaccagagttggtacgaggagagtgtcaaagatgcggtctttagttttctgaaggatctggggattacccatgtgattgtcgatgagccgcacgctttaaatgatggcgttagtttcgagccggtcgtaacgaattcgaaattggcactcttacgcttacatggtcgtaaccagcagggctggtcagccaagggcgctaactggcgtagccaacggactttatatcggtatagtgatcaagaactagctgaattcaagcaaacggtggaacagttacaacagcaggcggacgaggtttgcgtcatctttaataataattctggtggtgacgcggccgataacgcgatggcactcaaagagttgctaggcgtttcgtttggtgatttaggaccgcatcaactggacttgttttaa

SEQ ID NO: 46381 - protein, 280 aa, Lactobacillus plantarum WCFS1
MITIGLTTWTEHPSLLGGTEKLTLTEYSGVLPVVEVDTPFYGIPKVTTVAKWQKAVPDKFQFILKANQVMTLHDTYDEGVSMDALKTAYREYRAMLKPLTQHQQLKAVLFQFPPFFERSNRNFHYLQRMVEWLPGVPIAVEFRNQSWYEESVKDAVFSFLKDLGITHVIVDEPHALNDGVSFEPVVTNSKLALLRLHGRNQQGWSAKGANWRSQRTLYRYSDQELAEFKQTVEQLQQQADEVCVIFNNNSGGDAADNAMALKELLGVSFGDLGPHQLDLF

SEQ ID NO: 46382 - DNA, 870 bp, Pseudomonas syringae pv. tomato str. DC3000
  CDS (1)..(870): transl_table=11
ttgattgtgactcgcctgccttactacctcggttgtccgtcatggagtgaaaacgcctggcgcgattcgttgtaccccgaagatgcccgtcccactgattttctgagcctctacacgcaagtgttcaacgtcgttgaaggcaacaccaccttctatgcacggcccgctgccactactgttcagcgttgggcagaaacaatgcccgaagactttcgcttcacggccaaattccataaagacatcagccacaacggcgaccttcgtcaacaggtcggcgcggcagaagcattcattcgcctgctcgcaccattgggtggccggatcgcgccgttctggctgcaattgcccgccagcttcaccccacagcggcttgccgaactggtcggttttatcgacgagctgaacgtcccgctggcagtagaagtgcgcaacatggcgtttttcatgaagggtgacgaggagcgcatgctcaatcgcctgttgctggatcgaggtgtcgagcgcatctgtctcgattcgcgcgcactgtttaactgcgtgtccagcgaccccgccgtgcttcacgcccagtccaagaaacccaaggtgccgccacgcccagcggcgctgacctcattccctcaggttcgcttcatcggcggcccggacctggaggccaataacgagtttcttgtgcaatgggtggagaaggtcgccgtgtggattgaagagggccgtacgccctatgtgtttctgcacacccccgataacctcaaggcgcccgagcaggccagacgttttcacgagcaattgatgttgcgcttgcctgggttgccggcgttgcctgaactggatcgtgggccgcaggtggaacagttgggcttgctctga

SEQ ID NO: 46383 - protein, 289 aa, Pseudomonas syringae pv. tomato str. DC3000
MIVTRLPYYLGCPSWSENAWRDSLYPEDARPTDFLSLYTQVFNVVEGNTTFYARPAATTVQRWAETMPEDFRFTAKFHKDISHNGDLRQQVGAAEAFIRLLAPLGGRIAPFWLQLPASFTPQRLAELVGFIDELNVPLAVEVRNMAFFMKGDEERMLNRLLLDRGVERICLDSRALFNCVSSDPAVLHAQSKKPKVPPRPAALTSFPQVRFIGGPDLEANNEFLVQWVEKVAVWIEEGRTPYVFLHTPDNLKAPEQARRFHEQLMLRLPGLPALPELDRGPQVEQLGLL

SEQ ID NO: 46384 - DNA, 870 bp, Vibrio parahaemolyticus RIMD 2210633
  CDS (1)..(870): transl_table=11
atgatggataatttaccccttcgacttggtttaaccatgtggtctcacaaccaatggcaacaaagcttttacggtagtggaactaaacctgctgagcgtttagaaaaatacgctcaggtatttcatactgtggaaggaaataccaccttttacgccacgccgacacacaacacggtgcaaaattggaaagcggcaacgcacgacgattttaagtttacgtttaagctccctaaggctatcactcatgaacaaatgctaagaggctgcaacgagcaacttcgtgattttatgaaaatcatggagcccctgcatgagcgcgtcggtcaatggacgatccaactcccagcagcttttggcccagagtatcttgaacgtttgaaaaagttttgcgccagtttcccgcctaactttccactaggcgtagaagtacgtcatatggcctttttctctaaaggcgaggaagagcgagcgcttaatcagtggttggtggaaaacggtattgaccgaataatcatggatagccgccctgtgtttgcggcaaagcctgacaatgaagccatcattgatgctcaaatgaagaagcccaaagttcccgttcatgcgattgcaaccgcttcacacccgatgattcgttttattggccatccggaagaacaaaaaaattacgacttctttgtgccttggctaagtaaattgccacaatggattgcggaaggtaaacagccatatgtgatgattcacacagcagacaatattattgctcctgagctggcagcgaacatttacaagaatctgcaaaatcatgtcgccctgccagatttagcccccttccctgccaatgatggcaactcgcagttacagatgttctaa

SEQ ID NO: 46385 - protein, 289 aa, Vibrio parahaemolyticus RIMD 2210633
MMDNLPLRLGLTMWSHNQWQQSFYGSGTKPAERLEKYAQVFHTVEGNTTFYATPTHNTVQNWKAATHDDFKFTFKLPKAITHEQMLRGCNEQLRDFMKIMEPLHERVGQWTIQLPAAFGPEYLERLKKFCASFPPNFPLGVEVRHMAFFSKGEEERALNQWLVENGIDRIIMDSRPVFAAKPDNEAIIDAQMKKPKVPVHAIATASHPMIRFIGHPEEQKNYDFFVPWLSKLPQWIAEGKQPYVMIHTADNIIAPELAANIYKNLQNHVALPDLAPFPANDGNSQLQMF

SEQ ID NO: 46386 - DNA, 834 bp, Enterococcus faecalis V583
  CDS (1)..(834): transl_table=11
atgattcgcttaggattaacatcttttagtgaacacgactatttaactggaaaaaaacggtccacgctttatgaatatgccagtcatttaccgctagttgaaatggacacggcgtattacgggattcctcccaaagaacgagtagctgaatgggtcaaagcagttcccgaaaactttcgctttgtcatgaaagtttatagtggaatcagttgtcaaggtgagtggcagacctattatgcaagtgaagaagaaatgatcaccgcctttttagaaagtatggccccattaattgaaagtaaaaaattatttgcctttctggtacaattttcaggaacatttggttgtacgaaagaaaatgtcgcttacttgcaaaaaattcgtcactggtttaaagacctacccatcgccattgaattacgaaataattcatggtatcaaccaaactttgtaaaacaaatgttgcaatttatgaaagaaaatcaattttcacttgtgattgtagatgaaccgcagattcctacgaatccagtgcccttttatccttatgtaacgaatcctaatctcgtgctcttccggtttcacggacgtaatgcggctggctggttagccaatgatgcagagtggcgaaaaaaaagaaccctttatcattataatacgcaggaaatcgctgatttaagcgaagctgttttaaaaatgtcgcaagaagctaaagaagtgggcgtaatttttaataataattctggcggcgatgccgcagaaaacgctctacagatgcaaaaagtcttgaatttgagttacgatgatttgaatccaaaacaattagatttattttga

SEQ ID NO: 46387 - protein, 277 aa, Enterococcus faecalis V583
MIRLGLTSFSEHDYLTGKKRSTLYEYASHLPLVEMDTAYYGIPPKERVAEWVKAVPENFRFVMKVYSGISCQGEWQTYYASEEEMITAFLESMAPLIESKKLFAFLVQFSGTFGCTKENVAYLQKIRHWFKDLPIAIELRNNSWYQPNFVKQMLQFMKENQFSLVIVDEPQIPTNPVPFYPYVTNPNLVLFRFHGRNAAGWLANDAEWRKKRTLYHYNTQEIADLSEAVLKMSQEAKEVGVIFNNNSGGDAAENALQMQKVLNLSYDDLNPKQLDLF

SEQ ID NO: 46388 - DNA, 765 bp, Streptomyces avermitilis MA-4680
  CDS (1)..(765): transl_table=11
atgaccctgttcgtcggcacctcggggtggcagtacaaggactggctgggcgccttgtacccgcccgggtgtcccacgcggctctggctggaggagtacgcgacccgtttcgccacggtcgagatcaacaacgccttctaccggctgccgtcgcggggcaccttcgagacctggcgggagcgcaccccgccggacttcgtggtcgccgtgaaggcgagccggtatctgacccacatcaagcggctgcgggaccccgaggagccggtccaccgcctgatgacccacgccgccggcctcggcgaccgcctgggcccggtacttgtccagcttccgcccacgctgcgtgccgaccccggtctgctggacgcctgtctcgcctgtttcccgtccggcacccggatcgcggtcgaaccgcgccacgactcctggtgggcaccggcggtgcgcgaggtgctcgaagcgcggggcgccgccctgtgctgggccgatgtcctgtcccggcccgccaccccgctgtggcgcaccgccgactgggggtacgtccgcttccacgagggccgcgcccgcaggtggccgcgctacggccgccaggccctggtgacctgggcgcggcgcatcgccgagacctggcccgacgatcacgaggtctacgcgtacttcaacaacgacccgcatgcggcggcggtcgaggacgcggcggtgttcgcccgggtggcgaaggcgacgggcctgacggtcacccgtactccgggcggtgacgaatga

SEQ ID NO: 46389 - protein, 254 aa, Streptomyces avermitilis MA-4680
MTLFVGTSGWQYKDWLGALYPPGCPTRLWLEEYATRFATVEINNAFYRLPSRGTFETWRERTPPDFVVAVKASRYLTHIKRLRDPEEPVHRLMTHAAGLGDRLGPVLVQLPPTLRADPGLLDACLACFPSGTRIAVEPRHDSWWAPAVREVLEARGAALCWADVLSRPATPLWRTADWGYVRFHEGRARRWPRYGRQALVTWARRIAETWPDDHEVYAYFNNDPHAAAVEDAAVFARVAKATGLTVTRTPGGDE

SEQ ID NO: 46390 - DNA, 924 bp, Rhodopirellula baltica SH 1
  CDS (1)..(924): transl_table=11
atgccgcctgaatctcgccgcgtgaaacagcccaacgaaacattttcgtcaccatcttggccgatgtcgattggtgctccagtttggtcctgcgacggatggggtgacgtggtctatcccaaaaagacacctcgaaccgagtggctttcgtggtacacgcgttcgttcaacacggtcgagggaaacagcacgttttatgcggtccccggcgagcagacttttcgcggttgggccgagcaagcggccgatggttttgagttctgcttcaaattcccgaagcgaatttcgcacgacagcatgctgcagcactgcgatgacgaggtgcgagagtttttggttcgattgcgcgtgattgccaaggagaatcgtttggggccgacgtttttgcagctcgggccgaactttggtccggatcgattgcctattctggcgaagttcctccgccgtttgccacgagaattgccgtgggcggtggagcttcggcatcacgattggtttgattcagcggacaatgaggctcgcgtgaatgatctgctgcgggacttgcagatcgacaaggtcacgtttgacagtcggccgctgtttcaatcgccgcccgatgatgccatcgaggaaaagtcgcaggcaagaaagccgcgtaccccggttcgccaaacggtcaccgccaaacgtccgatgctacgaattgtcgggcggaatcgggtggagcttgccgaagcgttcttggaccaatgggtgccaattgtggttggctggttggctcaaggactgcgaccaattgtgttcacgcacacgccggacgatcgtttggctccgctgtttgcggaattgctgctttcaaaaatgtccgatgcgatgccgggtgtggactttaccctgccccgccctccacaatctcctgaacagttgtcgcttctggattga

SEQ ID NO: 46391 - protein, 307 aa, Rhodopirellula baltica SH 1
MPPESRRVKQPNETFSSPSWPMSIGAPVWSCDGWGDVVYPKKTPRTEWLSWYTRSFNTVEGNSTFYAVPGEQTFRGWAEQAADGFEFCFKFPKRISHDSMLQHCDDEVREFLVRLRVIAKENRLGPTFLQLGPNFGPDRLPILAKFLRRLPRELPWAVELRHHDWFDSADNEARVNDLLRDLQIDKVTFDSRPLFQSPPDDAIEEKSQARKPRTPVRQTVTAKRPMLRIVGRNRVELAEAFLDQWVPIVVGWLAQGLRPIVFTHTPDDRLAPLFAELLLSKMSDAMPGVDFTLPRPPQSPEQLSLLD

SEQ ID NO: 46392 - DNA, 876 bp, Gloeobacter violaceus PCC 7421
  CDS (1)..(876): transl_table=11
atggcttcgatgtccgaggacacactcatttacgtcggctgccagggctggcgctacccggattggcggttggcttctgcggaagcggtgggcgatctgagtgccccgttctacccgcccaggctgcccgccgcccgcgaactgaagcattacgcccgcacattcgatctggtggaggttgattcgaccttttatgcggttcctcagattcgggtggtcaagaactgggcgacccaggtgcctgagacctttcgctttaccctgaagttgccccgcacccttacccacgagtaccgtcttgcgcggggaagggcgaccctttcggccttttgtgaatgcgcccgccccttgggagtccaattggcagctattctcatccagttgcctccgtcatttgcaacggacgaatttgcggcgctggagcgctttttgccccatctgcccgcggatttgccttttgccgttgaatttcgcgatcctgcctggctcagtgagcgcacggtcgaactgctggcggcccaccggatcgccctgaccctcggggataccccctggataccgacaccactggcgctcgcctggctcgacaggctacctaccgactggctctatctacggctgatgggatccaaatccaacggtctggagcactttacccaccggcaattcgaccgcacggacaccctcgatgcgtgggcggcggccgtttggcgcctggcggaaggcggcaaacgtgtctatgtgctgcttgacaaccatttcgaaggtttctcgccggggtcggcgacgctgcttgtgcgcaaattggggctggcagagcgcccctttccccacgactgccctgccgaaagcgagcaactcggcctcgaatggtag

SEQ ID NO: 46393 - protein, 291 aa, Gloeobacter violaceus PCC 7421
MASMSEDTLIYVGCQGWRYPDWRLASAEAVGDLSAPFYPPRLPAARELKHYARTFDLVEVDSTFYAVPQIRVVKNWATQVPETFRFTLKLPRTLTHEYRLARGRATLSAFCECARPLGVQLAAILIQLPPSFATDEFAALERFLPHLPADLPFAVEFRDPAWLSERTVELLAAHRIALTLGDTPWIPTPLALAWLDRLPTDWLYLRLMGSKSNGLEHFTHRQFDRTDTLDAWAAAVWRLAEGGKRVYVLLDNHFEGFSPGSATLLVRKLGLAERPFPHDCPAESEQLGLEW

SEQ ID NO: 46394 - DNA, 882 bp, Vibrio vulnificus YJ016
  CDS (1)..(882): transl_table=11
atgcagcgagaaaccatgaacacgcttcctcttcgattgggtctgaccatgtggtcacacaatcagtggcaacaagacttttatggctcggggaccaaacccgcagagcgactggaaaagtacgcacaggtctttcacactgtcgaaggcaatacgaccttctacgcgacgccaaacacaccaaccgtactcaactggcgcgcgaccacgcatgacgattttcgtttcacctttaagttgccaaagcagattacccatcagcagatgcttaaaggctctcagggtttgttacgcgagtttttgagtgtcatggaaccgctgcacccgcgtattggccaatggacaatccaacttcccgcggctttttcaccagagcatttaccgctgctacaacgtttctgctcttactttcccgaaggttttccgctgggaattgaagtgcgtcatttggctttttttgcgaaaggagaggatgagaaacgcttgaatcaatggttaatggaaaccaagattgatcgcatcatcatggatagccgtccggttttcgctgccccagcaacaacggaggccgttatcgatgcccaccagaaaaagccaagggtgcccgttcacgccatcgcgacgggagagcatccaatgattcgctttattggtcatcccgatttagagagcaacctgcccttctttgccccttggctgagcaaattacccctttggattgccgagggtaagcaaccttatttaatgatccacacaccagataacgtagaaggcccccaattagccaaacaactttaccaacaattacagcaacaagtgaaactgcccaatctgtctgattttcctgccaatagtggcaatagccaaatacagatgttctaa

SEQ ID NO: 46395 - protein, 293 aa, Vibrio vulnificus YJ016
MQRETMNTLPLRLGLTMWSHNQWQQDFYGSGTKPAERLEKYAQVFHTVEGNTTFYATPNTPTVLNWRATTHDDFRFTFKLPKQITHQQMLKGSQGLLREFLSVMEPLHPRIGQWTIQLPAAFSPEHLPLLQRFCSYFPEGFPLGIEVRHLAFFAKGEDEKRLNQWLMETKIDRIIMDSRPVFAAPATTEAVIDAHQKKPRVPVHAIATGEHPMIRFIGHPDLESNLPFFAPWLSKLPLWIAEGKQPYLMIHTPDNVEGPQLAKQLYQQLQQQVKLPNLSDFPANSGNSQIQMF

SEQ ID NO: 46396 - DNA, 726 bp, Mycobacterium avium subsp. paratuberculosis K-10
  CDS (1)..(726): transl_table=11
gtgaccgtgcgcatcggtacctccgggtggtcgtatgaccactgggcggatgtgctgtacccgccgggaacgccgtcggcgcgccggctggcccgctacatcgaggtgttcgacaccgtcgagttgaacgccagtttctaccgctggcccaaggattcgacgttcgcggggtggcgcgagcagttgccggacggcttcaccatgtcggtcaaggcgcaccgcggactcacccactaccgccggctggcctcccccgagccgtggatcgaacggttcgagcggtgctgggagttgctgggcgatcggcgcggcgtgctgctggtgcagttgcatcccgagcagcagcgcgacgatgcccgcctggattccttcttggagcgcatgcccgcgtccatccgggtcgccgtcgaactgcgccacccgtcgtggaacgaccccgcggtgtatgcgctgctggagcgccgccgtgcggcgtacgcggtgacgagcggccttgggctggcgtgcatcccgcgtgcgacgaccgacctggtctacgtccggatgcacggaccggacccggccgccaactatgccggctcgtactccgacgacgacttgcggtgctgggccgagcggatcaccgcctgggacggtgacggaaaggacgtgtggatgtatttcaacaacgacctgggcggccacgcggtacgcaacgcgctcgcgctgcgcgagctggtgggttga

SEQ ID NO: 46397 - protein, 241 aa, Mycobacterium avium subsp. paratuberculosis K-10
MTVRIGTSGWSYDHWADVLYPPGTPSARRLARYIEVFDTVELNASFYRWPKDSTFAGWREQLPDGFTMSVKAHRGLTHYRRLASPEPWIERFERCWELLGDRRGVLLVQLHPEQQRDDARLDSFLERMPASIRVAVELRHPSWNDPAVYALLERRRAAYAVTSGLGLACIPRATTDLVYVRMHGPDPAANYAGSYSDDDLRCWAERITAWDGDGKDVWMYFNNDLGGHAVRNALALRELVG

SEQ ID NO: 46398 - DNA, 843 bp, Listeria monocytogenes str. 4b F2365
  CDS (1)..(843): transl_table=11
atggtaacaatcgggttaactgggtggagtgatcatgattctttattacaatcaaaaaaattaacattggctgattatgcggcacattttcctgtggtggaggttgatacgagtttttatgcgattccttctccacgaacaacggcaaactgggcggcacaaactccggatgaatttcgttttgtgattaaagcattttcggcgatgacgaaacataaggaatggtcgcagtattttgatagtgaaaatgcgatgtacacggcttatatggatatgattgcaccgataagtgaaacggggaaactacaggcaattttatttcaatttccgccgtattttaattgtacgaaagaaaatgtgatttatttaaaatatattgcttcgaaaatgggtgatttaccggtggcgattgaatttcgccataattcttggtataacgagcaaaacaccgagaaaacactggagttgctgcgagaattaggttttattcatacagtcgttgatgaaccgcaagttggttctgggagcgtgccgattgtgctgcgtgagacgaatagcgatatgacattagtgcggcttcacggccggaatcagtatggttggatgaaagcaagcagtccagaatggcgcgaagttcggacactttaccgttataatgaggaagaaattaacgaatgggcaaaatatgtggaacatttacaaaaattgtccaaagaagttgtcgtgatttttaataataacagcggcggggatgcggctgataatgcgaaacatttacaaaaggcgttacaagttgagtttcaaggcttggctccgatgcaaatggatttgttttcagaataa

SEQ ID NO: 46399 - protein, 280 aa, Listeria monocytogenes str. 4b F2365
MVTIGLTGWSDHDSLLQSKKLTLADYAAHFPVVEVDTSFYAIPSPRTTANWAAQTPDEFRFVIKAFSAMTKHKEWSQYFDSENAMYTAYMDMIAPISETGKLQAILFQFPPYFNCTKENVIYLKYIASKMGDLPVAIEFRHNSWYNEQNTEKTLELLRELGFIHTVVDEPQVGSGSVPIVLRETNSDMTLVRLHGRNQYGWMKASSPEWREVRTLYRYNEEEINEWAKYVEHLQKLSKEVVVIFNNNSGGDAADNAKHLQKALQVEFQGLAPMQMDLFSE

SEQ ID NO: 46400 - DNA, 816 bp, Yersinia pseudotuberculosis IP 32953
  CDS (1)..(816): transl_table=11
atgtatatcggactgccgcaatggcaacacccggcctggggccgactgggtcttcgagacttggcggactatagccgctattttaattgcgttgagggtaataccaccttttatgcattgccacggccagaaattgtgctgcgctggcgtgatatgacaccggacagtttccgtttctgctttaaattccccgccacaatcagccatcaggcggctctgcgtgactgtgataaagaactacaggctttttatcattgcctggctccgctgaatgatcgcattggtcaactgtggttacaactgcctgccgcctttgggccaaatgaattggaccgtttgtggcagtttatcgataagttacccgctggttttcattatggcgtggaagtccgacacccagagttttttgccaaaggtgccgcagaattagcccttaatcaagggttacatcagcgttcaattaatcgggtgatgctcgatagccgccctattcacgccgccaagcctttaaccgccgccgttcgtgatgctcaaagtaagaaaccccgtttgccagtacatgctgtcgtcactggcggccaacctttagtgcgctttattggtggcgaccaattggatgacaacttggccctgtttgcaccctggctacaaaaactgcctttatgggaacagcaccatcaaccctacgtttttattcacacgcccgataacagcgattcaccacagcaagctcaaaaaatttggcaaaagttggcagaagccatcccgacattgcccaccgcacccgattggccagagcaagagacactcttttag

SEQ ID NO: 46401 - protein, 271 aa, Yersinia pseudotuberculosis IP 32953
MYIGLPQWQHPAWGRLGLRDLADYSRYFNCVEGNTTFYALPRPEIVLRWRDMTPDSFRFCFKFPATISHQAALRDCDKELQAFYHCLAPLNDRIGQLWLQLPAAFGPNELDRLWQFIDKLPAGFHYGVEVRHPEFFAKGAAELALNQGLHQRSINRVMLDSRPIHAAKPLTAAVRDAQSKKPRLPVHAVVTGGQPLVRFIGGDQLDDNLALFAPWLQKLPLWEQHHQPYVFIHTPDNSDSPQQAQKIWQKLAEAIPTLPTAPDWPEQETLF

SEQ ID NO: 46402 - DNA, 840 bp, Nocardia farcinica IFM 10152
  CDS (1)..(840): transl_table=11
atgcggcttcacgtgggatgtgcgatgtggacgcatccggcgtggcaggaccggcagatgccctcggcccagcggctgcggtggtacgccgagcgctgcgacgccgtcgagggcaatacgaccttctacgcgattccgtcgccgggcaccgtgcgctcctgggcacagcagaccggcccggacttccggttcgtggccaagctaccgcgcgcgatcacccacgagcgcaggctgaccggggccgccgccgagctgggcgcgttcctcgacgtgctggcgccgctcgggccgcgcctgcacacggtgtggattcagttgcccgcgtcgttcgggcccaccgatctcggcgcgctggccgcgttcctgcgtacgctcccggccggtccgtgccgcgcggtcgaggtgcgccatcgcgccttcttcgacgacgaacgcgccgcggcggcgctcgagcgggtgctcgaccgggcgggcgcggagtggacgatcttcgacaccaccgtcctgttcggcgcaccgccgcgcggccccgccgagcaggaggcgtgggcgaagaagccgcgggtgccccggcgcacccgggcactgaccgcgcacccgatggtgcgctaccacggccgcgacgatcccgccgagaccgtggcgggctggcagccgtggctgcccgtcgtggcgggctggctgcgcgagggccgttcaccgacggtgttcgtgcacacccccgacaacgcgggcgctctcgacctggcccggcgcttccacaccgaggtgcgcgcgctggtgccggagttggacccgctacccgaaccggtcgactccgagcctatgacgctgttctga

SEQ ID NO: 46403 - protein, 279 aa, Nocardia farcinica IFM 10152
MRLHVGCAMWTHPAWQDRQMPSAQRLRWYAERCDAVEGNTTFYAIPSPGTVRSWAQQTGPDFRFVAKLPRAITHERRLTGAAAELGAFLDVLAPLGPRLHTVWIQLPASFGPTDLGALAAFLRTLPAGPCRAVEVRHRAFFDDERAAAALERVLDRAGAEWTIFDTTVLFGAPPRGPAEQEAWAKKPRVPRRTRALTAHPMVRYHGRDDPAETVAGWQPWLPVVAGWLREGRSPTVFVHTPDNAGALDLARRFHTEVRALVPELDPLPEPVDSEPMTLF

SEQ ID NO: 46404 - DNA, 906 bp, Nocardia farcinica IFM 10152
  CDS (1)..(906): transl_table=11
gtgagtctacgacccaccgtccccgcgcccgcaccggaccggtggcgaaccgcccgcgtcccaccgaggaccggccgcgactgcgacgatggaggcatgggcgagatccggatcgggacatcgggctggcggtatccaccgtggcggggcgtgttctacccgccgggcctgccgcaccggcgggagttggcgtacctcgccgagcagctgaccagcgtggagatcaacgggtcgttctactcgctacagcgaccgtcgagctatctgaactgggcggcgcagacaccgcccggcttcgtcttcgccgtcaagggcagcagattcatcacgcacatgaagcggctgcgcgacggcgacgagtccctggccaacttcctcgcctccggcgtcctcgccctcggccccaaactcgggcccatcctctggcagctgccgcccacgttccgctacgaccccgacgtgctggccgcgttcttcgaccggctgccgcgcaccaccgcgcgggccgccgagatcgccgcggggcacgaccaccgcgtccgggagccgcacatcaccgtcgacgccgaccggccgatccggcacgcgctcgagatccggcacccgagcttcctgacaccggagttcaccgacctgctgcgcgccgacgacatcgccctggtgatcgccgacgcggccggcaagtacccgctgatcgaggaggtcaccaccgatttcgtctacatccgcctgcacgggcacgacgagctctacgtcagcgggtacaccgacgacggactggacatgtgggcgagcaagattcgacagtgggcgcgcaccggcgacgtgtacgtgtacttcgacaacgacgccaaggtgatggcgccccgggacgccctcgcgctgcgggaaagggtcgaccgatga

SEQ ID NO: 46405 - protein, 301 aa, Nocardia farcinica IFM 10152
MSLRPTVPAPAPDRWRTARVPPRTGRDCDDGGMGEIRIGTSGWRYPPWRGVFYPPGLPHRRELAYLAEQLTSVEINGSFYSLQRPSSYLNWAAQTPPGFVFAVKGSRFITHMKRLRDGDESLANFLASGVLALGPKLGPILWQLPPTFRYDPDVLAAFFDRLPRTTARAAEIAAGHDHRVREPHITVDADRPIRHALEIRHPSFLTPEFTDLLRADDIALVIADAAGKYPLIEEVTTDFVYIRLHGHDELYVSGYTDDGLDMWASKIRQWARTGDVYVYFDNDAKVMAPRDALALRERVDR

SEQ ID NO: 46406 - DNA, 891 bp, Photobacterium profundum SS9
  CDS (1)..(891): transl_table=11
atgacaattccaactaataggcctctttttctcggcctagctatgtggtctcataaccaatggcagaaaagtttatacggctctggatgtaaaaatagtgatcgtttagcgcgatacgcagaggtatttaatactgtcgagggtaacaccactttttatgcaacgcctgcaattaccacggtaaaaaaatggcatgatgcaaccccgagtgattttcgttttacctttaaattacccagcaccattactcatcaaaatcagctaatgcattgcgatcaacttttagcggattttttaaatgtgatggcccccctggaaagtaaagtggggttatggaaaattcaattacctgccaattttggtcctgatgcattacccgcactcaaaaagtttctacaaaagatccctaaacaccttacttatggtgttgaagtgaggcattacgccttctttaataaaggcgacgctgaaaaaaccttaaatggattgctggtcgagcaccaagccaaccgtattattatggatagccgcccagtgtttgccgccccaccgacctctgaagcggtgattgacgcccatcaaaaaaaaccacatgtacccgtgcatgccattgcaacggctacgcaaccaatgatccgctttattggtcaccctgaagatttaagtaacgaccctttctttgataactggctaacccgattacccaagtggatggcagatggaaaacaaccgtatttattcattcatacacccgacaatgtttttgcaccagagttagccattcgtttatatcaaaaattacaacaacgtattgcgaacagtacattatcattacctgatattgcgcttcctcctgaaccagaagcaagccctcaaattacattactctag

SEQ ID NO: 46407 - protein, 296 aa, Photobacterium profundum SS9
MTIPTNRPLFLGLAMWSHNQWQKSLYGSGCKNSDRLARYAEVFNTVEGNTTFYATPAITTVKKWHDATPSDFRFTFKLPSTITHQNQLMHCDQLLADFLNVMAPLESKVGLWKIQLPANFGPDALPALKKFLQKIPKHLTYGVEVRHYAFFNKGDAEKTLNGLLVEHQANRIIMDSRPVFAAPPTSEAVIDAHQKKPHVPVHAIATATQPMIRFIGHPEDLSNDPFFDNWLTRLPKWMADGKQPYLFIHTPDNVFAPELAIRLYQKLQQRIANSTLSLPDIALPPEPEASPQITLL

SEQ ID NO: 46408 - DNA, 819 bp, Salmonella enterica subsp. enterica serovar Paratyphi A str. ATCC
  CDS (1)..(819): transl_table=11
atgatctacattggcttgccgcaatggtcgcacccgaaatgggcgcggctcggcatcaccagtctggaagagtatgcccgccactttaactgcgtggagggcaacaccacgctttacgcgctgccgaaagcggaaattgtcgatcgctggtatgcgcaaactacggacgatttccgtttttgctttaaatttcccgccaccatttctcaccaggccgctctgcgccattgcgacgatctggtacaggcgttttttacccgcctggcgccgctggaaacgcgtattggccaatactggctgcagttgcccgccgcctttggaccgcgcgatctccccgccttatggcagtttcttgatgcgctccccgccacgtttacctatggcgtagaagttcgtcatccgtgtttttttgacaagggtgaggatgaacagcggctcaatcgcgggttacacgcgcgcggcgtaaaccgcgtgatcctggatagtcgtccggtacatgccgcccatccccacagcgaggccgtccgtgacgcgcagcgaaaaaaacccaaagtcccggtacatgcggtcgtgacggccagccatccgatggtgcgttttatcggtagcgataatatggcgcaaaaccgtgagtttttcgctgcctggttgcagaaactcccgcagtggcggcagaccaccacgccttttctgtttttacatactccggatatcgcgcaggcgccggaactggtgaatacgctttggcatgatttacgcagcgtcttaccggaaatcggcactgctccgtccattccacagcaatcttctcttttctga

SEQ ID NO: 46409 - protein, 272 aa, Salmonella enterica subsp. enterica serovar Paratyphi A str. ATCC
MIYIGLPQWSHPKWARLGITSLEEYARHFNCVEGNTTLYALPKAEIVDRWYAQTTDDFRFCFKFPATISHQAALRHCDDLVQAFFTRLAPLETRIGQYWLQLPAAFGPRDLPALWQFLDALPATFTYGVEVRHPCFFDKGEDEQRLNRGLHARGVNRVILDSRPVHAAHPHSEAVRDAQRKKPKVPVHAVVTASHPMVRFIGSDNMAQNREFFAAWLQKLPQWRQTTTPFLFLHTPDIAQAPELVNTLWHDLRSVLPEIGTAPSIPQQSSLF

SEQ ID NO: 46410 - DNA, 873 bp, Synechococcus elongatus PCC 6301
  CDS (1)..(873): transl_table=11
atgcctagtcctgtgactgatcgattttggttgggctgtgctgtgtgggcctatcgcaactgggtcggttccttctatcccccaggaacaggtagtgatgcattcctgcgctgctacggcgaacgcctgacggcggtggaaggcaacaccactttctactcgattccctcgaccgaaactgtccaacgctggcgtcaagaaacgcccgatcgcttccgcttctgtctgaagttgccgcgatcgctcagccatgccggtcccttggccgcccaaattgaagccgcggcggctttccgtcggcaactgcaacccctgggtgatcgcctcggccctgcctttctgcaactgccgccccgctatggtcccggtgcgatcgccgatctctcccagtttctggctgcttggccggtagttcaatggcccttggccgttgaaccccgtcatcccgactggttccagccccagccgcgtcaagcgctcaatcaattgttgcaacgctatggctgtggccgagtcctgctcgatacccgtcctgtttataacggtgtagatgatccccaagtgacgagtgatcgccgcaaacctcagctaccgctgcatccagatgtgatcggagagtacgccttagtgcgcttcatcagccatcccgatcgcgatcgtaatccggcttacctcgcggaatggcaggagcggatccgccactggctcgcgcagggaatcacggtctatttctttgtccactgcccccaagaaatttactcgcctgccactgcgatcgccttccaagcgcagctagagagggctgggatccccatcctgtctctcccgactccaccggctcctgcccaacagcagttgagcctcttctcctga

SEQ ID NO: 46411 - protein, 290 aa, Synechococcus elongatus PCC 6301
MPSPVTDRFWLGCAVWAYRNWVGSFYPPGTGSDAFLRCYGERLTAVEGNTTFYSIPSTETVQRWRQETPDRFRFCLKLPRSLSHAGPLAAQIEAAAAFRRQLQPLGDRLGPAFLQLPPRYGPGAIADLSQFLAAWPVVQWPLAVEPRHPDWFQPQPRQALNQLLQRYGCGRVLLDTRPVYNGVDDPQVTSDRRKPQLPLHPDVIGEYALVRFISHPDRDRNPAYLAEWQERIRHWLAQGITVYFFVHCPQEIYSPATAIAFQAQLERAGIPILSLPTPPAPAQQQLSLFS

SEQ ID NO: 46412 - DNA, 852 bp, Bacillus clausii KSM-K16
  CDS (1)..(852): transl_table=11
gtgatttacataggtttaagcggctggggtgaccatcatcgcttatacgaaggcgtaaagccagcagagaagttgcaaacgtatgcgggctattttccgattgtggagttggatgcctcgttttatgccgttccaccccaatcgtcgatccgaaaatggttagacgagacgccggcatcctttcagtttgttgtcaaagcgtatcaggaaataacaggacatcagcggggagagtcgccttctccttttcaatcgaagcaagagatgttttctgcatttatagaatcaatccaaccgatggcggaagcaggcaaactagcgatggttttatgccagtttcccccttggtttgatgttcagaaaaaacacgttgcttggcttcgtgtagtgcgcgaacagttgaaagattttccggtcgcgcttgaattcaggcatgaatcgtggtttctgcctgcttaccgtgagaaaacgctcgcgttgatgcgcgaggaaaattggattcacagcatttgtgatgaaccgcaagccggggcacgctcgattccaactgtgctcgagccaaccgaccgccaaaagacattggttcgtatgcatggacgcaatgtccatggttggaatgggccgagcaaagggcaagaatggcgtgatgttcgttatttgtatgattacaacgaacgggagcttgctgaatggaaaacgcgccttcagtcgctgcgacaacaatgtgagcacatttatgtggtttttaacaacaattctggcggtcatgccgcccaaaacgctcgcgcgttgatcgagatgatgggcatcgaatatacggacctggcgccaagacagttggatttattttaa

SEQ ID NO: 46413 - protein, 283 aa, Bacillus clausii KSM-K16
MIYIGLSGWGDHHRLYEGVKPAEKLQTYAGYFPIVELDASFYAVPPQSSIRKWLDETPASFQFVVKAYQEITGHQRGESPSPFQSKQEMFSAFIESIQPMAEAGKLAMVLCQFPPWFDVQKKHVAWLRVVREQLKDFPVALEFRHESWFLPAYREKTLALMREENWIHSICDEPQAGARSIPTVLEPTDRQKTLVRMHGRNVHGWNGPSKGQEWRDVRYLYDYNERELAEWKTRLQSLRQQCEHIYVVFNNNSGGHAAQNARALIEMMGIEYTDLAPRQLDLF

SEQ ID NO: 46414 - DNA, 852 bp, Xanthomonas oryzae pv. oryzae KACC10331
  CDS (1)..(852): transl_table=11
gtgatcgtgatgcacacgacatcctggcgcgcgtacctgcatggagtgctgccatcctcgcctcgcctgcccgctcgcccatccagtgcagttgcacgcgtgcgttgtggttgcgcaggcgggtccatgtccgccgccgaccacgcgcaggtcggccagggcgccagcgtgttgcagcgctacgccacgcgcgtcgatgcagtggaaatcaactcctcgttttatcgtccgcatcgcgccagcacctacgcgcgctgggccgacagcgtgctggaggatgttcgtttttcggtcaagctgccgcgcagtatcagccacgacgcgtggctgcacggcaccgggccgctgctggatgctttcctcgcgcaggtcggtgcactggggacgcggttgggctgcctgttgctgcaactgccacccagcgctgtcttcgatgcagcggtggcagccagattccttgcgatgctgcgccggcgctgggatgacggcgtggtctgcgagcggcgccacgcgagctggtttgccgcgcccgcacaggccctgctggaacgccaccgcattgctcgctgcgccgccgacccggcgccgttgtccgcggctgccatcccgcgcccggttgccgcgccgtcgtatcggcgctggcatgacgcgccgcgcatctactaccgcagctacgacgagaccgcgttgcaggcgttggccgctgcggtgcgcgccggcccacccagcaacgcgcagccgctggccgaacgctgggtgatcttcgacaacagcgcggccggctgcgcgacatccaatgcgctggaattgcagcgcttgctgggcatcgagcgcaagcgccaacgcgggtag

SEQ ID NO: 46415 - protein, 283 aa, Xanthomonas oryzae pv. oryzae KACC10331
MIVMHTTSWRAYLHGVLPSSPRLPARPSSAVARVRCGCAGGSMSAADHAQVGQGASVLQRYATRVDAVEINSSFYRPHRASTYARWADSVLEDVRFSVKLPRSISHDAWLHGTGPLLDAFLAQVGALGTRLGCLLLQLPPSAVFDAAVAARFLAMLRRRWDDGVVCERRHASWFAAPAQALLERHRIARCAADPAPLSAAAIPRPVAAPSYRRWHDAPRIYYRSYDETALQALAAAVRAGPPSNAQPLAERWVIFDNSAAGCATSNALELQRLLGIERKRQRG

SEQ ID NO: 46416 - DNA, 864 bp, Pseudomonas syringae pv. syringae B728a
  CDS (1)..(864): transl_table=11
gtgtctcgtctgccttactacctcggttgtccgtcatggagtgaaaacgcctggcgcgattcgctgtaccccgaaaatgcccgccccaatgatttcctgaacctctacactcaggtgttcaacgctgtcgaaggcaacaccacgttctatgcccgtcccgccgccactacggtgcagcgctgggcagaaataatgcccgacgattttcgcttcaccgccaaattccataaagacatcagtcacaacggcgaccttcgtgagcaggtgggcgccgctgaggaattcattcgcctgctcgcgcctctgggcgggcggatcgcgccgttctggctgcagttgccggccagcttcacgcccccgcgtctggccgagctggccggttttcttgacgagctcaaggtgtctgtagcagtggaagtgcgcaacatggctttcttcatgaaaggtgacgaagagcgcatgctcaatcgcctgttgctggatcgaggcgtcgagcgcatctgccttgattcgcgggcattgttcagctgtgtctcgagtgatcctgcagtcctgcacgcccaatcgaaaaagcccaaggtgccgcctcgtccggcttcgctgacgctgtttcctcaagtgcgcttcatcggcggtccggaccttgaggccaacgatcagtttctgctgcagtgggtggaaaaggtcgccgtgtggattgaagaggggcgcacgccgtatgtcttcctgcacactccggacaacatcagggctgccgagcaggccatgcgctttcaccagcaactgatggcgcgattgccgggcttgccggcattgttcgaactggatcgcgggcctcaggtggaacagttgggcttgctctga

SEQ ID NO: 46417 - protein, 287 aa, Pseudomonas syringae pv. syringae B728a
MSRLPYYLGCPSWSENAWRDSLYPENARPNDFLNLYTQVFNAVEGNTTFYARPAATTVQRWAEIMPDDFRFTAKFHKDISHNGDLREQVGAAEEFIRLLAPLGGRIAPFWLQLPASFTPPRLAELAGFLDELKVSVAVEVRNMAFFMKGDEERMLNRLLLDRGVERICLDSRALFSCVSSDPAVLHAQSKKPKVPPRPASLTLFPQVRFIGGPDLEANDQFLLQWVEKVAVWIEEGRTPYVFLHTPDNIRAAEQAMRFHQQLMARLPGLPALFELDRGPQVEQLGLL

SEQ ID NO: 46418 - DNA, 735 bp, Pseudomonas syringae pv. syringae B728a
  CDS (1)..(735): transl_table=11
atgccgccagtttatatcggttgtgcaggctggagccttgcgcgtgagtactggcccgactttcctgaacaaggcagccatttgcaacgctatgcttcgcgcttcaacgcggtcgagatcaacagctcgttctatcgccctcatcgcgctcagacctacgcacgctgggcgcaggcggtgcccgccgggtttcgcttctcggtcaagatgccgaaactcattacccacgaacaccgactgcgcgagtgcgagaccgttctgaccacgttcctttctcaatgcactgcgctgggtgacaaactgggctgtctgctggtccagcttccgccctctctggactatgcaccgcaggtagctgagaggtttttcagagcattacgcaatcagtacgccggcagcgtggtattggaaccgcgccatgaatcctggcggcaggctcaggcgctgctgatcgagcatcgcattgcgcaggtagccgccgatccgtcagtaatcagtgaagggcacttgcccggtgggtggcagggtgctcactactggcgcctgcacggtgcgccgaaaatttatcacagtgcctattccgtcgagcatctggaaggtttggctgggcgagcgtcggcgtctgtggcgcgggaaatcgagacctggtgcatctttgacaatacggccagcggagccgccgtccgtgacgcgctcgcgctgcaggcactggttgagcgcaacagggctgggtaa

SEQ ID NO: 46419 - protein, 244 aa, Pseudomonas syringae pv. syringae B728a
MPPVYIGCAGWSLAREYWPDFPEQGSHLQRYASRFNAVEINSSFYRPHRAQTYARWAQAVPAGFRFSVKMPKLITHEHRLRECETVLTTFLSQCTALGDKLGCLLVQLPPSLDYAPQVAERFFRALRNQYAGSVVLEPRHESWRQAQALLIEHRIAQVAADPSVISEGHLPGGWQGAHYWRLHGAPKIYHSAYSVEHLEGLAGRASASVAREIETWCIFDNTASGAAVRDALALQALVERNRAG

SEQ ID NO: 46420 - DNA, 792 bp, Xanthomonas campestris pv. campestris str. 8004
  CDS (1)..(792): transl_table=11
gtgtccacctccgcaccgcccccgcagcccgctgccaccgccctgccacgggtgtattgcggctgcgcgggctggtcgattcccgcagccgagcgcgcacagttcggcgccggcagcagcgtgctgcagcgctatgccacgcgcctgaatgcagtggagatcaactcctcgttctatcgcccgcatcgcacgtcgacctacgcgcgttgggccgacagcgtgccgacgcacttccgcttctcggtcaagctgccgcgcagcatcagccacgatgcgcgcctgcaccaggccggtccattgctggatgcgttcctggcgcaggcgggcgcgctgggcgagcgcctgggctgcctgctgctgcagttgccgcccagtgcggtgttcgatgcacgcgtggcggccagcttctttgccgtcctgcgccggcgctgggacggcgcagtggtgtgcgagccgcgccatcccagctggttcaccgcccaggcgcaggcgctgctgcaccgccaccgcatcgcgcggtgtgcggccgacccggcaccggtgcctgccgccgcgctgcccgacgcgccaggcatgcccggcgcgccggcatattggcgctggcacggcacccccaaggtctattacagcggatacgacaacgccgccttgcagcgcctggcggccgcggtccgcagcggcatggccgcgcatgcggcgaacgagcagtgggtgatcttcgacaacaccgctgccgggctggccgtgcccaatgccttgcagctgcagaagctgttgggaatcggccgctag

SEQ ID NO: 46421 - protein, 263 aa, Xanthomonas campestris pv. campestris str. 8004
MSTSAPPPQPAATALPRVYCGCAGWSIPAAERAQFGAGSSVLQRYATRLNAVEINSSFYRPHRTSTYARWADSVPTHFRFSVKLPRSISHDARLHQAGPLLDAFLAQAGALGERLGCLLLQLPPSAVFDARVAASFFAVLRRRWDGAVVCEPRHPSWFTAQAQALLHRHRIARCAADPAPVPAAALPDAPGMPGAPAYWRWHGTPKVYYSGYDNAALQRLAAAVRSGMAAHAANEQWVIFDNTAAGLAVPNALQLQKLLGIGR

SEQ ID NO: 46422 - DNA, 900 bp, Xanthomonas campestris pv. campestris str. 8004
  CDS (1)..(900): transl_table=11
atgagcatccgcatcggcatttcgggctggcgttatgcacgctggcgcggcacgttctacccgaccggcctggcccagcggcgcgagttggcctatgccgggcgctgttttcccagcgtggaaatcaatggctcgttttattcgctgcaacgcccggagagctaccagagctggcatgacgagacgccggacgacttcgtcttcgcggtcaaaggcccgcgttttgtcacgcatatgaagcggctgcgcgattgcgaacaggcgctggccaacttctttgcatccggcgtgctgcggctgggcgagaagctggggccgatcctgtggcaattgccgccaaccctgcgcttcgatgacgcggtgttggatgcatttctctccagcctgccgcgcgatacagaggcagcactcgccctggcgcgcaaacgcgataccaccttgatgcatgggcgtacggccctgagcatcgatcgcaagcgcccgctacggcatgcgctggagatgcgccaccccagcttctgcgacccgtcctgcatgaagctgctgcgcaagcacaaggtgggcgtggtggtggccgataccgctggcaaatttccgtatctcgaagatgtcaccgctgacttcgtctacctgcggctgcatggcgacgcgcaactctatgccagcggctacagcgaccacgccctggaccgctggggcgagcggattgcggcctgggctgcaggcggtgagccctccgacgcccagcgtgtcgggccgcgcgccagcaagcgcgcacggcgcgacgtgtactgctacttcgacaacgacatgaaggtgcatgcaccgttcgatgcgcgcggcctgatgcagcgtttggacctgcccaccgactgcccggcgcgcgaggaggtcgtgtaa

SEQ ID NO: 46423 - protein, 299 aa, Xanthomonas campestris pv. campestris str. 8004
MSIRIGISGWRYARWRGTFYPTGLAQRRELAYAGRCFPSVEINGSFYSLQRPESYQSWHDETPDDFVFAVKGPRFVTHMKRLRDCEQALANFFASGVLRLGEKLGPILWQLPPTLRFDDAVLDAFLSSLPRDTEAALALARKRDTTLMHGRTALSIDRKRPLRHALEMRHPSFCDPSCMKLLRKHKVGVVVADTAGKFPYLEDVTADFVYLRLHGDAQLYASGYSDHALDRWGERIAAWAAGGEPSDAQRVGPRASKRARRDVYCYFDNDMKVHAPFDARGLMQRLDLPTDCPAREEVV

SEQ ID NO: 46424 - DNA, 858 bp, Pseudomonas fluorescens Pf-5
  CDS (1)..(858): transl_table=11
atgctgccttatttcctcggttgtccttcctggagcgaaaacgcctggcgtgagtacctgtacccggaagacgcccggcccaatgatttcctcggcctgtattgccaggtcttcaacgccgtcgaaggcaataccaccttctatgcacggccggcgcccggaaccgtgcagcgctgggccgagatcatgcccgagcactttcgctttaccgccaagttccccggtgacatcagtcacggcggcgacctgcgcgagcagttgagcgccgctgagtcctttatccagctgctcagccccctgggtgagcgggtgtcgccgctgtggctgcaattgccggccagcttcgcgccccagcgtctggcggaactggccgggttcatcgatggcctggagcggccgctggcggtggaagtgcggcacccggagttcttcaccaagggcgatgccgagcgcatgctcaaccggctgctgcgcgagcgtggcgtggaacgcatctgcctcgacccgcgggccctgttcagttgcacgtcgaccgctcctgcggtgctgcatgcgcagtcgaaaaagcccaaggtgccaccgcgccccgcagccttcacccagtttccccaggtgcgcttcatcggtcatccggagcttgaggccaacgatcctttccttgaaccctggatcgacaaggtcgccggttggatcgaagaggggcgtacgccctacgtgttcctgcacacttcggacaaccgtctggcggctgaactggcgcggcgttttcacgcccggctgatgcaacgtttgcctggcttgcccgcattgcctgagttatacagagagcccgctgcggagcaactcggcttgctctga

SEQ ID NO: 46425 - protein, 285 aa, Pseudomonas fluorescens Pf-5
MLPYFLGCPSWSENAWREYLYPEDARPNDFLGLYCQVFNAVEGNTTFYARPAPGTVQRWAEIMPEHFRFTAKFPGDISHGGDLREQLSAAESFIQLLSPLGERVSPLWLQLPASFAPQRLAELAGFIDGLERPLAVEVRHPEFFTKGDAERMLNRLLRERGVERICLDPRALFSCTSTAPAVLHAQSKKPKVPPRPAAFTQFPQVRFIGHPELEANDPFLEPWIDKVAGWIEEGRTPYVFLHTSDNRLAAELARRFHARLMQRLPGLPALPELYREPAAEQLGLL

SEQ ID NO: 46426 - DNA, 864 bp, Pseudomonas syringae pv. phaseolicola 1448A
  CDS (1)..(864): transl_table=11
gtgtctcgcctgccttactacctcggttgtccgtcatggagtgaaaacgcctggcgagactcgttgtacccggaagacgcccgccccaatgatttcctgaatctctacactcaggtattcaacgctgtcgaaggcaacaccacattctatgcccgtcccgctgccacaacggtgcaacgctgggcggaaataatgcctgccgattttcgtttcactgcgaaatttcacaaagacatcagccacaacggcgacctgcgtgatcaggtgggtgccgccgaggaattcatccgtctgctcgcgccgttgggtgagcggattgcgccattctggcttcagttgcccgccagcttcacaccgcagcgccttgccgagttggtcgggttcctcgatgaactcaatgtgcctttggctgtggaagtgcgcaacatggcctttttcatgaaaggtgacgaagaacgcatgctcaaccgcctgctgctggatcgaggcgtcgagcgcatctgtctcgacccccgggcattgttcagctgtgtatcgagcgatcccgcagtcctgcacgcgcaatcgaaaaagcccaaggtgccgcctcgtccggctgcgctgacgctgtttccccaggtccgtttcatcggcggtcctgacctggaggccaatgatcagtttttggtgcagtgggtggaaaaggtcgccgtgtggatcgaagaggggcgcacgccttatgtcttcctgcacaccccggacaacgtcagggctgccgagcaggccatgcgctttcaccagcaactgatggcgcgattgcctggcttgccggcattgtttgagctggatcgtgggcctcaggtggaacagttgggcttgctctga

SEQ ID NO: 46427 - protein, 287 aa, Pseudomonas syringae pv. phaseolicola 1448A
MSRLPYYLGCPSWSENAWRDSLYPEDARPNDFLNLYTQVFNAVEGNTTFYARPAATTVQRWAEIMPADFRFTAKFHKDISHNGDLRDQVGAAEEFIRLLAPLGERIAPFWLQLPASFTPQRLAELVGFLDELNVPLAVEVRNMAFFMKGDEERMLNRLLLDRGVERICLDPRALFSCVSSDPAVLHAQSKKPKVPPRPAALTLFPQVRFIGGPDLEANDQFLVQWVEKVAVWIEEGRTPYVFLHTPDNVRAAEQAMRFHQQLMARLPGLPALFELDRGPQVEQLGLL

SEQ ID NO: 46428 - DNA, 930 bp, Ralstonia eutropha JMP134
  CDS (1)..(930): transl_table=11
atgtcagcacataccgcggtgaagtccactgccgcgccagcttcgcagcgcaagaccggttcgccgggaacaggcggaccgctgatacgcgtcggcatcggcggatggacctacgcgccgtggcgcgacaatttctatccggccgggctcgcgcagacgcgtgaactcgaatatgcgagccgccacctgacggccatcgagatcaacagcacctatcacggcacgcagaagcgcacgtcgttcgccaagtggcgagacgagacgcccgatgacttcgtattctcggtgaaggcctcgcgctttgccaccaaccgccgtgtgctggcggaatcgggcgagtcgattgcgcgctttatcgacagtggcattgcggaactcggcccgaagctcgggccgctggtctggcagttcgcaccgaccaagcagttcgatgccgaagacttcgaagccttcctgcagttgctgcccgattcggtggagggcgtgacactgcgccacgtgctggaggtccggcatgacagtttcctgtcgccggactacctgaagctggcgcgcaagtacaaagccgcgacggtgtacaccgactcgcccaagtttccatcgatggctgacctgagcagcgactttgtctacgcgcgcctgatggacagcagcgaaaagctgacgaccggctacgggccaaaggcgctggacacgtgggccgagcatgcgcgcacgtgggccgcgggcaaggcgccggcaaatctggagcagttggaggacaagcagccggctgcgaagcggcgcgaagtctttatcttcttcatcaacggcgccaaggagcgcgccccggcggccgctcaggcattgctgtcgcgccttggctgggaaccccaggaacaggtaccggcgaaggtgtcggcgaaggttccggcaaagaagcgtgcctga

SEQ ID NO: 46429 - protein, 309 aa, Ralstonia eutropha JMP134
MSAHTAVKSTAAPASQRKTGSPGTGGPLIRVGIGGWTYAPWRDNFYPAGLAQTRELEYASRHLTAIEINSTYHGTQKRTSFAKWRDETPDDFVFSVKASRFATNRRVLAESGESIARFIDSGIAELGPKLGPLVWQFAPTKQFDAEDFEAFLQLLPDSVEGVTLRHVLEVRHDSFLSPDYLKLARKYKAATVYTDSPKFPSMADLSSDFVYARLMDSSEKLTTGYGPKALDTWAEHARTWAAGKAPANLEQLEDKQPAAKRREVFIFFINGAKERAPAAAQALLSRLGWEPQEQVPAKVSAKVPAKKRA

SEQ ID NO: 46430 - DNA, 915 bp, Nostoc punctiforme PCC 73102
  CDS (1)..(915)
atgaatttacaaccaacctgtaaaattgaatatgatacatcaaggcttttaggcgttgtgaacttttttattggttgtgctgtttgggcatataaaggttgggtgggcgaactttacccccaaggtactcgcaccgccgattttctccatctctacagtcgtcgcttcaccactgtagaaggtaacaccaccttttatgctgtgcctaatcaagaaactgtaacccgttgggctgccgaaaccccagcaggttttgaattttgtctaaaattaccgcgagatattacccatcaagggttgctacaaccttatattccggcggctttaaaatttctggaagggatgcgccctttaggtaagcatcttggcccaatatttgcccagttaccacctagttatgcacctgcattgtttgacgatttgaccaactttctggaagcttggccgcgcacagatgcacccctagccctggaagttcgtcatcccgattggttcagagaaccccatgctagtaatttgacagcgcttttacaaaagctaggtgtaggacgggtacttttagactcgcgccccatttacactggagatgatgacccccagttacaatcagaacgacgtaaacctaaattaccgttgcaattgagtgtgacagcaccttttactctgattcggtttatttcccatccaaatttatcagtgaatcagccgtttatggaagagtgggtaaggcagattcagcaatggttacaggcgggagtgcgaatttatttctttgttcattgtccaatagaagcgcgatcgcctaacatagcgcgtcatttccaacagctattagaacagagtgatacaccagttccacccttaccttggaataaccttgagcatccacccaatcaactgagtttatggtcttga

SEQ ID NO: 46431 - protein, 304 aa, Nostoc punctiforme PCC 73102
MNLQPTCKIEYDTSRLLGVVNFFIGCAVWAYKGWVGELYPQGTRTADFLHLYSRRFTTVEGNTTFYAVPNQETVTRWAAETPAGFEFCLKLPRDITHQGLLQPYIPAALKFLEGMRPLGKHLGPIFAQLPPSYAPALFDDLTNFLEAWPRTDAPLALEVRHPDWFREPHASNLTALLQKLGVGRVLLDSRPIYTGDDDPQLQSERRKPKLPLQLSVTAPFTLIRFISHPNLSVNQPFMEEWVRQIQQWLQAGVRIYFFVHCPIEARSPNIARHFQQLLEQSDTPVPPLPWNNLEHPPNQLSLWS

SEQ ID NO: 46432 - DNA, 729 bp, Nostoc punctiforme PCC 73102
  CDS (1)..(729)
atgaataaactaaaaattggtactagtggttgggtttataaacattggatggatattttctatccaccaaatttacctagcgaccagcaactatcattttacgcccaacattttgctactgtagaaattaacttttccttttatcgtttgccagaacggtctgtctttgagacttggcacaagcaaacaccctctaactttctctttgctgttaaaggtagccgctatctcacccacatgaagaagttaaaagacccgatagagccactatctcgcataatggaacgcgcatctggactgcaagaaaagctcggccctattttatttcaatttcctcatacttggcatattaatattgaacgtcttcagccctttttagaattgctgcaaacctatccaaaacaaaaatttacagttgaatttcgtcattcaagctggctgattccacaagtttatcaactactagaaactgcgggtgtaggcctttgtctacctgtcagcccaacagttccccttgatatctgtttgactgccccttggacttatatccgtatgcacagtgggcaatggaatgtaggttataccgatgaagagctatctacatgggttgaacgtatccgttcatttctaatgcaggaaattgacgtttacgtgtatttcaacaacgaccccgatggaaacgctattcgtgatgctcaacgactctattgtttgctgggatcttgttga

SEQ ID NO: 46433 - protein, 242 aa, Nostoc punctiforme PCC 73102
MNKLKIGTSGWVYKHWMDIFYPPNLPSDQQLSFYAQHFATVEINFSFYRLPERSVFETWHKQTPSNFLFAVKGSRYLTHMKKLKDPIEPLSRIMERASGLQEKLGPILFQFPHTWHINIERLQPFLELLQTYPKQKFTVEFRHSSWLIPQVYQLLETAGVGLCLPVSPTVPLDICLTAPWTYIRMHSGQWNVGYTDEELSTWVERIRSFLMQEIDVYVYFNNDPDGNAIRDAQRLYCLLGSC

SEQ ID NO: 46434 - DNA, 789 bp, Pseudomonas aeruginosa UCBPP-PA14
  CDS (1)..(789)
ttgcgttccgccgactacctcggacactacggcggcatcttcaacgcggtcgagggcaataccaccttctatgcccggccttcggcggaaaccgtgcggcgctgggccgagacgatgccggcggggttccgcttctgtgccaagtttccccgcgatatcagtcacgaaggcgacctgcgcgaacggctcggggccgccgacgacttcctcgaactgctggcgccgcttggcgaaagggtcagcccgctgtggctgcaactgtcggcggcgttcaccccgcagcgcctgggcgaactgctgtatttcctcgatgagctgagtccgcgacggattgccgtggaagtacgccacccggcgttcttcgacaaaggcgaggacgagcgcctgctcaaccgccacctgcgcgagcgtggcgtggagcgcatctgcctggattcgcgggcgctgttcagttgccgttcggacgatccggcggtgctccacgcccagtcgaagaagccgcgcctgccgatccgtccggcggccttcagcgatacgccacaggtgcgtttcatcggcggtcccgacctgccggccaacgaggtgttccttttgccctgggtcgacaaggtggccgactggatcgaggccggcctgactccatacgtattcctgcatacccccgacaatcacctggcggcccagcaggcccagcgtttccatgcgctgctgggccagcgcctgccaggcttgccggcgctacccgagccgatcccggccccggaagtggagcaactgggcctgctctga

SEQ ID NO: 46435 - protein, 262 aa, Pseudomonas aeruginosa UCBPP-PA14
MRSADYLGHYGGIFNAVEGNTTFYARPSAETVRRWAETMPAGFRFCAKFPRDISHEGDLRERLGAADDFLELLAPLGERVSPLWLQLSAAFTPQRLGELLYFLDELSPRRIAVEVRHPAFFDKGEDERLLNRHLRERGVERICLDSRALFSCRSDDPAVLHAQSKKPRLPIRPAAFSDTPQVRFIGGPDLPANEVFLLPWVDKVADWIEAGLTPYVFLHTPDNHLAAQQAQRFHALLGQRLPGLPALPEPIPAPEVEQLGLL

SEQ ID NO: 46436 - DNA, 861 bp, Pseudomonas fluorescens PfO-1
  CDS (1)..(861)
atggatctgccttactacctcggttgcccgtcctggagcgaaaacgcctggcgcgagtacctgtatccggtagacgccaagacctccgatttgctcggactctattcgcaagtattcaacgccgtggaaggcaacacgaccttctacgccagcccgtcgccggccaccgtgcagcgctgggccgaggtgatgccggaacactttcgcttcaccgccaagttccccggtgacatcagccacagcggcgacttgcgcgatcaactgaccgccgccgaaaccttcctccagttgctcaagccgctcggtgagcgtgtctcgccaatgtggctgcaactgtcgaaaagcttcacgccacaccgcttgccggagcttgctgcgttcatcgatgcgctggattgcccgctggcggtggaagtgcgccacgaacaattcttcgccaagggcgagagtgagcgactgctcaaccggctgttgctggatcgcggcgtggagcgtatctgtcttgatccccgcgcgttgttcagttgcctgtccaccgaatcgtcggtgatccacgcccaatcgaaaaagccccgcgtaccgacgcggccggcagcgttcactcaattcccgcaggtgcgcttcattggccatccggagcttgaggccaacgatccgtttctggtgccgtgggtggcgaagatcgccgagtggatcgaagaggggcgcacgccgtacatcttcctgcacaccgccgacaacattcttgcggcgaagctggcgcaacgttttcacgcacaactgatgcaacgtttgcctggcctgccgtccctgcctgagctatacagagaacccgccgccgagcaacttggcctgctctga

SEQ ID NO: 46437 - protein, 286 aa, Pseudomonas fluorescens PfO-1
MDLPYYLGCPSWSENAWREYLYPVDAKTSDLLGLYSQVFNAVEGNTTFYASPSPATVQRWAEVMPEHFRFTAKFPGDISHSGDLRDQLTAAETFLQLLKPLGERVSPMWLQLSKSFTPHRLPELAAFIDALDCPLAVEVRHEQFFAKGESERLLNRLLLDRGVERICLDPRALFSCLSTESSVIHAQSKKPRVPTRPAAFTQFPQVRFIGHPELEANDPFLVPWVAKIAEWIEEGRTPYIFLHTADNILAAKLAQRFHAQLMQRLPGLPSLPELYREPAAEQLGLL

SEQ ID NO: 46438 - DNA, 882 bp, Cytophaga hutchinsonii
  CDS (1)..(882)
atgcaattcggaaaaacagatactcctgaagatattgattttacgttacctaaagatcatccggacactaaaaagattctctcggaagcaaagcccggcaagcattttaacgtgtatgtaggttgtgctaaatggaacaaaaccgatctgaaaaacttttacccaaaaggcacaaaagacgaactgcagtattatgcgacgcagtttaacagcatagaactgaatgctacgttttataagtctccctctaaagatcaggtgcagacatggaaagcgaaagcagccaaaggatttaaattcttccctaaaatacccaataccatcagtcattttaagcggttggttggcgtagaaacaatcgtggaggaattttgcgatgcggttgtgttgtttgaagaaaatctcggtatgagctttttacagatgcacgataacttcaaaccaaaagatatggataagcttgatgcgttcctgaaaaagtttccggcttctgtacctttagctgtagagctgcgaaacgaagaatggtattcggataaaaacgtacaggatgatctgcacgcgatgctggttaaatataaaaagacatttgtgcttgttgatactgccgcgcgcagagatatcatgcacatgcgcttaacgtcagataaagcatttatacgttatgtaggagctaatcacgaaagcgattatgcgcggctggatgattggatcaaacgtattaaaacctggcgtaaagaaggattaaacgaactatatttctttgtacaccagaatgtagaactggaatcacccttgctttctgcttattttattgaaaaaatgaataaggaatttgatctggatttaactgttccgcaaacaataaaaaagaaacagtag

SEQ ID NO: 46439 - protein, 293 aa, Cytophaga hutchinsonii
MQFGKTDTPEDIDFTLPKDHPDTKKILSEAKPGKHFNVYVGCAKWNKTDLKNFYPKGTKDELQYYATQFNSIELNATFYKSPSKDQVQTWKAKAAKGFKFFPKIPNTISHFKRLVGVETIVEEFCDAVVLFEENLGMSFLQMHDNFKPKDMDKLDAFLKKFPASVPLAVELRNEEWYSDKNVQDDLHAMLVKYKKTFVLVDTAARRDIMHMRLTSDKAFIRYVGANHESDYARLDDWIKRIKTWRKEGLNELYFFVHQNVELESPLLSAYFIEKMNKEFDLDLTVPQTIKKKQ

SEQ ID NO: 46440 - DNA, 849 bp, Pediococcus pentosaceus ATCC 25745
  CDS (1)..(849)
atgattcagattggactaagtacttgggccgatcatccagctttatcggttgaaggtaaacctaaatcaacgctagaagaatatgtaggccactttccgattgtggaagtggacagttctttttatgctattccatcgttgtccaatgtcgtcaattggcaacatcaagtcccagataattttaaattcatctttaaagcttctcgggttatgaccctccacgacggcgttgatggggatgaatatttaacaccagaacgacgaatagaatttactaactttaaaaaggtaatgcagcctttaatccaaaatggacagttggaatctgtattattccaatttccaccttcgtttcgatgtgatttgactaatatccgctacttatttgaaattcgccaaatgatggatcgaattccgattagtgttgagttcagaaatcccagttggttcatagaggcagtcgaatcggacactttatcatatttggagcgccttaaaatgataaatgtaattgtcgatgagccgtttgacggcaaccaagggatgcctttggtacttcaagtgactagtgctaaaaaagccatgtttcgtttgcacggacgtaatgctcagggatggtttacgagtggcaaagaatggcggaaagaacgcactaattatcgttattctacggatgaattaacggagttagcacagtgggttaaggcagtatctgaacgagttgaagaagtaaccattattttcaataataatggaaaccatgatgctgtcgataatgcgaaagagttgcaaaaaatcttaggaattcgctttgagggtctaggtccagttcagatggatttgttttga

SEQ ID NO: 46441 - protein, 282 aa, Pediococcus pentosaceus ATCC 25745
MIQIGLSTWADHPALSVEGKPKSTLEEYVGHFPIVEVDSSFYAIPSLSNVVNWQHQVPDNFKFIFKASRVMTLHDGVDGDEYLTPERRIEFTNFKKVMQPLIQNGQLESVLFQFPPSFRCDLTNIRYLFEIRQMMDRIPISVEFRNPSWFIEAVESDTLSYLERLKMINVIVDEPFDGNQGMPLVLQVTSAKKAMFRLHGRNAQGWFTSGKEWRKERTNYRYSTDELTELAQWVKAVSERVEEVTIIFNNNGNHDAVDNAKELQKILGIRFEGLGPVQMDLF

SEQ ID NO: 46442 - DNA, 939 bp, Pseudomonas aeruginosa UCBPP-PA14
  CDS (1)..(939)
atgagcgcaccggcacgcctgcgcatcggcatttccggctggcgctacgccccctggagaggtgacttctatcccgaggggctgcgccagaaggacgaactgcgcttcgcctcgcgggcggtgaacagcatcgagatcaacggcaccttctacgccctgcagacgcccgagcgcttccgcggctgggccgaggacacccccgaggacttcgttttcagcgtcaaggccccgcgttacatcacccacgtgcggcgcctgcgcgagatcgacgagccgctggcgaacttcttcgcctccggccccctcgccctgcgccagcgcctcggcccgttcctctggcagttcccgccgagcatgcgcttcgaccgcgagctgttcgccgacttcctcgcccgcctgccgcgcgacggcgccgccgcgcagaagctcgcccggcacagcgccgcgcgcctgcaccgcgagggctacctcgacggcgatccggcgcagcgcctgcggcatgccgtggaaatccgccatgagagcttcgtcgacccgacgttcatcgagctgctgcgcgaataccgggtggccctggtggtggccgataccgccggcaagtggccgctgctcggcgacgtctgcgccgacttcctctacctgcgcctgcatggcgacaaggagctgtaccgcagcggctactcggaagcggccctgggccagtggcaggcacggatccacgcctgggccagcggcggccaggccgacgacctgcgccgggccagccaggacgcaccggcgaaggcgacggcgcgcgacctgtactgctacttcgacaacgacgtcaaggtgcgcgcaccttacgacgcccggcgcctcctgcagctgctggaactcgacggcagcctgcgcacggtgcccggacagttgcccgatgacctgcgggagagtgccgcatga

SEQ ID NO: 46443 - protein, 312 aa, Pseudomonas aeruginosa UCBPP-PA14
MSAPARLRIGISGWRYAPWRGDFYPEGLRQKDELRFASRAVNSIEINGTFYALQTPERFRGWAEDTPEDFVFSVKAPRYITHVRRLREIDEPLANFFASGPLALRQRLGPFLWQFPPSMRFDRELFADFLARLPRDGAAAQKLARHSAARLHREGYLDGDPAQRLRHAVEIRHESFVDPTFIELLREYRVALVVADTAGKWPLLGDVCADFLYLRLHGDKELYRSGYSEAALGQWQARIHAWASGGQADDLRRASQDAPAKATARDLYCYFDNDVKVRAPYDARRLLQLLELDGSLRTVPGQLPDDLRESAA

SEQ ID NO: 46444 - DNA, 855 bp, Azotobacter vinelandii AvOP
  CDS (1)..(855): transl_table=11
atgctgccctattgtctcggctgtccctcctggagcgaggcgggttggcgcggccgcctctacccggacggcacgccggcgtccgactatctggcgctgtacgcccgggtgttcaatgcggtcgagggcaacaccaccttctacgcccgaccttcggcggcgaccgtgcagcgctgggcgcaacggatgccggcgcatttccgcttctgcgccaagctgccgcgcgacatcagccattcggccgagctgcgcctgcagatgccggccgcccgggccttcgtcgagtcgctggcgcccctgggcgagcgggtcacgccgttctggctgcaactgccggccagcttcgggccggcgcgcctcggcgagctggcggactttctcgccggcttcgagcgtcccctggcggtggaagtccgccacccggccttcttccagcgcggcgaggaggagcgggcactgaaccgcctgctgcgcgaccggggcgtcgagcgcctgtgcctggattcccggccgctcttcagttgccacgaggacacgccggcggtgcgccatgcccagtcgcgcaagccgcgcctgccggtgcgcccggcggccctcacggcgtttccgcaggtacgcttcatcggccatccgctgctcgccgccaacgatcccttcatggcgccctggctggacaaggtcgccgcctggatcgaggagggcaggcagccctacgttttcctgcataccccggacaacttgctggcccccgaactggctcggcgcttccatgaacggttgcgggagcgcctgccgggactgccgccgttgccggcgccggcggcggccgacgattcgcaactcgatctgctctga

SEQ ID NO: 46445 - protein, 284 aa, Azotobacter vinelandii AvOP
MLPYCLGCPSWSEAGWRGRLYPDGTPASDYLALYARVFNAVEGNTTFYARPSAATVQRWAQRMPAHFRFCAKLPRDISHSAELRLQMPAARAFVESLAPLGERVTPFWLQLPASFGPARLGELADFLAGFERPLAVEVRHPAFFQRGEEERALNRLLRDRGVERLCLDSRPLFSCHEDTPAVRHAQSRKPRLPVRPAALTAFPQVRFIGHPLLAANDPFMAPWLDKVAAWIEEGRQPYVFLHTPDNLLAPELARRFHERLRERLPGLPPLPAPAAADDSQLDLL

SEQ ID NO: 46446 - DNA, 870 bp, Chromohalobacter salexigens DSM 3043
  CDS (1)..(870): transl_table=11
atgacggggatcgggccgaggttcttcatggggctgccgatgtgggccaatggcgattggcgcgggagcttgtatgcgcgtcatgcgccgtcgtcgggcatgctgcacgactatggtgccgtgttcggcagcgtggagggcaataccaccttctacagcgggccgccgaaagcggacacggttgcccaatgggcacgccaggcgccggcggatttccgattctgtttcaaattgccggcgcaactgacccatgacaagcgcctcgtgggcatcgaagacgacttccggacattctgcgatgcgctggcgccgttacacgatcgcctggggccgaccatggtgcaattgccgcgcgatttcggcgctcgggaattgccggctctggcggcattcttggagaaatggccgtcggacatgccctgtgccgtggaggtgcgccatagtgaatttttccacaaaggggacgctgagcagcaattgaaccgcttgttgataactttgggcgtggaccgagtgatgctggatgtcaggccgcttttcgccacgcccgccggggacgatgcgcgcttgatcaaggcgcagagcgaaaagccgaaacgcccgctacacgtgatttccacgggacgaatgcctatcgtgcgtttcatcggccattgtgatatggagatcaacgagcggctttttgccccttggtgcgagcgcctggcgttgtggataaaacaggggaaaacccctttcttgtttgtgcacacgccggacaaccgtcaggcgccgcaattggcacggcgctttcatgcacgtctctcccggtgcgtgacgcttcctcccctgggcgactttcccggagagcgtcaaagcgccttgttctga

SEQ ID NO: 46447 - protein, 289 aa, Chromohalobacter salexigens DSM 3043
MTGIGPRFFMGLPMWANGDWRGSLYARHAPSSGMLHDYGAVFGSVEGNTTFYSGPPKADTVAQWARQAPADFRFCFKLPAQLTHDKRLVGIEDDFRTFCDALAPLHDRLGPTMVQLPRDFGARELPALAAFLEKWPSDMPCAVEVRHSEFFHKGDAEQQLNRLLITLGVDRVMLDVRPLFATPAGDDARLIKAQSEKPKRPLHVISTGRMPIVRFIGHCDMEINERLFAPWCERLALWIKQGKTPFLFVHTPDNRQAPQLARRFHARLSRCVTLPPLGDFPGERQSALF

SEQ ID NO: 46448 - DNA, 852 bp, Frankia sp. CcI3
  CDS (1)..(852): transl_table=11
atgcgtcttcatgtggggtgcgcgatgtgggctcacaagtcatggcaagggcgctttctggcgcatccgctcccgcctcacgaacgcctgcgaaactacgccagctggtgcaacgcggtcgaagggaatgcaacgttctatgcgactccggccaggagcgccgtggcctcgtgggcgcagcagaccgacgccgacttccgattcgtgatcaagctgccaaaaaccatcacgcacgaacgccgcctgacgggcgtcgacgaagcgttacacgccttcctggaagcgatcgagccactcggcccacgggcccatgccctctggatacagctaccaggatcgttcaccccggccgacgtccccgtgcttgcccgctttctgcgccggctcaccaggtcccaccggtacgctgtggaggtccgccaccccgcattcttcaacgaccctcgcgcagcgcgacttctcgaaggagtccttgccgccgcgaccgccgaatggattccattcgacaccaccacattctttcaaagcccgccaggcagcgatgccgaacgagaagcctggaccaggaaaccgcgcgtgccgctccgatcgctcgcgttgaccgaccggccgatcgtccgctacctcggccgcgacgcctccacgcagacgatcaaaggctggcagcgttggattgacactgccatcgagtggctgcgcgagggtcgatcacccaccgtgtttattcacaccccggacaacgccgacgcgctactactcgcccgctgcttccacgatgacgtacgggtacgggtgcctgagctcgatgcactgcctcagccgataccgaccgagcccctgaccctcttctga

SEQ ID NO: 46449 - protein, 283 aa, Frankia sp. CcI3
MRLHVGCAMWAHKSWQGRFLAHPLPPHERLRNYASWCNAVEGNATFYATPARSAVASWAQQTDADFRFVIKLPKTITHERRLTGVDEALHAFLEAIEPLGPRAHALWIQLPGSFTPADVPVLARFLRRLTRSHRYAVEVRHPAFFNDPRAARLLEGVLAAATAEWIPFDTTTFFQSPPGSDAEREAWTRKPRVPLRSLALTDRPIVRYLGRDASTQTIKGWQRWIDTAIEWLREGRSPTVFIHTPDNADALLLARCFHDDVRVRVPELDALPQPIPTEPLTLF

SEQ ID NO: 46450 - DNA, 852 bp, Frankia sp. EAN1pec
  CDS (1)..(852): transl_table=11
atgcatctgcacgtggggtgcgcgatgtggacccacaagtcctggcaggggcgcctgctggcccatccgctgccggcccacgagcgcctgcggcactacgccgcctggtgtaacgcggtcgaggggaacaccacgttctatgcgaccccggcccgggagaccgtggccacgtgggcgcggcagaccgaccccggcttccggttcgtggtcaagctgccgaaggtcatcacgcacgaacgccacctcaccgacgtcgacgaggtgcttcgctcgttcctgaacgcgatggagccactcggcccgcgggcgcacgccctctggattcagctgccgggggcgttcggcccggccgacgtgtcgctgctcgcccgctttctgcgccggctcgacacgtcccaccggtacgcggtggaggtccgccatccggccttcttcgccgacccgcgcgcggcgcgcctgctcgaggacgcactcgccaccgtgggcgccgaatggattccgttcgacacaaccgagttcttccgcagcccgccgacgagcgacgccgaacgggacgcctgggcgaagaagccccggatgccgctccggtcactcgcgctgaccgaccagccgatcgtccgctacctcggccgcgacgactccgcccggacggtcgagggctggcggcactgggtcgacaccaccgtcacgtggctgcgcgagggacgatcgcccaccgtcttcatccacaccccggacaacgccgacgctccgctgctcgcccgccgtttccacgacgaggtccgggcccgcgtccccgaactcggtcctctgccgcagccgataccagccgagcccctgaccctcttctga

SEQ ID NO: 46451 - protein, 283 aa, Frankia sp. EAN1pec
MHLHVGCAMWTHKSWQGRLLAHPLPAHERLRHYAAWCNAVEGNTTFYATPARETVATWARQTDPGFRFVVKLPKVITHERHLTDVDEVLRSFLNAMEPLGPRAHALWIQLPGAFGPADVSLLARFLRRLDTSHRYAVEVRHPAFFADPRAARLLEDALATVGAEWIPFDTTEFFRSPPTSDAERDAWAKKPRMPLRSLALTDQPIVRYLGRDDSARTVEGWRHWVDTTVTWLREGRSPTVFIHTPDNADAPLLARRFHDEVRARVPELGPLPQPIPAEPLTLF

SEQ ID NO: 46452 - DNA, 954 bp, Shewanella baltica OS155
  CDS (1)..(954): transl_table=11
ttggatgagttgcgttctgggttagataaacccagccattttcgccttggcctagccatgtggtcacactcgaattggcaagagagtgtctatggccatgggattaaacaagcggagcgactcgcccgttacgccacgatattcaacactgtcgaaggtaataccagcttctacgcgacgcctgcacagcaaaccgtgatgaactggcacagtgccacgcccgatgattttcgctttaccttcaagctgccgcaaaccattactcaccaaagactattgcaacactgcggccaagagttgaaggattttttccaagtaatggcgccattaatcgataaaacggggatctggaaaattcaacttcccgcccatttcggcccagaaaacttacctgtgttagcacaatttctcaatcaagtcccccaaggattaacctatggcgttgaagttaggcatgcagcgttttttgctaagggagacgccgagcgcgcactcaatcgattacttatcgataaaaaagtgaatcgcatcatcatggatagcaggcccttgtttgccctgccgcccagcaacgccgccattatcgacgcccataagaaaaagccgcgggtgccagtgcatgcgattgccaccgccaataatcctgtagtgcgctttatcggccaaccagacgatgccgtagcacaactcgcgcagcaaggtgttagcgctttgcctaagaataacgatgccttttttgataattggctcgcacagctcccgctgtggctcgcagaaggtcgagagccctatctgtttattcatactcccgataatgaaaccgcgcctgaactggccatccgtctctatcaaacattgcgcagccaaattgcagcgcagattcaactcgccgagctaagcctacttgagaagatacctgaggagacaagtacgcagatgggacttgcttggtaa

SEQ ID NO: 46453 - protein, 317 aa, Shewanella baltica OS155
MDELRSGLDKPSHFRLGLAMWSHSNWQESVYGHGIKQAERLARYATIFNTVEGNTSFYATPAQQTVMNWHSATPDDFRFTFKLPQTITHQRLLQHCGQELKDFFQVMAPLIDKTGIWKIQLPAHFGPENLPVLAQFLNQVPQGLTYGVEVRHAAFFAKGDAERALNRLLIDKKVNRIIMDSRPLFALPPSNAAIIDAHKKKPRVPVHAIATANNPVVRFIGQPDDAVAQLAQQGVSALPKNNDAFFDNWLAQLPLWLAEGREPYLFIHTPDNETAPELAIRLYQTLRSQIAAQIQLAELSLLEKIPEETSTQMGLAW

SEQ ID NO: 46454 - DNA, 942 bp, Shewanella amazonensis SB2B
  CDS (1)..(942): transl_table=11
atgtcactccccgagaccccaacaatccgcatcggtatggccatgtggtcccatcccggttggaaaaccgtgtttcccggtttggatgccgaagcgcggctgaccgcttacagccgggtatttggcacagtggaaggcaacaccagcttttatgccctgccatcggcgcagcaggtaagcatttggcaaagggcgacaccggaagactttcgttttactttcaaactgccaagacgcattacccacgagctttcactgcgtaattgccgcgaggaagtactgcagttttttcggttgtttgagcctttgatggccaaaaccggggtgtggaaaatccagttgccggcccgtttcggccctgaatctttatctgtgctgacacagtttctgtcattgttgcccgaggggattggtcttggcgttgaggtacgccacagggcgtttttcgccaagggagaggccgagaaagacttcaatcgcctgttgatggacaagggcatcaatcgcatcatcatggatacacggcccgtgtttgccctgccagccatcaacgaggcgataaccgatgcccaccagaaaaaaccacgggtgcctgtgcatcctcttgccacgggggcccatccggtggtgcgttttatcgcccagccccatacgcctgcagcttgggggccggggggcaaacccgccgaccttggctgcgccgataatctggcgtttttcgccccctggcttggcaaactggccggttggctggccgaaggtcgctctccttatctctttattcataccccggacaacagcgatgccccactgcttgcaagcgagctggcgaagcaggttgccgcacatctgcaggcattgcaccccggactgcctataccttcggtgatgctcgatagcgccgaatctgacggtggtcaaattggccttgggctccagtaa

SEQ ID NO: 46455 - protein, 313 aa, Shewanella amazonensis SB2B
MSLPETPTIRIGMAMWSHPGWKTVFPGLDAEARLTAYSRVFGTVEGNTSFYALPSAQQVSIWQRATPEDFRFTFKLPRRITHELSLRNCREEVLQFFRLFEPLMAKTGVWKIQLPARFGPESLSVLTQFLSLLPEGIGLGVEVRHRAFFAKGEAEKDFNRLLMDKGINRIIMDTRPVFALPAINEAITDAHQKKPRVPVHPLATGAHPVVRFIAQPHTPAAWGPGGKPADLGCADNLAFFAPWLGKLAGWLAEGRSPYLFIHTPDNSDAPLLASELAKQVAAHLQALHPGLPIPSVMLDSAESDGGQIGLGLQ

SEQ ID NO: 46456 - DNA, 729 bp, Rubrobacter xylanophilus DSM 9941
  CDS (1)..(729): transl_table=11
gtgggcggcagggtccacataggcacctccggctggcactacgaccactggcgggggacgttctacccgccggggctccccgcggaccgcctcctcgagcactacgcgacccgcttcgagaccgccgagataaacaactccttctaccggctccccgaggcgaagacgctggccggctggcgccggaggaccccgcggggcttcgtcttcgcggccaaggcctcccgctacctcacccacatgaagaagctccgggagccggaggagccgctccgcaggctcttcgggcggctggaggcgctgggcgagaagctcggcccggtcctcttccagctcccgccgcgctggcgggcgaacccggggaggctcgaggccctgctgaaggcgctgcctcccggccgccggtgcgccttcgagttccgggacgagagctggttctgcgaggaggtctaccgcctcctccaggagcacggggcggcgctgtgcgtctacgacctgggcgaaaggagctccccgcgccgcctcaccgccggcttcgcctacgcccggctccacggcccggagggcccctaccggggctgctacggcgagcggcagctcgcctcgtgggccgggctgctgggcggctgggccgaggaagggaccgaggtgtactgctacttcgacaacgacgaggcggggtacgccccccgcaacgccgcgcggctcaggcagatgatggaggtgtag

SEQ ID NO: 46457 - protein, 242 aa, Rubrobacter xylanophilus DSM 9941
MGGRVHIGTSGWHYDHWRGTFYPPGLPADRLLEHYATRFETAEINNSFYRLPEAKTLAGWRRRTPRGFVFAAKASRYLTHMKKLREPEEPLRRLFGRLEALGEKLGPVLFQLPPRWRANPGRLEALLKALPPGRRCAFEFRDESWFCEEVYRLLQEHGAALCVYDLGERSSPRRLTAGFAYARLHGPEGPYRGCYGERQLASWAGLLGGWAEEGTEVYCYFDNDEAGYAPRNAARLRQMMEV

SEQ ID NO: 46458 - DNA, 906 bp, Shewanella frigidimarina NCIMB 400
  CDS (1)..(906): transl_table=11
ttggacaacagcacttcaacagcgactattgatccgccattaagattaggtttagccatgtggtcacaaaaccaatggcaacaaaccgtttatggcaatagccaggcacatcgactggcacgttatgccgaaatatttaataccgtcgagggcaacactactttctatgccacgccgtcgttacagaatgtacaaaattggtacgctgcaacgcatgacgagtttaaatttacctttaaactgcccaaacacatcacccatgaattacagctccaacatgcaggcccagcgctacaacaattctttagcataatggagccccttattaaccgaaccggagtgtggaaaattcaacttcccgccagttttgggccacaatctttgccacaattagcacagtttttaactcaagtgccacaaggcctaacctatggtgtagaagttcgtaacagtgccttttttgctaaaggtgaagcagaacaagcattaaaccgcttattaatcgacaataactgcaatcgtatcattatggacacgaggcctgtttttgcagcagcgccaacaaccgcagcagtgatagatgcccaccagaaaaagccaaaagtgccagtacacgccattgcaaccgcacacaatcctgtggtgcgctttattggtcatccgcaagcggaagccaatatacattttttccaaaactggctaaaacaactgcctttatggatcgcgcaaaataaacaaccctatttatttatccacactccagacaatcacaatgcaccgcaattagcggtcgatttgtatcgtttactgcaacagcagttggcacaaagtacatctgcattgaccgacattaatctattacctcaacaacagcacaccacaactcaaatgggttttgatttgtga

SEQ ID NO: 46459 - protein, 301 aa, Shewanella frigidimarina NCIMB 400
MDNSTSTATIDPPLRLGLAMWSQNQWQQTVYGNSQAHRLARYAEIFNTVEGNTTFYATPSLQNVQNWYAATHDEFKFTFKLPKHITHELQLQHAGPALQQFFSIMEPLINRTGVWKIQLPASFGPQSLPQLAQFLTQVPQGLTYGVEVRNSAFFAKGEAEQALNRLLIDNNCNRIIMDTRPVFAAAPTTAAVIDAHQKKPKVPVHAIATAHNPVVRFIGHPQAEANIHFFQNWLKQLPLWIAQNKQPYLFIHTPDNHNAPQLAVDLYRLLQQQLAQSTSALTDINLLPQQQHTTTQMGFDL

SEQ ID NO: 46460 - DNA, 849 bp, Pseudoalteromonas haloplanktis TAC125
  CDS (1)..(849): transl_table=11
atgctatatattgggtgcccacagtggtcaagcaatgcgtggaaaggcaatttattttcgagccaatgtaaaaataccgatatgctaagccaatacgcgcaacattttaactctgtagagggaaataccagcttttacgccgacccatccccaagtactcttttacgctgggcaaacagtgtacccgacgattttaaatttacctttaagtttcatcggcgctttagccatgagctaaagctgactaatgtacacaacgagctaaccgcttggcttaacttatttgcaccaattttagagaaaactgggcaaattatgctgcagctgccaagtgcctttggccctaatgatttacccaagttagcgcaatttattagcctattacccaaagagctaaactttggggtagaagttcgccatccggcattttttcaaaagggtgaagccgaaatagcgcttaatcaattattaatggcaaataacataaaccgtatagccatggatacccgcgccctatttgcagttaaagcgaatacggaagcgctgattgatgcacaacaaaaaaagccgcatctgcccgtgcatgctattgctacaagtgagcaacccatggcacgttttgttattgctaatttacaaagtgaatataaaaccttttataagccttggcttagtaaagtaaaacagtggcttgatgaaggaaaaacgccctatgtattttttcataccgcagacaaccgagaagcaccgttattagcaaggcagttttgtaaggacctaggttataaccacaaggtactaaatccatttagcggcgaggcagaagcccaccagcaagcactgttttaa

SEQ ID NO: 46461 - protein, 282 aa, Pseudoalteromonas haloplanktis TAC125
MLYIGCPQWSSNAWKGNLFSSQCKNTDMLSQYAQHFNSVEGNTSFYADPSPSTLLRWANSVPDDFKFTFKFHRRFSHELKLTNVHNELTAWLNLFAPILEKTGQIMLQLPSAFGPNDLPKLAQFISLLPKELNFGVEVRHPAFFQKGEAEIALNQLLMANNINRIAMDTRALFAVKANTEALIDAQQKKPHLPVHAIATSEQPMARFVIANLQSEYKTFYKPWLSKVKQWLDEGKTPYVFFHTADNREAPLLARQFCKDLGYNHKVLNPFSGEAEAHQQALF

SEQ ID NO: 46462 - DNA, 726 bp, uncultured Acidobacteria bacterium
  CDS (1)..(726)
atgacccggttcgtcggtacagcagggtgggcaattccgcgacgatgggcggaactggcaccgagcgataggaaagggctagcgcgatacgcgagcgtcctgaacgcggtcgaaatcaactcgtcgttctaccggccccattcgcgcgatacatacgcgcgctgggcggcaaacgtgccggagagcttccggttctcggtcaagattcccaaagccattacccacgatgccaagctggtagacgtcgacgaaaccctgacgcggtttctcgaagaggcgagcgggcttggacgaaagcttggcgtcctcctcgtgcaactgcccgggcggtccgaattcgatggcgacgcggccaaggcgttcttcgcgatgcttcgaaccaagcatgctggtgacgtcgtctgcgaaccacgtcacccgagttggtttacgaacggcgcagatgcattgctacgcaagtatcgggtcgcgcgcgtcgctgcagatccacccaaaggacacaccgcatgtgagccgggcggctgggacagcttggtctatttccgcctgcacgggtcgccacggacatatttcacgccgtatcagcaacccttcctcgtagccatcgcgcagcgtgttttggagcgcgaggttccggcgtgggtcgtcttcgacaacaccggttctggcgctgcattcgagaacgccgcgcggatgagcgatctgctcgatctccagcggcgttag

SEQ ID NO: 46463 - protein, 241 aa, uncultured Acidobacteria bacterium
MTRFVGTAGWAIPRRWAELAPSDRKGLARYASVLNAVEINSSFYRPHSRDTYARWAANVPESFRFSVKIPKAITHDAKLVDVDETLTRFLEEASGLGRKLGVLLVQLPGRSEFDGDAAKAFFAMLRTKHAGDVVCEPRHPSWFTNGADALLRKYRVARVAADPPKGHTACEPGGWDSLVYFRLHGSPRTYFTPYQQPFLVAIAQRVLEREVPAWVVFDNTGSGAAFENAARMSDLLDLQRR

SEQ ID NO: 46464 - DNA, 24 bp, Artificial sequence
  Primer sequence
atgatttacatcggtctaccgcaa

SEQ ID NO: 46465 - DNA, 27 bp, Artificial sequence
  Primer sequence
ttagaaaagagaagattgctgtggaat

SEQ ID NO: 46466 - protein, 325 aa, Artificial sequence
  Consensus
  Variant (3)..(5): Xaa in position 3 to 5 is any amino acid
  Variant (7)..(18): Xaa in position 7 to 18 is any amino acid
  Variant (19)..(36): Xaa in position 19 to 36 is any or no amino acid
  Variant (38)..(39): Xaa in position 38 to 39 is any amino acid
  Variant (42)..(46): Xaa in position 42 to 46 is any amino acid
  Variant (49)..(49): Xaa in position 49 is any amino acid
  Variant (55)..(64): Xaa in position 55 to 64 is any amino acid
  Variant (65)..(65): Xaa in position 65 is any or no amino acid
  Variant (67)..(73): Xaa in position 67 to 73 is any amino acid
  Variant (75)..(75): Xaa in position 75 is any amino acid
  Variant (77)..(78): Xaa in position 77 to 78 is any amino acid
  Variant (80)..(83): Xaa in position 80 to 83 is any amino acid
  Variant (87)..(89): Xaa in position 87 to 89 is any amino acid
  Variant (91)..(99): Xaa in position 91 to 99 is any amino acid
  Variant (100)..(106): Xaa in position 100 to 106 is any or no amino acid
  Variant (108)..(113): Xaa in position 108 to 113 is any amino acid
  Variant (115)..(116): Xaa in position 115 to 116 is any amino acid
  Variant (117)..(122): Xaa in position 117 to 122 is any or no amino acid
  Variant (125)..(129): Xaa in position 125 to 129 is any amino acid
  Variant (133)..(155): Xaa in position 133 to 155 is any amino acid
  Variant (156)..(161): Xaa in position 156 to 161 is any or no amino acid
  Variant (164)..(164): Xaa in position 164 is any amino acid
  Variant (166)..(168): Xaa in position 166 to 168 is any amino acid
  Variant (171)..(175): Xaa in position 171 to 175 is any amino acid
  Variant (176)..(182): Xaa in position 176 to 182 is any or no amino acid
  Variant (184)..(193): Xaa in position 184 to 193 is any amino acid
  Variant (195)..(209): Xaa in position 195 to 209 is any amino acid
  Variant (210)..(233): Xaa in position 210 to 233 is any or no amino acid
  Variant (236)..(237): Xaa in position 236 to 237 is any amino acid
  Variant (239)..(254): Xaa in position 239 to 254 is any amino acid
  Variant (255)..(273): Xaa in position 255 to 273 is any or no amino acid
  Variant (275)..(282): Xaa in position 275 to 282 is any amino acid
  Variant (283)..(302): Xaa in position 283 to 302 is any or no amino acid
  Variant (304)..(313): Xaa in position 304 to 313 is any amino acid
  Variant (315)..(317): Xaa in position 315 to 317 is any amino acid
  Variant (319)..(324): Xaa in position 319 to 324 is any amino acid
IGXXXWXXXXXXXXXXXXXXXXXXXXXXXXXXXXXXLXXYAXXXXXVEXNTTFYXXXXXXXXXXXWXXXXXXXFXFXXKXXXXITHXXXLXXXXXXXXXXXXXXXXFXXXXXXLXXXXXXXXRLXXXXXQLPXXXXXXXXXXXXXXXXXXXXXXXXXXXXXVEXRXXXFFXXXXXXXXXXXXLXXXXXXXXXXDXXXXXXXXXXXXXXXXXXXXXXXXXXXXXXXXXXXXXXXVRXXGXXXXXXXXXXXXXXXXXXXXXXXXXXXXXXXXXXXVXXXXXXXXXXXXXXXXXXXXXXXXXXXXYXXXXXXXXXXAXXXAXXXXXXL

SEQ ID NO: 46467 - protein, 18 aa, Artificial sequence
  Consensus
  Variant (2)..(4): Xaa in position 2 to 4 is any amino acid
  Variant (5)..(5): Xaa in position 5 is Ala, Cys, Gly, Ser, Thr or Val
  Variant (6)..(10): Xaa in position 6 to 10 is any amino acid
  Variant (13)..(13): Xaa in position 13 is Gly, Ile, Leu or Val
  Variant (14)..(14): Xaa in position 14 is Asp or Asn
  Variant (15)..(15): Xaa in position 15 is any amino acid
  Variant (16)..(16): Xaa in position 16 is Ala, Pro, Ser or Thr
LXXXXXXXXXVEXXXXFY

SEQ ID NO: 46468 - protein, 25 aa, Artificial sequence
  Consensus
  Variant (2)..(8): Xaa in position 2 to 8 is any amino acid
  Variant (10)..(10): Xaa in position 10 is any amino acid
  Variant (11)..(11): Xaa in position 11 is Phe or Val
  Variant (12)..(13): Xaa in position 12 to 13 is any amino acid
  Variant (15)..(18): Xaa in position 15 to 18 is any amino acid
  Variant (19)..(19): Xaa in position 19 is Phe, Ile, Leu or Val
  Variant (20)..(20): Xaa in position 20 is Ser or Thr
  Variant (22)..(24): Xaa in position 22 to 24 is any amino acid
WXXXXXXXFXXXXKXXXXXXHXXXL

SEQ ID NO: 46469 - protein, 13 aa, Artificial sequence
  Consensus
  Variant (2)..(9): Xaa in position 2 to 9 is any amino acid
  Variant (10)..(10): Xaa in position 10 is any or no amino acid
  Variant (12)..(12): Xaa in position 12 is Phe or Leu
  Variant (13)..(13): Xaa in position 13 is Pro or Ser
LXXXXXXXXXQXX

SEQ ID NO: 46470 - protein, 17 aa, Artificial sequence
  Consensus
  Variant (2)..(2): Xaa in position 2 is any amino acid
  Variant (4)..(14): Xaa in position 4 to 14 is any amino acid
  Variant (15)..(16): Xaa in position 15 to 16 is any or no amino acid
EXRXXXXXXXXXXXXXL

SEQ ID NO: 46471 - DNA, 1122 bp, Escherichia coli K12; identical to SEQ ID NO: 21814
  CDS (1)..(1122)

SEQ ID NO: 46472 - protein, 373 aa, Escherichia coli K12; identical to SEQ ID NO: 21815

SEQ ID NO: 46473 - DNA, 1122 bp, Yersinia pestis; identical to SEQ ID NO: 21816
  CDS (1)..(1122)

SEQ ID NO: 46474 - protein, 373 aa, Yersinia pestis; identical to SEQ ID NO: 21817

SEQ ID NO: 46475 - DNA, 1122 bp, Salmonella enterica subsp. enterica serovar Typhi; identical to SEQ ID NO: 21818
  CDS (1)..(1122)

SEQ ID NO: 46476 - protein, 373 aa, Salmonella enterica subsp. enterica serovar Typhi; identical to SEQ ID NO: 21819

SEQ ID NO: 46477 - DNA, 1128 bp, Vibrio cholerae; identical to SEQ ID NO: 21820
  CDS (1)..(1128)

SEQ ID NO: 46478 - protein, 375 aa, Vibrio cholerae; identical to SEQ ID NO: 21821

SEQ ID NO: 46479 - DNA, 1134 bp, Haemophilus influenzae; identical to SEQ ID NO: 21822
  CDS (1)..(1134)

SEQ ID NO: 46480 - protein, 377 aa, Haemophilus influenzae; identical to SEQ ID NO: 21823

SEQ ID NO: 46481 - DNA, 1122 bp, Erwinia herbicola; identical to SEQ ID NO: 21824
  CDS (1)..(1122)

SEQ ID NO: 46482 - protein, 373 aa, Erwinia herbicola; identical to SEQ ID NO: 21825

SEQ ID NO: 46483 - DNA, 1131 bp, Mannheimia succiniciproducens MBEL55E; identical to SEQ ID NO: 21826
  CDS (1)..(1131)

SEQ ID NO: 46484 - protein, 376 aa, Mannheimia succiniciproducens MBEL55E; identical to SEQ ID NO: 21827

SEQ ID NO: 46485 - DNA, 1122 bp, Erwinia carotovora; identical to SEQ ID NO: 21828
  CDS (1)..(1122)

SEQ ID NO: 46486 - protein, 373 aa, Erwinia carotovora; identical to SEQ ID NO: 21829

SEQ ID NO: 46487 - DNA, 1128 bp, Photobacterium profundum; identical to SEQ ID NO: 21830
  CDS (1)..(1128)

SEQ ID NO: 46488 - protein, 375 aa, Photobacterium profundum; identical to SEQ ID NO: 21831

SEQ ID NO: 46489 - DNA, 1128 bp, Vibrio vulnificus; identical to SEQ ID NO: 21832
  CDS (1)..(1128)

SEQ ID NO: 46490 - protein, 375 aa, Vibrio vulnificus; identical to SEQ ID NO: 21833

SEQ ID NO: 46491 - DNA, 1122 bp, Photorhabdus luminescens; identical to SEQ ID NO: 21834
  CDS (1)..(1122)

SEQ ID NO: 46492 - protein, 373 aa, Photorhabdus luminescens; identical to SEQ ID NO: 21835

SEQ ID NO: 46493 - DNA, 1134 bp, Candidatus Blochmannia floridanus; identical to SEQ ID NO: 21836
  CDS (1)..(1134)

SEQ ID NO: 46494 - protein, 377 aa, Candidatus Blochmannia floridanus; identical to SEQ ID NO: 21837

SEQ ID NO: 46495 - DNA, 1128 bp, Vibrio parahaemolyticus; identical to SEQ ID NO: 21838
  CDS (1)..(1128)

SEQ ID NO: 46496 - protein, 375 aa, Vibrio parahaemolyticus; identical to SEQ ID NO: 21839

SEQ ID NO: 46497 - DNA, 1140 bp, Shewanella oneidensis; identical to SEQ ID NO: 21840
  CDS (1)..(1140)

SEQ ID NO: 46498 - protein, 379 aa, Shewanella oneidensis; identical to SEQ ID NO: 21841

SEQ ID NO: 46499 - DNA, 1125 bp, Pasteurella multocida; identical to SEQ ID NO: 21842
  CDS (1)..(1125)

SEQ ID NO: 46500 - protein, 374 aa, Pasteurella multocida; identical to SEQ ID NO: 21843

SEQ ID NO: 46501 - DNA, 24 bp, Artificial sequence
  Primer sequence
atggttgctgaattgaccgcatta

SEQ ID NO: 46502 - DNA, 23 bp, Artificial sequence
  Primer sequence
ttactggcgattgtcattcgcct

SEQ ID NO: 46503 - protein, 370 aa, Artificial sequence; identical to SEQ ID NO: 21846
  Consensus
  Variant (2)..(4): Xaa in position 2 to 4 is any amino acid
  Variant (6)..(7): Xaa in position 6 to 7 is any amino acid
  Variant (10)..(11): Xaa in position 10 to 11 is any amino acid
  Variant (13)..(21): Xaa in position 13 to 21 is any amino acid
  Variant (24)..(24): Xaa in position 24 is any amino acid
  Variant (27)..(29): Xaa in position 27 to 29 is any amino acid
  Variant (31)..(32): Xaa in position 31 to 32 is any amino acid
  Variant (34)..(36): Xaa in position 34 to 36 is any amino acid
  Variant (39)..(39): Xaa in position 39 is any amino acid
  Variant (42)..(42): Xaa in position 42 is any amino acid
  Variant (44)..(44): Xaa in position 44 is any amino acid
  Variant (47)..(49): Xaa in position 47 to 49 is any amino acid
  Variant (51)..(52): Xaa in position 51 to 52 is any amino acid
  Variant (54)..(55): Xaa in position 54 to 55 is any amino acid
  Variant (58)..(60): Xaa in position 58 to 60 is any amino acid
  Variant (62)..(65): Xaa in position 62 to 65 is any amino acid
  Variant (67)..(68): Xaa in position 67 to 68 is any amino acid
  Variant (70)..(70): Xaa in position 70 is any amino acid
  Variant (74)..(74): Xaa in position 74 is any amino acid
  Variant (80)..(81): Xaa in position 80 to 81 is any amino acid
  Variant (83)..(85): Xaa in position 83 to 85 is any amino acid
  Variant (89)..(97): Xaa in position 89 to 97 is any amino acid
  Variant (99)..(100): Xaa in position 99 to 100 is any amino acid
  Variant (103)..(103): Xaa in position 103 is any amino acid
  Variant (105)..(106): Xaa in position 105 to 106 is any amino acid
  Variant (108)..(109): Xaa in position 108 to 109 is any amino acid
  Variant (111)..(116): Xaa in position 111 to 116 is any amino acid
  Variant (120)..(123): Xaa in position 120 to 123 is any amino acid
  Variant (125)..(127): Xaa in position 125 to 127 is any amino acid
  Variant (130)..(131): Xaa in position 130 to 131 is any amino acid
  Variant (133)..(145): Xaa in position 133 to 145 is any amino acid
  Variant (149)..(154): Xaa in position 149 to 154 is any amino acid
  Variant (156)..(161): Xaa in position 156 to 161 is any amino acid
  Variant (163)..(169): Xaa in position 163 to 169 is any amino acid
  Variant (172)..(172): Xaa in position 172 is any amino acid
  Variant (174)..(174): Xaa in position 174 is any amino acid
  Variant (176)..(182): Xaa in position 176 to 182 is any amino acid
  Variant (184)..(185): Xaa in position 184 to 185 is any amino acid
  Variant (187)..(187): Xaa in position 187 is any amino acid
  Variant (189)..(189): Xaa in position 189 is any amino acid
  Variant (191)..(191): Xaa in position 191 is any amino acid
  Variant (193)..(193): Xaa in position 193 is any amino acid
  Variant (198)..(199): Xaa in position 198 to 199 is any amino acid
  Variant (201)..(205): Xaa in position 201 to 205 is any amino acid
  Variant (207)..(208): Xaa in position 207 to 208 is any amino acid
  Variant (210)..(210): Xaa in position 210 is any amino acid
  Variant (212)..(214): Xaa in position 212 to 214 is any amino acid
  Variant (216)..(216): Xaa in position 216 is any amino acid
  Variant (219)..(222): Xaa in position 219 to 222 is any amino acid
  Variant (224)..(224): Xaa in position 224 is any amino acid
  Variant (226)..(228): Xaa in position 226 to 228 is any amino acid
  Variant (230)..(232): Xaa in position 230 to 232 is any amino acid
  Variant (236)..(244): Xaa in position 236 to 244 is any amino acid
  Variant (247)..(248): Xaa in position 247 to 248 is any amino acid
  Variant (250)..(252): Xaa in position 250 to 252 is any amino acid
  Variant (254)..(256): Xaa in position 254 to 256 is any amino acid
  Variant (259)..(260): Xaa in position 259 to 260 is any amino acid
  Variant (262)..(263): Xaa in position 262 to 263 is any amino acid
  Variant (265)..(266): Xaa in position 265 to 266 is any amino acid
  Variant (268)..(280): Xaa in position 268 to 280 is any amino acid
  Variant (284)..(286): Xaa in position 284 to 286 is any amino acid
  Variant (290)..(292): Xaa in position 290 to 292 is any amino acid
  Variant (297)..(297): Xaa in position 297 is any amino acid
  Variant (299)..(301): Xaa in position 299 to 301 is any amino acid
  Variant (304)..(304): Xaa in position 304 is any amino acid
  Variant (308)..(316): Xaa in position 308 to 316 is any amino acid
  Variant (318)..(338): Xaa in position 318 to 338 is any amino acid
  Variant (340)..(342): Xaa in position 340 to 342 is any amino acid
  Variant (344)..(348): Xaa in position 344 to 348 is any amino acid
  Variant (350)..(356): Xaa in position 350 to 356 is any amino acid
  Variant (358)..(360): Xaa in position 358 to 360 is any amino acid
  Variant (362)..(364): Xaa in position 362 to 364 is any amino acid
  Variant (366)..(369): Xaa in position 366 to 369 is any amino acid

SEQ ID NO: 46504 - protein, 370 aa, Artificial sequence; identical to SEQ ID NO: 21847
  Consensus
  Variant (2)..(3): Xaa in position 2 to 3 is any amino acid
  Variant (6)..(7): Xaa in position 6 to 7 is any amino acid
  Variant (10)..(10): Xaa in position 10 is any amino acid
  Variant (13)..(17): Xaa in position 13 to 17 is any amino acid
  Variant (21)..(21): Xaa in position 21 is any amino acid
  Variant (24)..(24): Xaa in position 24 is any amino acid
  Variant (27)..(28): Xaa in position 27 to 28 is any amino acid
  Variant (31)..(31): Xaa in position 31 is any amino acid
  Variant (34)..(36): Xaa in position 34 to 36 is any amino acid
  Variant (42)..(42): Xaa in position 42 is any amino acid
  Variant (44)..(44): Xaa in position 44 is any amino acid
  Variant (48)..(48): Xaa in position 48 is any amino acid
  Variant (51)..(52): Xaa in position 51 to 52 is any amino acid
  Variant (55)..(55): Xaa in position 55 is any amino acid
  Variant (58)..(60): Xaa in position 58 to 60 is any amino acid
  Variant (62)..(63): Xaa in position 62 to 63 is any amino acid
  Variant (65)..(65): Xaa in position 65 is any amino acid
  Variant (70)..(70): Xaa in position 70 is any amino acid
  Variant (74)..(74): Xaa in position 74 is any amino acid
  Variant (80)..(81): Xaa in position 80 to 81 is any amino acid
  Variant (83)..(85): Xaa in position 83 to 85 is any amino acid
  Variant (89)..(91): Xaa in position 89 to 91 is any amino acid
  Variant (93)..(97): Xaa in position 93 to 97 is any amino acid
  Variant (100)..(100): Xaa in position 100 is any amino acid
  Variant (103)..(103): Xaa in position 103 is any amino acid
  Variant (105)..(106): Xaa in position 105 to 106 is any amino acid
  Variant (108)..(108): Xaa in position 108 is any amino acid
  Variant (111)..(115): Xaa in position 111 to 115 is any amino acid
  Variant (120)..(120): Xaa in position 120 is any amino acid
  Variant (122)..(123): Xaa in position 122 to 123 is any amino acid
  Variant (125)..(127): Xaa in position 125 to 127 is any amino acid
  Variant (130)..(131): Xaa in position 130 to 131 is any amino acid
  Variant (133)..(135): Xaa in position 133 to 135 is any amino acid
  Variant (137)..(138): Xaa in position 137 to 138 is any amino acid
  Variant (141)..(141): Xaa in position 141 is any amino acid
  Variant (143)..(143): Xaa in position 143 is any amino acid
  Variant (145)..(145): Xaa in position 145 is any amino acid
  Variant (149)..(150): Xaa in position 149 to 150 is any amino acid
  Variant (152)..(154): Xaa in position 152 to 154 is any amino acid
  Variant (156)..(157): Xaa in position 156 to 157 is any amino acid
  Variant (159)..(161): Xaa in position 159 to 161 is any amino acid
  Variant (163)..(164): Xaa in position 163 to 164 is any amino acid
  Variant (169)..(169): Xaa in position 169 is any amino acid
  Variant (172)..(172): Xaa in position 172 is any amino acid
  Variant (174)..(174): Xaa in position 174 is any amino acid
  Variant (176)..(177): Xaa in position 176 to 177 is any amino acid
  Variant (180)..(180): Xaa in position 180 is any amino acid
  Variant (184)..(185): Xaa in position 184 to 185 is any amino acid
  Variant (187)..(187): Xaa in position 187 is any amino acid
  Variant (191)..(191): Xaa in position 191 is any amino acid
  Variant (201)..(205): Xaa in position 201 to 205 is any amino acid
  Variant (207)..(207): Xaa in position 207 is any amino acid
  Variant (212)..(212): Xaa in position 212 is any amino acid
  Variant (214)..(214): Xaa in position 214 is any amino acid
  Variant (219)..(222): Xaa in position 219 to 222 is any amino acid
  Variant (226)..(226): Xaa in position 226 is any amino acid
  Variant (228)..(228): Xaa in position 228 is any amino acid
  Variant (230)..(232): Xaa in position 230 to 232 is any amino acid
  Variant (236)..(241): Xaa in position 236 to 241 is any amino acid
  Variant (243)..(243): Xaa in position 243 is any amino acid
  Variant (247)..(248): Xaa in position 247 to 248 is any amino acid
  Variant (250)..(251): Xaa in position 250 to 251 is any amino acid
  Variant (259)..(260): Xaa in position 259 to 260 is any amino acid
  Variant (263)..(263): Xaa in position 263 is any amino acid
  Variant (265)..(265): Xaa in position 265 is any amino acid
  Variant (268)..(269): Xaa in position 268 to 269 is any amino acid
  Variant (271)..(273): Xaa in position 271 to 273 is any amino acid
  Variant (275)..(276): Xaa in position 275 to 276 is any amino acid
  Variant (279)..(279): Xaa in position 279 is any amino acid
  Variant (292)..(292): Xaa in position 292 is any amino acid
  Variant (300)..(301): Xaa in position 300 to 301 is any amino acid
  Variant (308)..(312): Xaa in position 308 to 312 is any amino acid
  Variant (314)..(316): Xaa in position 314 to 316 is any amino acid
  Variant (318)..(326): Xaa in position 318 to 326 is any amino acid
  Variant (328)..(334): Xaa in position 328 to 334 is any amino acid
  Variant (337)..(338): Xaa in position 337 to 338 is any amino acid
  Variant (340)..(342): Xaa in position 340 to 342 is any amino acid
  Variant (344)..(345): Xaa in position 344 to 345 is any amino acid
  Variant (347)..(348): Xaa in position 347 to 348 is any amino acid
  Variant (352)..(352): Xaa in position 352 is any amino acid
  Variant (354)..(356): Xaa in position 354 to 356 is any amino acid
  Variant (358)..(359): Xaa in position 358 to 359 is any amino acid
  Variant (362)..(363): Xaa in position 362 to 363 is any amino acid
  Variant (366)..(366): Xaa in position 366 is any amino acid

SEQ ID NO: 46505 - protein, 62 aa, Artificial sequence; identical to SEQ ID NO: 21848
  Consensus
  Variant (2)..(3): Xaa in position 2 to 3 is any amino acid
  Variant (4)..(4): Xaa in position 4 is Leu or Ile
  Variant (6)..(7): Xaa in position 6 to 7 is any amino acid
  Variant (10)..(10): Xaa in position 10 is any amino acid
  Variant (11)..(11): Xaa in position 11 is Val, Leu or Ile
  Variant (13)..(13): Xaa in position 13 is Lys, Gln or Arg
  Variant (14)..(14): Xaa in position 14 is any amino acid
  Variant (15)..(15): Xaa in position 15 is Leu or Met
  Variant (16)..(16): Xaa in position 16 is Leu, Val or Ile
  Variant (17)..(17): Xaa in position 17 is any amino acid
  Variant (18)..(18): Xaa in position 18 is Leu or Val
  Variant (19)..(19): Xaa in position 19 is Leu or Phe
  Variant (20)..(20): Xaa in position 20 is Ala, Ser or Arg
  Variant (21)..(21): Xaa in position 21 is Lys, Gln or Arg
  Variant (24)..(24): Xaa in position 24 is any amino acid
  Variant (27)..(27): Xaa in position 27 is any amino acid
  Variant (28)..(28): Xaa in position 28 is Gln, Glu or Lys
  Variant (29)..(29): Xaa in position 29 is Val or Ile
  Variant (31)..(31): Xaa in position 31 is any amino acid
  Variant (32)..(32): Xaa in position 32 is Val or Ile
  Variant (34)..(34): Xaa in position 34 is Ser or His
  Variant (35)..(36): Xaa in position 35 to 36 is any amino acid
  Variant (39)..(39): Xaa in position 39 is any amino acid
  Variant (42)..(42): Xaa in position 42 is Ala, Val or Asp
  Variant (44)..(44): Xaa in position 44 is Asp, Glu or Gln
  Variant (47)..(48): Xaa in position 47 to 48 is any amino acid
  Variant (49)..(49): Xaa in position 49 is Met or Ile
  Variant (51)..(52): Xaa in position 51 to 52 is any amino acid
  Variant (54)..(54): Xaa in position 54 is Arg or Lys
  Variant (55)..(55): Xaa in position 55 is any amino acid
  Variant (58)..(60): Xaa in position 58 to 60 is any amino acid
  Variant (62)..(62): Xaa in position 62 is Val or Ile

SEQ ID NO: 46506 - protein, 23 aa, Artificial sequence
  Consensus
  Variant (2)..(2): Xaa in position 2 is Ile, Val or Leu
  Variant (3)..(3): Xaa in position 3 is Glu or Arg
  Variant (5)..(5): Xaa in position 5 is Ile, Val or Leu
  Variant (9)..(9): Xaa in position 9 is any amino acid
  Variant (15)..(16): Xaa in position 15 to 16 is any amino acid
  Variant (18)..(18): Xaa in position 18 is Asn, Lys or His
  Variant (19)..(20): Xaa in position 19 to 20 is any amino acid
LXXDXLRRXMRESYXXEXXXGFK

SEQ ID NO: 46507 - protein, 52 aa, Artificial sequence; identical to SEQ ID NO: 21850
  Consensus
  Variant (1)..(1): Xaa in position 1 is Val, Ile or Leu
  Variant (3)..(3): Xaa in position 3 is Ile, Val or Leu
  Variant (4)..(4): Xaa in position 4 is Val, Ile or Leu
  Variant (7)..(7): Xaa in position 7 is any amino acid
  Variant (9)..(9): Xaa in position 9 is Gln, Lys or Arg
  Variant (10)..(10): Xaa in position 10 is Leu or Met
  Variant (12)..(12): Xaa in position 12 is any amino acid
  Variant (13)..(13): Xaa in position 13 is Leu or Phe
  Variant (15)..(15): Xaa in position 15 is any amino acid
  Variant (16)..(16): Xaa in position 16 is Arg, Lys or Gln
  Variant (17)..(17): Xaa in position 17 is any amino acid
  Variant (18)..(18): Xaa in position 18 is Leu or Phe
  Variant (19)..(19): Xaa in position 19 is any amino acid
  Variant (20)..(20): Xaa in position 20 is Leu or Ala
  Variant (24)..(24): Xaa in position 24 is any amino acid
  Variant (25)..(25): Xaa in position 25 is Val or Ile
  Variant (26)..(27): Xaa in position 26 to 27 is any amino acid
  Variant (29)..(29): Xaa in position 29 is Glu, Gly or Asp
  Variant (30)..(31): Xaa in position 30 to 31 is any amino acid
  Variant (34)..(35): Xaa in position 34 to 35 is any amino acid
  Variant (37)..(38): Xaa in position 37 to 38 is any amino acid
  Variant (39)..(39): Xaa in position 39 is Ile or Leu
  Variant (40)..(40): Xaa in position 40 is Leu, Val or Phe
  Variant (41)..(42): Xaa in position 41 to 42 is any amino acid
  Variant (43)..(43): Xaa in position 43 is Ala, Val or Thr
  Variant (44)..(44): Xaa in position 44 is Gly, Asp or Asn
  Variant (45)..(45): Xaa in position 45 is Met, Leu, Val or Ala
  Variant (46)..(46): Xaa in position 46 is Val, Ile or Leu
  Variant (47)..(47): Xaa in position 47 is Ile, Leu, Val or Phe
  Variant (48)..(48): Xaa in position 48 is Val, Ile or Leu
  Variant (49)..(49): Xaa in position 49 is Ser, Thr or Cys

SEQ ID NO: 46508 - protein, 34 aa, Artificial sequence; identical to SEQ ID NO: 21851
  Consensus
  Variant (1)..(1): Xaa in position 1 is Ile, Leu or Val
  Variant (2)..(2): Xaa in position 2 is Leu, Ile or Val
  Variant (3)..(3): Xaa in position 3 is any amino acid
  Variant (6)..(6): Xaa in position 6 is Thr, Ala or Ser
  Variant (8)..(8): Xaa in position 8 is Val, Ile or Leu
  Variant (10)..(11): Xaa in position 10 to 11 is any amino acid
  Variant (12)..(12): Xaa in position 12 is Pro or Ser
  Variant (13)..(13): Xaa in position 13 is Leu or Met
  Variant (14)..(15): Xaa in position 14 to 15 is any amino acid
  Variant (16)..(16): Xaa in position 16 is Met or Ile
  Variant (18)..(18): Xaa in position 18 is any amino acid
  Variant (19)..(19): Xaa in position 19 is Val, Ala or Ile
  Variant (21)..(21): Xaa in position 21 is any amino acid
  Variant (23)..(23): Xaa in position 23 is Pro or Ala
  Variant (25)..(25): Xaa in position 25 is Leu, Val or Ile
  Variant (27)..(27): Xaa in position 27 is Leu or Phe
  Variant (32)..(32): Xaa in position 32 is Gly or Ser
  Variant (33)..(33): Xaa in position 33 is Pro or Ala

SEQ ID NO: 46509 - protein, 30 aa, Artificial sequence; identical to SEQ ID NO: 21852
  Consensus
  Variant (2)..(2): Xaa in position 2 is Leu or Met
  Variant (3)..(3): Xaa in position 3 is Ala, Ile or Val
  Variant (5)..(5): Xaa in position 5 is Gln or Lys
  Variant (7)..(8): Xaa in position 7 to 8 is Val, Ile or Leu
  Variant (9)..(9): Xaa in position 9 is any amino acid
  Variant (11)..(11): Xaa in position 11 is Asp or His
  Variant (14)..(17): Xaa in position 14 to 17 is any amino acid
  Variant (19)..(19): Xaa in position 19 is Gln or Glu
  Variant (21)..(21): Xaa in position 21 is Leu or Phe
  Variant (22)..(22): Xaa in position 22 is Leu, Ile or Val
  Variant (23)..(23): Xaa in position 23 is Glu, Gln or Thr
  Variant (25)..(25): Xaa in position 25 is Ile, Phe or Leu
  Variant (26)..(26): Xaa in position 26 is any amino acid
  Variant (27)..(27): Xaa in position 27 is Ile, Val, Leu or Met

SEQ ID NO: 46510 - protein, 23 aa, Artificial sequence
  Consensus
  Variant (3)..(4): Xaa in position 3 to 4 is any amino acid
  Variant (6)..(6): Xaa in position 6 is any amino acid
  Variant (7)..(7): Xaa in position 7 is Phe, Leu or Tyr
  Variant (8)..(8): Xaa in position 8 is Ile or Val
  Variant (10)..(10): Xaa in position 10 is Ala or Ser
  Variant (11)..(11): Xaa in position 11 is Leu or Met
  Variant (12)..(12): Xaa in position 12 is Arg or Cys
  Variant (15)..(15): Xaa in position 15 is Ala, Thr or Ser
  Variant (16)..(16): Xaa in position 16 is Thr, Ser or Ile
  Variant (18)..(18): Xaa in position 18 is Ala or Val
  Variant (19)..(19): Xaa in position 19 is any amino acid
  Variant (21)..(21): Xaa in position 21 is any amino acid
  Variant (22)..(22): Xaa in position 22 is His or Asn
HDXXMXXXQXXXHFXXFXXGXXL

SEQ ID NO: 46511 - protein, 37 aa, Artificial sequence; identical to SEQ ID NO: 21854
  Consensus
  Variant (4)..(4): Xaa in position 4 is Ile, Met, Leu or Phe
  Variant (5)..(5): Xaa in position 5 is Tyr or Phe
  Variant (6)..(6): Xaa in position 6 is Arg, Gln or Cys
  Variant (10)..(10): Xaa in position 10 is Ala or Ile
  Variant (11)..(11): Xaa in position 11 is Met, Leu, Val or Ile
  Variant (12)..(12): Xaa in position 12 is Val, Ile or Leu
  Variant (17)..(17): Xaa in position 17 is Ala, Gly or Thr
  Variant (19)..(21): Xaa in position 19 to 21 is any amino acid
  Variant (24)..(24): Xaa in position 24 is Ala or Gly
  Variant (28)..(28): Xaa in position 28 is Met, Leu or Phe
  Variant (29)..(29): Xaa in position 29 is Ser, Asp or Ala
  Variant (30)..(32): Xaa in position 30 to 32 is any amino acid
  Variant (33)..(33): Xaa in position 33 is Asn or Ser
  Variant (34)..(34): Xaa in position 34 is Leu, Ile, Val or Gln
  Variant (35)..(35): Xaa in position 35 is any amino acid
  Variant (36)..(36): Xaa in position 36 is Leu, Met, Val or Ala

SEQ ID NO: 46512 - DNA, 1071 bp, Escherichia coli K12; identical to SEQ ID NO: 1333
  CDS (1)..(1071)

SEQ ID NO: 46513 - protein, 356 aa, Escherichia coli K12; identical to SEQ ID NO: 1334

SEQ ID NO: 46514 - DNA, 1235 bp, Salmonella typhimurium; identical to SEQ ID NO: 1325
  CDS (165)..(1235)

SEQ ID NO: 46515 - protein, 356 aa, Salmonella typhimurium; identical to SEQ ID NO: 1326

SEQ ID NO: 46516 - DNA, 1086 bp, Deinococcus radiodurans; identical to SEQ ID NO: 1327
  CDS (1)..(1086)

SEQ ID NO: 46517 - protein, 361 aa, Deinococcus radiodurans; identical to SEQ ID NO: 1328

SEQ ID NO: 46518 - DNA, 1056 bp, Neisseria meningitidis; identical to SEQ ID NO: 1329
  CDS (1)..(1056)

SEQ ID NO: 46519 - protein, 351 aa, Neisseria meningitidis; identical to SEQ ID NO: 1330

SEQ ID NO: 46520 - DNA, 1047 bp, Yersinia pestis; identical to SEQ ID NO: 1331
  CDS (1)..(1047)

SEQ ID NO: 46521 - protein, 348 aa, Yersinia pestis; identical to SEQ ID NO: 1332

SEQ ID NO: 46522 - DNA, 1047 bp, Salmonella enterica subsp. enterica serovar Typhi; identical to SEQ ID NO: 1575
  CDS (1)..(1047)

SEQ ID NO: 46523 - protein, 348 aa, Salmonella enterica subsp. enterica serovar Typhi; identical to SEQ ID NO: 1576

SEQ ID NO: 46524 - DNA, 1047 bp, Escherichia coli; identical to SEQ ID NO: 1323
  CDS (1)..(1047)

SEQ ID NO: 46525 - protein, 348 aa, Escherichia coli; identical to SEQ ID NO: 1324

SEQ ID NO: 46526 - DNA, 1188 bp, Escherichia coli; identical to SEQ ID NO: 1579
  CDS (92)..(1144)

SEQ ID NO: 46527 - protein, 350 aa, Escherichia coli; identical to SEQ ID NO: 1580

SEQ ID NO: 46528 - DNA, 1131 bp, Nostoc sp. PCC 7120; identical to SEQ ID NO: 1335
  CDS (1)..(1131)

SEQ ID NO: 46529 - protein, 376 aa, Nostoc sp. PCC 7120; identical to SEQ ID NO: 1336

SEQ ID NO: 46530 - DNA, 1053 bp, Salmonella enterica subsp. enterica serovar Typhi; identical to SEQ ID NO: 1337
  CDS (1)..(1053)

SEQ ID NO: 46531 - protein, 350 aa, Salmonella enterica subsp. enterica serovar Typhi; identical to SEQ ID NO: 1338

SEQ ID NO: 46532 - DNA, 1077 bp, Pseudomonas aeruginosa; identical to SEQ ID NO: 1339
  CDS (1)..(1077)

SEQ ID NO: 46533 - protein, 358 aa, Pseudomonas aeruginosa; identical to SEQ ID NO: 1340

SEQ ID NO: 46534 - DNA, 1047 bp, Buchnera sp; identical to SEQ ID NO: 1341
  CDS (1)..(1047)

SEQ ID NO: 46535 - protein, 348 aa, Buchnera sp; identical to SEQ ID NO: 1342

SEQ ID NO: 46536 - DNA, 1032 bp, Streptococcus pneumoniae; identical to SEQ ID NO: 1589
  CDS (1)..(1032)

SEQ ID NO: 46537 - protein, 343 aa, Streptococcus pneumoniae; identical to SEQ ID NO: 1590

SEQ ID NO: 46538 - DNA, 1074 bp, Vibrio cholerae; identical to SEQ ID NO: 1343
  CDS (1)..(1074)

SEQ ID NO: 46539 - protein, 357 aa, Vibrio cholerae; identical to SEQ ID NO: 1344

SEQ ID NO: 46540 - DNA, 1038 bp, Lactococcus lactis subsp. lactis; identical to SEQ ID NO: 1345
  CDS (1)..(1038)

SEQ ID NO: 46541 - protein, 345 aa, Lactococcus lactis subsp. lactis; identical to SEQ ID NO: 1346

SEQ ID NO: 46542 - DNA, 1023 bp, Lactococcus lactis subsp. lactis; identical to SEQ ID NO: 1347
  CDS (1)..(1023)

SEQ ID NO: 46543 - protein, 340 aa, Lactococcus lactis subsp. lactis; identical to SEQ ID NO: 1348

SEQ ID NO: 46544 - DNA, 1032 bp, Streptococcus pneumoniae; identical to SEQ ID NO: 1597
  CDS (1)..(1032)

SEQ ID NO: 46545 - protein, 343 aa, Streptococcus pneumoniae; identical to SEQ ID NO: 1350

SEQ ID NO: 46546 - DNA, 1095 bp, Pseudomonas aeruginosa; identical to SEQ ID NO: 1351
  CDS (1)..(1095)

SEQ ID NO: 46547 - protein, 364 aa, Pseudomonas aeruginosa; identical to SEQ ID NO: 1352

SEQ ID NO: 46548 - DNA, 1110 bp, Caulobacter crescentus; identical to SEQ ID NO: 1353
  CDS (1)..(1110)

SEQ ID NO: 46549 - protein, 369 aa, Caulobacter crescentus; identical to SEQ ID NO: 1354

SEQ ID NO: 46550 - DNA, 1143 bp, Xylella fastidiosa; identical to SEQ ID NO: 1603
  CDS (1)..(1143)

SEQ ID NO: 46551 - protein, 380 aa, Xylella fastidiosa; identical to SEQ ID NO: 1604

SEQ ID NO: 46552 - DNA, 1047 bp, Buchnera aphidicola; identical to SEQ ID NO: 1357
  CDS (1)..(1047)

SEQ ID NO: 46553 - protein, 348 aa, Buchnera aphidicola; identical to SEQ ID NO: 1358

SEQ ID NO: 46554 - DNA, 1089 bp, Haemophilus influenzae; identical to SEQ ID NO: 1359
  CDS (1)..(1089)

SEQ ID NO: 46555 - protein, 362 aa, Haemophilus influenzae; identical to SEQ ID NO: 1360

SEQ ID NO: 46556 - DNA, 1502 bp, Candida albicans; identical to SEQ ID NO: 1361
  CDS (336)..(1442)

SEQ ID NO: 46557 - protein, 368 aa, Candida albicans; identical to SEQ ID NO: 1362

SEQ ID NO: 46558 - DNA, 1113 bp, Saccharomyces cerevisiae; identical to SEQ ID NO: 1363
  CDS (1)..(1113)

SEQ ID NO: 46559 - protein, 370 aa, Saccharomyces cerevisiae; identical to SEQ ID NO: 1364

SEQ ID NO: 46560 - DNA, 2048 bp, Saccharomyces cerevisiae; identical to SEQ ID NO: 1365
  CDS (619)..(1731)

SEQ ID NO: 46561 - protein, 370 aa, Saccharomyces cerevisiae; identical to SEQ ID NO: 1366

SEQ ID NO: 46562 - DNA, 1107 bp, Schizosaccharomyces pombe; identical to SEQ ID NO: 1367
  CDS (1)..(1107)

SEQ ID NO: 46563 - protein, 368 aa, Schizosaccharomyces pombe; identical to SEQ ID NO: 1368

SEQ ID NO: 46564 - DNA, 1089 bp, Amycolatopsis orientalis; identical to SEQ ID NO: 1369
  CDS (1)..(1089)

SEQ ID NO: 46565 - protein, 362 aa, Amycolatopsis orientalis; identical to SEQ ID NO: 1370

SEQ ID NO: 46566 - DNA, 1248 bp, Corynebacterium glutamicum; identical to SEQ ID NO: 1373
  CDS (101)..(1228)

SEQ ID NO: 46567 - protein, 375 aa, Corynebacterium glutamicum; identical to SEQ ID NO: 1374

SEQ ID NO: 46568 - DNA, 1083 bp, Methylophilus methylotrophus; identical to SEQ ID NO: 1375
  CDS (1)..(1083)

SEQ ID NO: 46569 - protein, 360 aa, Methylophilus methylotrophus; identical to SEQ ID NO: 1376

SEQ ID NO: 46570 - DNA, 1047 bp, Yersinia pseudotuberculosis IP 32953; identical to SEQ ID NO: 1623
  CDS (1)..(1047)

SEQ ID NO: 46571 - protein, 348 aa, Yersinia pseudotuberculosis IP 32953; identical to SEQ ID NO: 1624

SEQ ID NO: 46572 - DNA, 1053 bp, Yersinia pseudotuberculosis IP 32953; identical to SEQ ID NO: 1487
  CDS (1)..(1053)

SEQ ID NO: 46573 - protein, 350 aa, Yersinia pseudotuberculosis IP 32953; identical to SEQ ID NO: 1488

SEQ ID NO: 46574 - DNA, 1107 bp, Debaryomyces hansenii CBS767; identical to SEQ ID NO: 1377
  CDS (1)..(1107)

SEQ ID NO: 46575 - protein, 368 aa, Debaryomyces hansenii CBS767; identical to SEQ ID NO: 1378

SEQ ID NO: 46576 - DNA, 1074 bp, Yarrowia lipolytica CLIB99; identical to SEQ ID NO: 1379
  CDS (1)..(1074)

SEQ ID NO: 46577 - protein, 357 aa, Yarrowia lipolytica CLIB99; identical to SEQ ID NO: 1380

SEQ ID NO: 46578 - DNA, 1089 bp, Yarrowia lipolytica CLIB99; identical to SEQ ID NO: 1381
  CDS (1)..(1089)

SEQ ID NO: 46579 - protein, 362 aa, Yarrowia lipolytica CLIB99; identical to SEQ ID NO: 1382

SEQ ID NO: 46580 - DNA, 1119 bp, Kluyveromyces lactis NRRL Y; identical to SEQ ID NO: 1383
  CDS (1)..(1119)

SEQ ID NO: 46581 - protein, 372 aa, Kluyveromyces lactis NRRL Y; identical to SEQ ID NO: 1384

SEQ ID NO: 46582 - DNA, 1095 bp, Kluyveromyces lactis NRRL Y; identical to SEQ ID NO: 1385
  CDS (1)..(1095)

SEQ ID NO: 46583 - protein, 364 aa, Kluyveromyces lactis NRRL Y; identical to SEQ ID NO: 1386

SEQ ID NO: 46584 - DNA, 1074 bp, Erwinia carotovora; identical to SEQ ID NO: 1387
  CDS (1)..(1074)

SEQ ID NO: 46585 - protein, 357 aa, Erwinia carotovora; identical to SEQ ID NO: 1388

SEQ ID NO: 46586 - DNA, 1047 bp, Erwinia carotovora; identical to SEQ ID NO: 1389
  CDS (1)..(1047)

SEQ ID NO: 46587 - protein, 348 aa, Erwinia carotovora; identical to SEQ ID NO: 1390

SEQ ID NO: 46588 - DNA, 1056 bp, Erwinia carotovora; identical to SEQ ID NO: 1391
  CDS (1)..(1056)

SEQ ID NO: 46589 - protein, 351 aa, Erwinia carotovora; identical to SEQ ID NO: 1392

SEQ ID NO: 46590 - DNA, 1113 bp, Acinetobacter sp; identical to SEQ ID NO: 1393
  CDS (1)..(1113)

SEQ ID NO: 46591 - protein, 370 aa, Acinetobacter sp; identical to SEQ ID NO: 1394

SEQ ID NO: 46592 - DNA, 1056 bp, Acinetobacter sp; identical to SEQ ID NO: 1395
  CDS (1)..(1056)

SEQ ID NO: 46593 - protein, 351 aa, Acinetobacter sp; identical to SEQ ID NO: 1396

SEQ ID NO: 46594 - DNA, 1119 bp, Candida glabrata CBS138; identical to SEQ ID NO: 1397
  CDS (1)..(1119)

SEQ ID NO: 46595 - protein, 372 aa, Candida glabrata CBS138; identical to SEQ ID NO: 1398

SEQ ID NO: 46596 - DNA, 1071 bp, Candida glabrata CBS138; identical to SEQ ID NO: 1399
  CDS (1)..(1071)

SEQ ID NO: 46597 - protein, 356 aa, Candida glabrata CBS138; identical to SEQ ID NO: 1400

SEQ ID NO: 46598 - DNA, 1083 bp, Photobacterium profundum; identical to SEQ ID NO: 1401
  CDS (1)..(1083)

SEQ ID NO: 46599 - protein, 360 aa, Photobacterium profundum; identical to SEQ ID NO: 1402

SEQ ID NO: 46600 - DNA, 1053 bp, Photobacterium profundum; identical to SEQ ID NO: 1403
  CDS (1)..(1053)

SEQ ID NO: 46601 - protein, 350 aa, Photobacterium profundum; identical to SEQ ID NO: 1404

SEQ ID NO: 46602 - DNA, 1113 bp, Photobacterium profundum; identical to SEQ ID NO: 1405
  CDS (1)..(1113)

SEQ ID NO: 46603 - protein, 370 aa, Photobacterium profundum; identical to SEQ ID NO: 1406

SEQ ID NO: 46604 - DNA, 1056 bp, Photobacterium profundum; identical to SEQ ID NO: 1407
  CDS (1)..(1056)

SEQ ID NO: 46605 - protein, 351 aa, Photobacterium profundum; identical to SEQ ID NO: 1408

SEQ ID NO: 46606 - DNA, 1092 bp, Parachlamydia sp; identical to SEQ ID NO: 1409
  CDS (1)..(1092)

SEQ ID NO: 46607 - protein, 363 aa, Parachlamydia sp; identical to SEQ ID NO: 1410

SEQ ID NO: 46608 - DNA, 1095 bp, Rhodopseudomonas palustris; identical to SEQ ID NO: 1411
  CDS (1)..(1095)

SEQ ID NO: 46609 - protein, 364 aa, Rhodopseudomonas palustris; identical to SEQ ID NO: 1412

SEQ ID NO: 46610 - DNA, 1100 bp, Amycolatopsis methanolica; identical to SEQ ID NO: 1413
  CDS (1)..(1086)

SEQ ID NO: 46611 - protein, 361 aa, Amycolatopsis methanolica; identical to SEQ ID NO: 1414

SEQ ID NO: 46612 - DNA, 1071 bp, Treponema denticola; identical to SEQ ID NO: 1415
  CDS (1)..(1071)

SEQ ID NO: 46613 - protein, 356 aa, Treponema denticola; identical to SEQ ID NO: 1416

SEQ ID NO: 46614 - DNA, 1020 bp, Geobacter sulfurreducens; identical to SEQ ID NO: 1667
  CDS (1)..(1020)

SEQ ID NO: 46615 - protein, 339 aa, Geobacter sulfurreducens; identical to SEQ ID NO: 1668

SEQ ID NO: 46616 - DNA, 1068 bp, Geobacter sulfurreducens; identical to SEQ ID NO: 1417
  CDS (1)..(1068)

SEQ ID NO: 46617 - protein, 355 aa, Geobacter sulfurreducens; identical to SEQ ID NO: 1418

SEQ ID NO: 46618 - DNA, 1122 bp, Ashbya gossypii; identical to SEQ ID NO: 1421
  CDS (1)..(1122)

SEQ ID NO: 46619 - protein, 373 aa, Ashbya gossypii; identical to SEQ ID NO: 1422

SEQ ID NO: 46620 - DNA, 1098 bp, Amycolatopsis balhimycina; identical to SEQ ID NO: 1423
  CDS (1)..(1098)

SEQ ID NO: 46621 - protein, 365 aa, Amycolatopsis balhimycina; identical to SEQ ID NO: 1424

SEQ ID NO: 46622 - DNA, 1053 bp, Vibrio vulnificus; identical to SEQ ID NO: 1675
  CDS (1)..(1053)

SEQ ID NO: 46623 - protein, 350 aa, Vibrio vulnificus; identical to SEQ ID NO: 1676

SEQ ID NO: 46624 - DNA, 1047 bp, Photorhabdus luminescens; identical to SEQ ID NO: 1427
  CDS (1)..(1047)

SEQ ID NO: 46625 - protein, 348 aa, Photorhabdus luminescens; identical to SEQ ID NO: 1428

SEQ ID NO: 46626 - DNA, 1053 bp, Photorhabdus luminescens; identical to SEQ ID NO: 1429
  CDS (1)..(1053)

SEQ ID NO: 46627 - protein, 350 aa, Photorhabdus luminescens; identical to SEQ ID NO: 1430

SEQ ID NO: 46628 - DNA, 1095 bp, Photorhabdus luminescens; identical to SEQ ID NO: 1431
  CDS (1)..(1095)

SEQ ID NO: 46629 - protein, 364 aa, Photorhabdus luminescens; identical to SEQ ID NO: 1432

SEQ ID NO: 46630 - DNA, 1119 bp, Gloeobacter violaceus; identical to SEQ ID NO: 1433
  CDS (1)..(1119)

SEQ ID NO: 46631 - protein, 372 aa, Gloeobacter violaceus; identical to SEQ ID NO: 1434

SEQ ID NO: 46632 - DNA, 1107 bp, Chromobacterium violaceum; identical to SEQ ID NO: 1435
  CDS (1)..(1107)

SEQ ID NO: 46633 - protein, 368 aa, Chromobacterium violaceum; identical to SEQ ID NO: 1436

SEQ ID NO: 46634 - DNA, 1059 bp, Chromobacterium violaceum; identical to SEQ ID NO: 1437
  CDS (1)..(1059)

SEQ ID NO: 46635 - protein, 352 aa, Chromobacterium violaceum; identical to SEQ ID NO: 1438

SEQ ID NO: 46636 - DNA, 1140 bp, Neurospora crassa; identical to SEQ ID NO: 1439
  CDS (1)..(1140)

SEQ ID NO: 46637 - protein, 379 aa, Neurospora crassa; identical to SEQ ID NO: 1440

SEQ ID NO: 46638 - DNA, 1092 bp, Neurospora crassa; identical to SEQ ID NO: 1441
  CDS (1)..(1092)

SEQ ID NO: 46639 - protein, 363 aa, Neurospora crassa; identical to SEQ ID NO: 1442

SEQ ID NO: 46640 - DNA, 1068 bp, Synechococcus sp; identical to SEQ ID NO: 1443
  CDS (1)..(1068)

SEQ ID NO: 46641 - protein, 355 aa, Synechococcus sp; identical to SEQ ID NO: 1444

SEQ ID NO: 46642 - DNA, 1053 bp, Rhodopirellula baltica; identical to SEQ ID NO: 1445
  CDS (1)..(1053)

SEQ ID NO: 46643 - protein, 350 aa, Rhodopirellula baltica; identical to SEQ ID NO: 1446

SEQ ID NO: 46644 - DNA, 1068 bp, Prochlorococcus marinus subsp; identical to SEQ ID NO: 1447
  CDS (1)..(1068)

SEQ ID NO: 46645 - protein, 355 aa, Prochlorococcus marinus subsp; identical to SEQ ID NO: 1448

SEQ ID NO: 46646 - DNA, 1083 bp, Prochlorococcus marinus; identical to SEQ ID NO: 1449
  CDS (1)..(1083)

SEQ ID NO: 46647 - protein, 360 aa, Prochlorococcus marinus; identical to SEQ ID NO: 1450

SEQ ID NO: 46648 - DNA, 1074 bp, Prochlorococcus marinus; identical to SEQ ID NO: 1451
  CDS (1)..(1074)

SEQ ID NO: 46649 - protein, 357 aa, Prochlorococcus marinus; identical to SEQ ID NO: 1452

SEQ ID NO: 46650 - DNA, 1113 bp, Haemophilus ducreyi; identical to SEQ ID NO: 1453
  CDS (1)..(1113)

SEQ ID NO: 46651 - protein, 370 aa, Haemophilus ducreyi; identical to SEQ ID NO: 1454

SEQ ID NO: 46652 - DNA, 1080 bp, Haemophilus ducreyi; identical to SEQ ID NO: 1455
  CDS (1)..(1080)

SEQ ID NO: 46653 - protein, 359 aa, Haemophilus ducreyi; identical to SEQ ID NO: 1456

SEQ ID NO: 46654 - DNA, 1086 bp, Candidatus Blochmannia floridanus; identical to SEQ ID NO: 1457
  CDS (1)..(1086)

SEQ ID NO: 46655 - protein, 361 aa, Candidatus Blochmannia floridanus; identical to SEQ ID NO: 1458

SEQ ID NO: 46656 - DNA, 1074 bp, Bordetella pertussis; identical to SEQ ID NO: 1459
  CDS (1)..(1074)

SEQ ID NO: 46657 - protein, 357 aa, Bordetella pertussis; identical to SEQ ID NO: 1460

SEQ ID NO: 46658 - DNA, 1119 bp, Bordetella bronchiseptica; identical to SEQ ID NO: 1461
  CDS (1)..(1119)

SEQ ID NO: 46659 - protein, 372 aa, Bordetella bronchiseptica; identical to SEQ ID NO: 1462

SEQ ID NO: 46660 - DNA, 1179 bp, Nitrosomonas europaea; identical to SEQ ID NO: 1463
  CDS (1)..(1179)

SEQ ID NO: 46661 - protein, 392 aa, Nitrosomonas europaea; identical to SEQ ID NO: 1464

SEQ ID NO: 46662 - DNA, 1083 bp, Coxiella burnetii; identical to SEQ ID NO: 1465
  CDS (1)..(1083)

SEQ ID NO: 46663 - protein, 360 aa, Coxiella burnetii; identical to SEQ ID NO: 1466

SEQ ID NO: 46664 - DNA, 1143 bp, Xylella fastidiosa; identical to SEQ ID NO: 1469
  CDS (1)..(1143)

SEQ ID NO: 46665 - protein, 380 aa, Xylella fastidiosa; identical to SEQ ID NO: 1470

SEQ ID NO: 46666 - DNA, 1053 bp, Vibrio parahaemolyticus; identical to SEQ ID NO: 1471
  CDS (1)..(1053)

SEQ ID NO: 46667 - protein, 350 aa, Vibrio parahaemolyticus; identical to SEQ ID NO: 1472

SEQ ID NO: 46668 - DNA, 1053 bp, Vibrio parahaemolyticus; identical to SEQ ID NO: 1473
  CDS (1)..(1053)

SEQ ID NO: 46669 - protein, 350 aa, Vibrio parahaemolyticus; identical to SEQ ID NO: 1474

SEQ ID NO: 46670 - DNA, 1074 bp, Vibrio parahaemolyticus; identical to SEQ ID NO: 1475
  CDS (1)..(1074)

SEQ ID NO: 46671 - protein, 357 aa, Vibrio parahaemolyticus; identical to SEQ ID NO: 1476

SEQ ID NO: 46672 - DNA, 1083 bp, Pseudomonas syringae; identical to SEQ ID NO: 1477
  CDS (1)..(1083)

SEQ ID NO: 46673 - protein, 360 aa, Pseudomonas syringae; identical to SEQ ID NO: 1478

SEQ ID NO: 46674 - DNA, 1077 bp, Pseudomonas syringae; identical to SEQ ID NO: 1479
  CDS (1)..(1077)

SEQ ID NO: 46675 - protein, 358 aa, Pseudomonas syringae; identical to SEQ ID NO: 1480

SEQ ID NO: 46676 - DNA, 1062 bp, Pseudomonas putida; identical to SEQ ID NO: 1481
  CDS (1)..(1062)

SEQ ID NO: 46677 - protein, 353 aa, Pseudomonas putida; identical to SEQ ID NO: 1482

SEQ ID NO: 46678 - DNA, 1113 bp, Pseudomonas putida; identical to SEQ ID NO: 1483
  CDS (1)..(1113)

SEQ ID NO: 46679 - protein, 370 aa, Pseudomonas putida; identical to SEQ ID NO: 1484

SEQ ID NO: 46680 - DNA, 1086 bp, Bradyrhizobium japonicum; identical to SEQ ID NO: 1485
  CDS (1)..(1086)

SEQ ID NO: 46681 - protein, 361 aa, Bradyrhizobium japonicum; identical to SEQ ID NO: 1486

SEQ ID NO: 46682 - DNA, 1077 bp, Yersinia pestis; identical to SEQ ID NO: 1489
  CDS (1)..(1077)

SEQ ID NO: 46683 - protein, 358 aa, Yersinia pestis; identical to SEQ ID NO: 1490

SEQ ID NO: 46684 - DNA, 1038 bp, Wigglesworthia glossinidia brevipalpis; identical to SEQ ID NO: 1491
  CDS (1)..(1038)

SEQ ID NO: 46685 - protein, 345 aa, Wigglesworthia glossinidia brevipalpis; identical to SEQ ID NO: 1492

SEQ ID NO: 46686 - DNA, 1071 bp, Vibrio vulnificus; identical to SEQ ID NO: 1739
  CDS (1)..(1071)

SEQ ID NO: 46687 - protein, 356 aa, Vibrio vulnificus; identical to SEQ ID NO: 1740

SEQ ID NO: 46688 - DNA, 1053 bp, Vibrio vulnificus; identical to SEQ ID NO: 1495
  CDS (1)..(1053)

SEQ ID NO: 46689 - protein, 350 aa, Vibrio vulnificus; identical to SEQ ID NO: 1496

SEQ ID NO: 46690 - DNA, 1071 bp, Vibrio vulnificus; identical to SEQ ID NO: 1497
  CDS (1)..(1071)

SEQ ID NO: 46691 - protein, 356 aa, Vibrio vulnificus; identical to SEQ ID NO: 1498

SEQ ID NO: 46692 - DNA, 1062 bp, Synechococcus elongatus; identical to SEQ ID NO: 1499
  CDS (1)..(1062)

SEQ ID NO: 46693 - protein, 353 aa, Synechococcus elongatus; identical to SEQ ID NO: 1500

SEQ ID NO: 46694 - DNA, 1032 bp, Streptococcus mutans; identical to SEQ ID NO: 1501
  CDS (1)..(1032)

SEQ ID NO: 46695 - protein, 343 aa, Streptococcus mutans; identical to SEQ ID NO: 1502

SEQ ID NO: 46696 - DNA, 1035 bp, Streptococcus mutans; identical to SEQ ID NO: 1503
  CDS (1)..(1035)

SEQ ID NO: 46697 - protein, 344 aa, Streptococcus mutans; identical to SEQ ID NO: 1504

SEQ ID NO: 46698 - DNA, 1008 bp, Streptococcus agalactiae; identical to SEQ ID NO: 1505
  CDS (1)..(1008)

SEQ ID NO: 46699 - protein, 335 aa, Streptococcus agalactiae; identical to SEQ ID NO: 1506

SEQ ID NO: 46700 - DNA, 1065 bp, Shewanella oneidensis; identical to SEQ ID NO: 1507
  CDS (1)..(1065)

SEQ ID NO: 46701 - protein, 354 aa, Shewanella oneidensis; identical to SEQ ID NO: 1508

SEQ ID NO: 46702 - DNA, 1092 bp, Shewanella oneidensis; identical to SEQ ID NO: 1509
  CDS (1)..(1092)

SEQ ID NO: 46703 - protein, 363 aa, Shewanella oneidensis; identical to SEQ ID NO: 1510

SEQ ID NO: 46704 - DNA, 1059 bp, Shewanella oneidensis; identical to SEQ ID NO: 1511
  CDS (1)..(1059)

SEQ ID NO: 46705 - protein, 352 aa, Shewanella oneidensis; identical to SEQ ID NO: 1512

SEQ ID NO: 46706 - DNA, 1053 bp, Escherichia coli O6; identical to SEQ ID NO: 1513
  CDS (1)..(1053)

SEQ ID NO: 46707 - protein, 350 aa, Escherichia coli O6; identical to SEQ ID NO: 1514

SEQ ID NO: 46708 - DNA, 1170 bp, Corynebacterium efficiens; identical to SEQ ID NO: 1515
  CDS (1)..(1170)

SEQ ID NO: 46709 - protein, 389 aa, Corynebacterium efficiens; identical to SEQ ID NO: 1516

SEQ ID NO: 46710 - DNA, 1134 bp, Bifidobacterium longum; identical to SEQ ID NO: 1517
  CDS (1)..(1134)

SEQ ID NO: 46711 - protein, 377 aa, Bifidobacterium longum; identical to SEQ ID NO: 1518

SEQ ID NO: 46712 - DNA, 1233 bp, Bifidobacterium longum; identical to SEQ ID NO: 1519
  CDS (1)..(1233)

SEQ ID NO: 46713 - protein, 410 aa, Bifidobacterium longum; identical to SEQ ID NO: 1520

SEQ ID NO: 46714 - DNA, 1221 bp, Phytophthora infestans; identical to SEQ ID NO: 1521
  CDS (20)..(1153)

SEQ ID NO: 46715 - protein, 377 aa, Phytophthora infestans; identical to SEQ ID NO: 1522

SEQ ID NO: 46716 - DNA, 1062 bp, Chlorobium tepidum; identical to SEQ ID NO: 1523
  CDS (1)..(1062)

SEQ ID NO: 46717 - protein, 353 aa, Chlorobium tepidum; identical to SEQ ID NO: 1524

SEQ ID NO: 46718 - DNA, 1074 bp, Xanthomonas campestris; identical to SEQ ID NO: 1525
  CDS (1)..(1074)

SEQ ID NO: 46719 - protein, 357 aa, Xanthomonas campestris; identical to SEQ ID NO: 1526

SEQ ID NO: 46720 - DNA, 1074 bp, Xanthomonas axonopodis; identical to SEQ ID NO: 1527
  CDS (1)..(1074)

SEQ ID NO: 46721 - protein, 357 aa, Xanthomonas axonopodis; identical to SEQ ID NO: 1528

SEQ ID NO: 46722 - DNA, 1080 bp, Ralstonia solanacearum; identical to SEQ ID NO: 1529
  CDS (1)..(1080)

SEQ ID NO: 46723 - protein, 359 aa, Ralstonia solanacearum; identical to SEQ ID NO: 1530

SEQ ID NO: 46724 - DNA, 1179 bp, Ralstonia solanacearum; identical to SEQ ID NO: 1531
  CDS (1)..(1179)

SEQ ID NO: 46725 - protein, 392 aa, Ralstonia solanacearum; identical to SEQ ID NO: 1532

SEQ ID NO: 46726 - DNA, 1065 bp, Synechococcus sp; identical to SEQ ID NO: 1533
  CDS (1)..(1065)

SEQ ID NO: 46727 - protein, 354 aa, Synechococcus sp; identical to SEQ ID NO: 1534

SEQ ID NO: 46728 - DNA, 1035 bp, Escherichia coli; identical to SEQ ID NO: 1535
  CDS (1)..(1035)

SEQ ID NO: 46729 - protein, 344 aa, Escherichia coli; identical to SEQ ID NO: 1536

SEQ ID NO: 46730 - DNA, 1200 bp, Stigmatella aurantiaca; identical to SEQ ID NO: 1537
  CDS (62)..(1147)

SEQ ID NO: 46731 - protein, 361 aa, Stigmatella aurantiaca; identical to SEQ ID NO: 1538

SEQ ID NO: 46732 - DNA, 1092 bp, Rhizobium loti; identical to SEQ ID NO: 1539
  CDS (1)..(1092)

SEQ ID NO: 46733 - protein, 363 aa, Rhizobium loti; identical to SEQ ID NO: 1540

SEQ ID NO: 46734 - DNA, 1083 bp, Amycolatopsis mediterranei; identical to SEQ ID NO: 1541
  CDS (1)..(1083)

SEQ ID NO: 46735 - protein, 360 aa, Amycolatopsis mediterranei; identical to SEQ ID NO: 1542

SEQ ID NO: 46736 - DNA, 1053 bp, Pasteurella multocida; identical to SEQ ID NO: 1543
  CDS (1)..(1053)

SEQ ID NO: 46737 - protein, 350 aa, Pasteurella multocida; identical to SEQ ID NO: 1544

SEQ ID NO: 46738 - DNA, 1086 bp, Pasteurella multocida; identical to SEQ ID NO: 1545
  CDS (1)..(1086)

SEQ ID NO: 46739 - protein, 361 aa, Pasteurella multocida; identical to SEQ ID NO: 1546

SEQ ID NO: 46740 - DNA, 1089 bp, Emericella nidulans; identical to SEQ ID NO: 1549
  CDS (1)..(1089)

SEQ ID NO: 46741 - protein, 362 aa, Emericella nidulans; identical to SEQ ID NO: 1550

SEQ ID NO: 46742 - DNA, 1239 bp, Vibrio cholerae; identical to SEQ ID NO: 1551
  CDS (114)..(1175)

SEQ ID NO: 46743 - protein, 353 aa, Vibrio cholerae; identical to SEQ ID NO: 1552

SEQ ID NO: 46744 - DNA, 1113 bp, Candida albicans; identical to SEQ ID NO: 1797
  CDS (1)..(1113)

SEQ ID NO: 46745 - protein, 370 aa, Candida albicans; identical to SEQ ID NO: 1554

SEQ ID NO: 46746 - DNA, 1047 bp, Buchnera aphidicola; identical to SEQ ID NO: 1557
  CDS (1)..(1047)

SEQ ID NO: 46747 - protein, 348 aa, Buchnera aphidicola; identical to SEQ ID NO: 1558

SEQ ID NO: 46748 - DNA, 1047 bp, Erwinia herbicola; identical to SEQ ID NO: 1559
  CDS (1)..(1047)

SEQ ID NO: 46749 - protein, 348 aa, Erwinia herbicola; identical to SEQ ID NO: 1560

SEQ ID NO: 46750 - DNA, 23 bp, Artificial sequence
  Primer sequence
atgcaaaaagacgcgctgaataa

SEQ ID NO: 46751 - DNA, 21 bp, Artificial sequence
  Primer sequence
ttaagccacgcgagccgtcag

SEQ ID NO: 46752 - protein, 296 aa, Artificial sequence; identical to SEQ ID NO: 2896
  Consensus
  Variant (5)..(35): Xaa in position 5 to 35 is any amino acid
  Variant (37)..(37): Xaa in position 37 is any amino acid
  Variant (39)..(40): Xaa in position 39 to 40 is any amino acid
  Variant (42)..(42): Xaa in position 42 is any amino acid
  Variant (45)..(47): Xaa in position 45 to 47 is any amino acid
  Variant (49)..(50): Xaa in position 49 to 50 is any amino acid
  Variant (52)..(55): Xaa in position 52 to 55 is any amino acid
  Variant (57)..(66): Xaa in position 57 to 66 is any amino acid
  Variant (68)..(71): Xaa in position 68 to 71 is any amino acid
  Variant (73)..(108): Xaa in position 73 to 108 is any amino acid
  Variant (112)..(117): Xaa in position 112 to 117 is any amino acid
  Variant (120)..(122): Xaa in position 120 to 122 is any amino acid
  Variant (124)..(131): Xaa in position 124 to 131 is any amino acid
  Variant (134)..(136): Xaa in position 134 to 136 is any amino acid
  Variant (138)..(170): Xaa in position 138 to 170 is any amino acid
  Variant (173)..(179): Xaa in position 173 to 179 is any amino acid
  Variant (182)..(191): Xaa in position 182 to 191 is any amino acid
  Variant (193)..(222): Xaa in position 193 to 222 is any amino acid
  Variant (224)..(225): Xaa in position 224 to 225 is any amino acid
  Variant (227)..(227): Xaa in position 227 is any amino acid
  Variant (229)..(260): Xaa in position 229 to 260 is any amino acid
  Variant (262)..(262): Xaa in position 262 is any amino acid
  Variant (264)..(268): Xaa in position 264 to 268 is any amino acid
  Variant (270)..(288): Xaa in position 270 to 288 is any amino acid
  Variant (290)..(290): Xaa in position 290 is any amino acid
  Variant (292)..(292): Xaa in position 292 is any amino acid
  Variant (295)..(295): Xaa in position 295 is any amino acid

SEQ ID NO: 46753 - protein, 352 aa, Artificial sequence; identical to SEQ ID NO: 2895
  Consensus
  Variant (2)..(3): Xaa in position 2 to 3 is any amino acid
  Variant (5)..(11): Xaa in position 5 to 11 is any amino acid
  Variant (13)..(24): Xaa in position 13 to 24 is any amino acid
  Variant (26)..(30): Xaa in position 26 to 30 is any amino acid
  Variant (32)..(33): Xaa in position 32 to 33 is any amino acid
  Variant (35)..(35): Xaa in position 35 is any amino acid
  Variant (37)..(40): Xaa in position 37 to 40 is any amino acid
  Variant (43)..(43): Xaa in position 43 is any amino acid
  Variant (45)..(46): Xaa in position 45 to 46 is any amino acid
  Variant (51)..(51): Xaa in position 51 is any amino acid
  Variant (54)..(55): Xaa in position 54 to 55 is any amino acid
  Variant (58)..(59): Xaa in position 58 to 59 is any amino acid
  Variant (62)..(63): Xaa in position 62 to 63 is any amino acid
  Variant (65)..(76): Xaa in position 65 to 76 is any amino acid
  Variant (78)..(80): Xaa in position 78 to 80 is any amino acid
  Variant (83)..(83): Xaa in position 83 is any amino acid
  Variant (85)..(85): Xaa in position 85 is any amino acid
  Variant (91)..(93): Xaa in position 91 to 93 is any amino acid
  Variant (100)..(100): Xaa in position 100 is any amino acid
  Variant (103)..(112): Xaa in position 103 to 112 is any amino acid
  Variant (115)..(117): Xaa in position 115 to 117 is any amino acid
  Variant (119)..(119): Xaa in position 119 is any amino acid
  Variant (121)..(130): Xaa in position 121 to 130 is any amino acid
  Variant (132)..(132): Xaa in position 132 is any amino acid
  Variant (134)..(134): Xaa in position 134 is any amino acid
  Variant (136)..(136): Xaa in position 136 is any amino acid
  Variant (139)..(142): Xaa in position 139 to 142 is any amino acid
  Variant (144)..(146): Xaa in position 144 to 146 is any amino acid
  Variant (148)..(150): Xaa in position 148 to 150 is any amino acid
  Variant (152)..(152): Xaa in position 152 is any amino acid
  Variant (163)..(163): Xaa in position 163 is any amino acid
  Variant (167)..(167): Xaa in position 167 is any amino acid
  Variant (170)..(170): Xaa in position 170 is any amino acid
  Variant (173)..(173): Xaa in position 173 is any amino acid
  Variant (175)..(175): Xaa in position 175 is any amino acid
  Variant (182)..(182): Xaa in position 182 is any amino acid
  Variant (184)..(187): Xaa in position 184 to 187 is any amino acid
  Variant (189)..(190): Xaa in position 189 to 190 is any amino acid
  Variant (192)..(194): Xaa in position 192 to 194 is any amino acid
  Variant (196)..(198): Xaa in position 196 to 198 is any amino acid
  Variant (200)..(200): Xaa in position 200 is any amino acid
  Variant (202)..(207): Xaa in position 202 to 207 is any amino acid
  Variant (209)..(214): Xaa in position 209 to 214 is any amino acid
  Variant (216)..(216): Xaa in position 216 is any amino acid
  Variant (219)..(221): Xaa in position 219 to 221 is any amino acid
  Variant (223)..(224): Xaa in position 223 to 224 is any amino acid
  Variant (229)..(237): Xaa in position 229 to 237 is any amino acid
  Variant (240)..(268): Xaa in position 240 to 268 is any amino acid
  Variant (270)..(270): Xaa in position 270 is any amino acid
  Variant (273)..(273): Xaa in position 273 is any amino acid
  Variant (276)..(276): Xaa in position 276 is any amino acid
  Variant (278)..(281): Xaa in position 278 to 281 is any amino acid
  Variant (283)..(284): Xaa in position 283 to 284 is any amino acid
  Variant (286)..(291): Xaa in position 286 to 291 is any amino acid
  Variant (293)..(295): Xaa in position 293 to 295 is any amino acid
  Variant (297)..(304): Xaa in position 297 to 304 is any amino acid
  Variant (306)..(306): Xaa in position 306 is any amino acid
  Variant (308)..(308): Xaa in position 308 is any amino acid
  Variant (311)..(314): Xaa in position 311 to 314 is any amino acid
  Variant (316)..(316): Xaa in position 316 is any amino acid
  Variant (318)..(333): Xaa in position 318 to 333 is any amino acid
  Variant (336)..(336): Xaa in position 336 is any amino acid
  Variant (338)..(338): Xaa in position 338 is any amino acid
  Variant (341)..(341): Xaa in position 341 is any amino acid
  Variant (343)..(344): Xaa in position 343 to 344 is any amino acid
  Variant (346)..(347): Xaa in position 346 to 347 is any amino acid
  Variant (349)..(351): Xaa in position 349 to 351 is any amino acid

SEQ ID NO: 46754 - protein, 26 aa, Artificial sequence
  Consensus
  Variant (1)..(1): Xaa in position 1 is Asp or Asn
  Variant (2)..(2): Xaa in position 2 is any amino acid
  Variant (4)..(4): Xaa in position 4 is any amino acid
  Variant (5)..(5): Xaa in position 5 is Leu, Val, Ile, Phe, Ala or Met
  Variant (6)..(6): Xaa in position 6 is Val, Ile, Leu or Ala
  Variant (7)..(7): Xaa in position 7 is Val or Ile
  Variant (8)..(8): Xaa in position 8 is Val, Ile, Cys or Thr
  Variant (13)..(13): Xaa in position 13 is Ile, Val, Ser or Leu
  Variant (14)..(14): Xaa in position 14 is His or Asp
  Variant (15)..(15): Xaa in position 15 is Asp or Asn
  Variant (16)..(18): Xaa in position 16 to 18 is any amino acid
  Variant (19)..(19): Xaa in position 19 is Ala, Val or Gly
  Variant (20)..(20): Xaa in position 20 is any amino acid
  Variant (21)..(21): Xaa in position 21 is Glu, Asp, Ala or Gln
  Variant (23)..(23): Xaa in position 23 is Ala, Gly, Ser or Cys
  Variant (24)..(25): Xaa in position 24 to 25 is any amino acid
  Variant (26)..(26): Xaa in position 26 is Leu, Ile or Phe
XXRXXXXXGPCSXXXXXXXXXYXXXX

SEQ ID NO: 46755 - protein, 40 aa, Artificial sequence; identical to SEQ ID NO: 2890
  Consensus
  Variant (1)..(1): Xaa in position 1 is Ile, Val, Leu or Met
  Variant (2)..(2): Xaa in position 2 is Val, Ile or Leu
  Variant (5)..(5): Xaa in position 5 is Val, Ala or Thr
  Variant (7)..(7): Xaa in position 7 is Phe, Leu, Thr or Val
  Variant (8)..(8): Xaa in position 8 is Glu, Ala or Gln
  Variant (13)..(14): Xaa in position 13 to 14 is any amino acid
  Variant (15)..(15): Xaa in position 15 is any or no amino acid
  Variant (17)..(17): Xaa in position 17 is Trp or Tyr
  Variant (18)..(18): Xaa in position 18 is Lys or Arg
  Variant (20)..(20): Xaa in position 20 is Leu, Phe, Tyr or Met
  Variant (21)..(21): Xaa in position 21 is Ile, Val, Ala or Leu
  Variant (22)..(22): Xaa in position 22 is any amino acid
  Variant (23)..(23): Xaa in position 23 is Asp, Glu or Gln
  Variant (25)..(25): Xaa in position 25 is any amino acid
  Variant (26)..(26): Xaa in position 26 is Leu, Met, Ile, Val, Ala or Thr
  Variant (27)..(27): Xaa in position 27 is Asp, Asn or Ser
  Variant (28)..(31): Xaa in position 28 to 31 is any amino acid
  Variant (32)..(32): Xaa in position 32 is Ile, Val, Leu or Met
  Variant (33)..(34): Xaa in position 33 to 34 is any amino acid
  Variant (36)..(36): Xaa in position 36 is Leu, Ile, Met or Val
  Variant (37)..(38): Xaa in position 37 to 38 is any amino acid
  Variant (39)..(39): Xaa in position 39 is Ala, Ser, Gly, Val or Thr

SEQ ID NO: 46756 - protein, 58 aa, Artificial sequence; identical to SEQ ID NO: 2891
  Consensus
  Variant (1)..(1): Xaa in position 1 is Tyr, Phe or Leu
  Variant (2)..(3): Xaa in position 2 to 3 is any amino acid
  Variant (4)..(4): Xaa in position 4 is Asp or Glu
  Variant (5)..(6): Xaa in position 5 to 6 is any amino acid
  Variant (7)..(7): Xaa in position 7 is Ser, Ala, Thr or Cys
  Variant (8)..(8): Xaa in position 8 is Trp, Leu, Phe, Tyr or Val
  Variant (9)..(9): Xaa in position 9 is any amino acid
  Variant (10)..(10): Xaa in position 10 is Ala or Ser
  Variant (11)..(11): Xaa in position 11 is Ile or Val
  Variant (15)..(15): Xaa in position 15 is Thr, Ser or Asn
  Variant (16)..(16): Xaa in position 16 is Thr, Val, Ala or Ser
  Variant (17)..(17): Xaa in position 17 is Glu or Ala
  Variant (18)..(18): Xaa in position 18 is Ser, Asp or Asn
  Variant (20)..(20): Xaa in position 20 is any amino acid
  Variant (23)..(23): Xaa in position 23 is Glu, Gln, Phe or Met
  Variant (24)..(24): Xaa in position 24 is Leu, Met, Val or Ile
  Variant (25)..(25): Xaa in position 25 is Ala, Ser, Thr, Cys or Val
  Variant (27)..(27): Xaa in position 27 is Gly or Ala
  Variant (28)..(28): Xaa in position 28 is Leu, Ile, Met or Val
  Variant (29)..(30): Xaa in position 29 to 30 is any amino acid
  Variant (31)..(31): Xaa in position 31 is Pro or Ala
  Variant (32)..(32): Xaa in position 32 is Val, Ile or Thr
  Variant (34)..(34): Xaa in position 34 is Phe, Met, Tyr or Ile
  Variant (37)..(37): Xaa in position 37 is any amino acid
  Variant (38)..(38): Xaa in position 38 is Thr or Arg
  Variant (39)..(39): Xaa in position 39 is any amino acid
  Variant (41)..(41): Xaa in position 41 is any amino acid
  Variant (42)..(42): Xaa in position 42 is Leu, Ile, Val, Ala, Thr or Phe
  Variant (43)..(44): Xaa in position 43 to 44 is any amino acid
  Variant (45)..(45): Xaa in position 45 is Ala or Met
  Variant (46)..(46): Xaa in position 46 is any amino acid
  Variant (47)..(47): Xaa in position 47 is Asp, Asn or Glu
  Variant (48)..(48): Xaa in position 48 is Ala or Gly
  Variant (49)..(50): Xaa in position 49 to 50 is any amino acid
  Variant (51)..(51): Xaa in position 51 is Ala or Ser
  Variant (52)..(52): Xaa in position 52 is Ala, Ser, Val or Thr
  Variant (53)..(55): Xaa in position 53 to 55 is any amino acid
  Variant (56)..(56): Xaa in position 56 is His or Gln
  Variant (57)..(57): Xaa in position 57 is any amino acid
  Variant (58)..(58): Xaa in position 58 is Phe, Tyr, His or Val

SEQ ID NO: 46757 - protein, 25 aa, Artificial sequence
  Consensus
  Variant (1)..(1): Xaa in position 1 is Thr or Ser
  Variant (2)..(2): Xaa in position 2 is any amino acid
  Variant (5)..(7): Xaa in position 5 to 7 is any amino acid
  Variant (8)..(8): Xaa in position 8 is His or Phe
  Variant (9)..(9): Xaa in position 9 is Val, Ile, Leu or Ala
  Variant (10)..(10): Xaa in position 10 is Ile or Val
  Variant (11)..(11): Xaa in position 11 is Leu or Met
  Variant (14)..(14): Xaa in position 14 is Gly, Ser or Ala
  Variant (15)..(16): Xaa in position 15 to 16 is any amino acid
  Variant (17)..(22): Xaa in position 17 to 22 is any or no amino acid
  Variant (23)..(23): Xaa in position 23 is Pro, Thr or Ser
  Variant (25)..(25): Xaa in position 25 is Tyr, Phe or His
XXGNXXXXXXXRGXXXXXXXXXXNX

SEQ ID NO: 46758 - protein, 52 aa, Artificial sequence; identical to SEQ ID NO: 2893
  Consensus
  Variant (1)..(1): Xaa in position 1 is Leu, Ile or Val
  Variant (2)..(2): Xaa in position 2 is Met, Val, Ile or Leu
  Variant (3)..(3): Xaa in position 3 is Ile or Val
  Variant (5)..(5): Xaa in position 5 is any amino acid
  Variant (6)..(6): Xaa in position 6 is Ser, Asn or Ala
  Variant (8)..(8): Xaa in position 8 is Ala, Gly or Asp
  Variant (10)..(10): Xaa in position 10 is Ser or Cys
  Variant (11)..(11): Xaa in position 11 is any amino acid
  Variant (13)..(15): Xaa in position 13 to 15 is any amino acid
  Variant (16)..(16): Xaa in position 16 is Arg, Asn, Lys, Leu or Glu
  Variant (18)..(19): Xaa in position 18 to 19 is any amino acid
  Variant (20)..(20): Xaa in position 20 is Val or Ile
  Variant (21)..(23): Xaa in position 21 to 23 is any amino acid
  Variant (24)..(24): Xaa in position 24 is Val, Ile, Leu, Thr or Ala
  Variant (25)..(26): Xaa in position 25 to 26 is any amino acid
  Variant (27)..(27): Xaa in position 27 is Gln, Asn or Arg
  Variant (28)..(28): Xaa in position 28 is Ile, Leu, Val, Arg or Met
  Variant (29)..(30): Xaa in position 29 to 30 is any amino acid
  Variant (31)..(31): Xaa in position 31 is Gly, Asn or Asp
  Variant (32)..(34): Xaa in position 32 to 34 is any amino acid
  Variant (35)..(37): Xaa in position 35 to 37 is any or no amino acid
  Variant (38)..(38): Xaa in position 38 is Ile, Val or Leu
  Variant (39)..(39): Xaa in position 39 is any amino acid
  Variant (41)..(41): Xaa in position 41 is any amino acid
  Variant (43)..(43): Xaa in position 43 is Ile, Leu, Val, Ala or Met
  Variant (46)..(46): Xaa in position 46 is His, Phe, Asn or Tyr
  Variant (47)..(47): Xaa in position 47 is Leu or Ile
  Variant (48)..(49): Xaa in position 48 to 49 is any amino acid
  Variant (51)..(51): Xaa in position 51 is any amino acid

SEQ ID NO: 46759 - protein, 19 aa, Artificial sequence
  Consensus
  Variant (1)..(1): Xaa in position 1 is Tyr, Phe, Lys or Arg
  Variant (3)..(3): Xaa in position 3 is any amino acid
  Variant (5)..(5): Xaa in position 5 is Ile or Val
  Variant (8)..(8): Xaa in position 8 is any amino acid
  Variant (10)..(10): Xaa in position 10 is Ile, Leu or Val
  Variant (11)..(11): Xaa in position 11 is any amino acid
  Variant (12)..(12): Xaa in position 12 is Trp, Ile, Phe or Leu
  Variant (13)..(14): Xaa in position 13 to 14 is any amino acid
  Variant (15)..(15): Xaa in position 15 is Thr or Ser
  Variant (16)..(18): Xaa in position 16 to 18 is any amino acid
  Variant (19)..(19): Xaa in position 19 is Leu, Ile, Val or Phe
XGXSXTDXCXXXXXXXXXX

SEQ ID NO: 46760 - DNA, 2374 bp, Escherichia coli K12; identical to SEQ ID NO: 1805
  CDS (86)..(2281)

SEQ ID NO: 46761 - protein, 731 aa, Escherichia coli K12; identical to SEQ ID NO: 1806

SEQ ID NO: 46762 - DNA, 2961 bp, Hafnia alvei; identical to SEQ ID NO: 1807
  CDS (185)..(2404)

SEQ ID NO: 46763 - protein, 739 aa, Hafnia alvei; identical to SEQ ID NO: 1808

SEQ ID NO: 46764 - DNA, 4341 bp, Escherichia coli; identical to SEQ ID NO: 1809
  CDS (660)..(2858)

SEQ ID NO: 46765 - protein, 732 aa, Escherichia coli; identical to SEQ ID NO: 1810

SEQ ID NO: 46766 - DNA, 1850 bp, Bacillus subtilis; identical to SEQ ID NO: 1811
  CDS (312)..(1784)

SEQ ID NO: 46767 - protein, 490 aa, Bacillus subtilis; identical to SEQ ID NO: 1812

SEQ ID NO: 46768 - DNA, 3091 bp, Lactobacillus sp; identical to SEQ ID NO: 1813
  CDS (572)..(2767)

SEQ ID NO: 46769 - protein, 731 aa, Lactobacillus sp; identical to SEQ ID NO: 1814

SEQ ID NO: 46770 - DNA, 1449 bp, Bacillus halodurans; identical to SEQ ID NO: 1815
  CDS (1)..(1449)

SEQ ID NO: 46771 - protein, 482 aa, Bacillus halodurans; identical to SEQ ID NO: 1816

SEQ ID NO: 46772 - DNA, 2196 bp, Sinorhizobium meliloti; identical to SEQ ID NO: 1817
  CDS (1)..(2196)

SEQ ID NO: 46773 - protein, 731 aa, Sinorhizobium meliloti; identical to SEQ ID NO: 1818

SEQ ID NO: 46774 - DNA, 1380 bp, Listeria innocua; identical to SEQ ID NO: 1819
  CDS (1)..(1380)

SEQ ID NO: 46775 - protein, 459 aa, Listeria innocua; identical to SEQ ID NO: 1820

SEQ ID NO: 46776 - DNA, 2307 bp, Yersinia pestis; identical to SEQ ID NO: 1821
  CDS (1)..(2307)

SEQ ID NO: 46777 - protein, 768 aa, Yersinia pestis; identical to SEQ ID NO: 1822

SEQ ID NO: 46778 - DNA, 2145 bp, Salmonella enterica subsp. enterica serovar Typhi; identical to SEQ ID NO: 1823
  CDS (1)..(2145)

SEQ ID NO: 46779 - protein, 714 aa, Salmonella enterica subsp. enterica serovar Typhi; identical to SEQ ID NO: 1824

SEQ ID NO: 46780 - DNA, 1467 bp, Nostoc sp. PCC 7120; identical to SEQ ID NO: 1825
  CDS (1)..(1467)

SEQ ID NO: 46781 - protein, 488 aa, Nostoc sp. PCC 7120; identical to SEQ ID NO: 1826

SEQ ID NO: 46782 - DNA, 2163 bp, Yersinia pestis; identical to SEQ ID NO: 1827
  CDS (1)..(2163)

SEQ ID NO: 46783 - protein, 720 aa, Yersinia pestis; identical to SEQ ID NO: 1828

SEQ ID NO: 46784 - DNA, 2271 bp, Salmonella enterica subsp. enterica serovar Typhi; identical to SEQ ID NO: 1829
  CDS (1)..(2271)

SEQ ID NO: 46785 - protein, 756 aa, Salmonella enterica subsp. enterica serovar Typhi; identical to SEQ ID NO: 1830

SEQ ID NO: 46786 - DNA, 2148 bp, Escherichia coli; identical to SEQ ID NO: 1831
  CDS (1)..(2148)

SEQ ID NO: 46787 - protein, 715 aa, Escherichia coli; identical to SEQ ID NO: 1832

SEQ ID NO: 46788 - DNA, 2835 bp, Escherichia coli; identical to SEQ ID NO: 1833
  CDS (571)..(2712)

SEQ ID NO: 46789 - protein, 713 aa, Escherichia coli; identical to SEQ ID NO: 1834

SEQ ID NO: 46790 - DNA, 1446 bp, Clostridium acetobutylicum; identical to SEQ ID NO: 1835
  CDS (1)..(1446)

SEQ ID NO: 46791 - protein, 481 aa, Clostridium acetobutylicum; identical to SEQ ID NO: 1836

SEQ ID NO: 46792 - DNA, 1464 bp, Clostridium acetobutylicum; identical to SEQ ID NO: 1837
  CDS (1)..(1464)

SEQ ID NO: 46793 - protein, 487 aa, Clostridium acetobutylicum; identical to SEQ ID NO: 1838

SEQ ID NO: 46794 - DNA, 2256 bp, Pseudomonas aeruginosa; identical to SEQ ID NO: 1839
  CDS (1)..(2256)

SEQ ID NO: 46795 - protein, 751 aa, Pseudomonas aeruginosa; identical to SEQ ID NO: 1840

SEQ ID NO: 46796 - DNA, 2853 bp, Mycobacterium leprae; identical to SEQ ID NO: 1841
  CDS (1)..(2853)

SEQ ID NO: 46797 - protein, 950 aa, Mycobacterium leprae; identical to SEQ ID NO: 1842

SEQ ID NO: 46798 - DNA, 2202 bp, Vibrio cholerae; identical to SEQ ID NO: 1843
  CDS (1)..(2202)

SEQ ID NO: 46799 - protein, 733 aa, Vibrio cholerae; identical to SEQ ID NO: 1844

SEQ ID NO: 46800 - DNA, 2163 bp, Vibrio cholerae; identical to SEQ ID NO: 1845
  CDS (1)..(2163)

SEQ ID NO: 46801 - protein, 720 aa, Vibrio cholerae; identical to SEQ ID NO: 1846

SEQ ID NO: 46802 - DNA, 2163 bp, Haemophilus influenzae; identical to SEQ ID NO: 1847
  CDS (1)..(2163)

SEQ ID NO: 46803 - protein, 720 aa, Haemophilus influenzae; identical to SEQ ID NO: 1848

SEQ ID NO: 46804 - DNA, 2844 bp, Mycobacterium tuberculosis; identical to SEQ ID NO: 1849
  CDS (1)..(2844)

SEQ ID NO: 46805 - protein, 947 aa, Mycobacterium tuberculosis; identical to SEQ ID NO: 1850

SEQ ID NO: 46806 - DNA, 1476 bp, Streptococcus pneumoniae; identical to SEQ ID NO: 1851
  CDS (1)..(1476)

SEQ ID NO: 46807 - protein, 491 aa, Streptococcus pneumoniae; identical to SEQ ID NO: 1852

SEQ ID NO: 46808 - DNA, 1476 bp, Bacillus halodurans; identical to SEQ ID NO: 1853
  CDS (1)..(1476)

SEQ ID NO: 46809 - protein, 491 aa, Bacillus halodurans; identical to SEQ ID NO: 1854

SEQ ID NO: 46810 - DNA, 2349 bp, Sinorhizobium meliloti; identical to SEQ ID NO: 1855
  CDS (1)..(2349)

SEQ ID NO: 46811 - protein, 782 aa, Sinorhizobium meliloti; identical to SEQ ID NO: 1856

SEQ ID NO: 46812 - DNA, 1476 bp, Streptococcus pneumoniae; identical to SEQ ID NO: 1857
  CDS (1)..(1476)

SEQ ID NO: 46813 - protein, 491 aa, Streptococcus pneumoniae; identical to SEQ ID NO: 1858

SEQ ID NO: 46814 - DNA, 2271 bp, Escherichia coli; identical to SEQ ID NO: 1859
  CDS (1)..(2271)

SEQ ID NO: 46815 - protein, 756 aa, Escherichia coli; identical to SEQ ID NO: 1860

SEQ ID NO: 46816 - DNA, 1443 bp, Bacillus subtilis; identical to SEQ ID NO: 1861
  CDS (1)..(1443)

SEQ ID NO: 46817 - protein, 480 aa, Bacillus subtilis; identical to SEQ ID NO: 1862

SEQ ID NO: 46818 - DNA, 1452 bp, Synechocystis sp; identical to SEQ ID NO: 1863
  CDS (1)..(1452)

SEQ ID NO: 46819 - protein, 483 aa, Synechocystis sp; identical to SEQ ID NO: 1864

SEQ ID NO: 46820 - DNA, 2307 bp, Yersinia pseudotuberculosis IP 32953; identical to SEQ ID NO: 1865
  CDS (1)..(2307)

SEQ ID NO: 46821 - protein, 768 aa, Yersinia pseudotuberculosis IP 32953; identical to SEQ ID NO: 1866

SEQ ID NO: 46822 - DNA, 1467 bp, Symbiobacterium thermophilum; identical to SEQ ID NO: 1867
  CDS (1)..(1467)

SEQ ID NO: 46823 - protein, 488 aa, Symbiobacterium thermophilum; identical to SEQ ID NO: 1868

SEQ ID NO: 46824 - DNA, 1410 bp, Symbiobacterium thermophilum; identical to SEQ ID NO: 1869
  CDS (1)..(1410)

SEQ ID NO: 46825 - protein, 469 aa, Symbiobacterium thermophilum; identical to SEQ ID NO: 1870

SEQ ID NO: 46826 - DNA, 2154 bp, Erwinia carotovora; identical to SEQ ID NO: 1871
  CDS (1)..(2154)

SEQ ID NO: 46827 - protein, 717 aa, Erwinia carotovora; identical to SEQ ID NO: 1872

SEQ ID NO: 46828 - DNA, 2790 bp, Acinetobacter sp; identical to SEQ ID NO: 1873
  CDS (1)..(2790)

SEQ ID NO: 46829 - protein, 929 aa, Acinetobacter sp; identical to SEQ ID NO: 1874

SEQ ID NO: 46830 - DNA, 1482 bp, Bacillus thuringiensis; identical to SEQ ID NO: 1875
  CDS (1)..(1482)

SEQ ID NO: 46831 - protein, 493 aa, Bacillus thuringiensis; identical to SEQ ID NO: 1876

SEQ ID NO: 46832 - DNA, 1422 bp, Bacillus thuringiensis; identical to SEQ ID NO: 1877
  CDS (1)..(1422)

SEQ ID NO: 46833 - protein, 473 aa, Bacillus thuringiensis; identical to SEQ ID NO: 1878

SEQ ID NO: 46834 - DNA, 2358 bp, Rhodopseudomonas palustris; identical to SEQ ID NO: 1879
  CDS (1)..(2358)

SEQ ID NO: 46835 - protein, 785 aa, Rhodopseudomonas palustris; identical to SEQ ID NO: 1880

SEQ ID NO: 46836 - DNA, 2837 bp, Shigella boydii; identical to SEQ ID NO: 1881
  CDS (165)..(2435)

SEQ ID NO: 46837 - protein, 756 aa, Shigella boydii; identical to SEQ ID NO: 1882

SEQ ID NO: 46838 - DNA, 1380 bp, Listeria monocytogenes; identical to SEQ ID NO: 1883
  CDS (1)..(1380)

SEQ ID NO: 46839 - protein, 459 aa, Listeria monocytogenes; identical to SEQ ID NO: 1884

SEQ ID NO: 46840 - DNA, 1482 bp, Bacillus cereus; identical to SEQ ID NO: 1885
  CDS (1)..(1482)

SEQ ID NO: 46841 - protein, 493 aa, Bacillus cereus; identical to SEQ ID NO: 1886

SEQ ID NO: 46842 - DNA, 1422 bp, Bacillus cereus; identical to SEQ ID NO: 1887
  CDS (1)..(1422)

SEQ ID NO: 46843 - protein, 473 aa, Bacillus cereus; identical to SEQ ID NO: 1888

SEQ ID NO: 46844 - DNA, 1458 bp, Mycobacterium paratuberculosis; identical to SEQ ID NO: 1889
  CDS (1)..(1458)

SEQ ID NO: 46845 - protein, 485 aa, Mycobacterium paratuberculosis; identical to SEQ ID NO: 1890

SEQ ID NO: 46846 - DNA, 2853 bp, Mycobacterium paratuberculosis; identical to SEQ ID NO: 1891
  CDS (1)..(2853)

SEQ ID NO: 46847 - protein, 950 aa, Mycobacterium paratuberculosis; identical to SEQ ID NO: 1892

SEQ ID NO: 46848 - DNA, 2100 bp, Lactobacillus johnsonii; identical to SEQ ID NO: 1893
  CDS (1)..(2100)

SEQ ID NO: 46849 - protein, 699 aa, Lactobacillus johnsonii; identical to SEQ ID NO: 1894

SEQ ID NO: 46850 - DNA, 3625 bp, Vibrio parahaemolyticus; identical to SEQ ID NO: 1895
  CDS (1451)..(3625)

SEQ ID NO: 46851 - protein, 724 aa, Vibrio parahaemolyticus; identical to SEQ ID NO: 1896

SEQ ID NO: 46852 - DNA, 2142 bp, Shigella flexneri; identical to SEQ ID NO: 1897
  CDS (1)..(2142)

SEQ ID NO: 46853 - protein, 713 aa, Shigella flexneri; identical to SEQ ID NO: 1898

SEQ ID NO: 46854 - DNA, 2181 bp, Vibrio vulnificus; identical to SEQ ID NO: 1899
  CDS (1)..(2181)

SEQ ID NO: 46855 - protein, 726 aa, Vibrio vulnificus; identical to SEQ ID NO: 1900

SEQ ID NO: 46856 - DNA, 2307 bp, Photorhabdus luminescens; identical to SEQ ID NO: 1901
  CDS (1)..(2307)

SEQ ID NO: 46857 - protein, 768 aa, Photorhabdus luminescens; identical to SEQ ID NO: 1902

SEQ ID NO: 46858 - DNA, 1404 bp, Gloeobacter violaceus; identical to SEQ ID NO: 1903
  CDS (1)..(1404)

SEQ ID NO: 46859 - protein, 467 aa, Gloeobacter violaceus; identical to SEQ ID NO: 1904

SEQ ID NO: 46860 - DNA, 2259 bp, Chromobacterium violaceum; identical to SEQ ID NO: 1905
  CDS (1)..(2259)

SEQ ID NO: 46861 - protein, 752 aa, Chromobacterium violaceum; identical to SEQ ID NO: 1906

SEQ ID NO: 46862 - DNA, 1251 bp, Chromobacterium violaceum; identical to SEQ ID NO: 1907
  CDS (1)..(1251)

SEQ ID NO: 46863 - protein, 416 aa, Chromobacterium violaceum; identical to SEQ ID NO: 1908

SEQ ID NO: 46864 - DNA, 2352 bp, Fusobacterium nucleatum subsp; identical to SEQ ID NO: 1909
  CDS (1)..(2352)

SEQ ID NO: 46865 - protein, 783 aa, Fusobacterium nucleatum subsp; identical to SEQ ID NO: 1910

SEQ ID NO: 46866 - DNA, 2196 bp, Shigella flexneri; identical to SEQ ID NO: 1911
  CDS (1)..(2196)

SEQ ID NO: 46867 - protein, 731 aa, Shigella flexneri; identical to SEQ ID NO: 1912

SEQ ID NO: 46868 - DNA, 2271 bp, Bordetella pertussis; identical to SEQ ID NO: 1913
  CDS (1)..(2271)

SEQ ID NO: 46869 - protein, 756 aa, Bordetella pertussis; identical to SEQ ID NO: 1914

SEQ ID NO: 46870 - DNA, 2271 bp, Bordetella parapertussis; identical to SEQ ID NO: 1915
  CDS (1)..(2271)

SEQ ID NO: 46871 - protein, 756 aa, Bordetella parapertussis; identical to SEQ ID NO: 1916

SEQ ID NO: 46872 - DNA, 1422 bp, Bacillus cereus; identical to SEQ ID NO: 1917
  CDS (1)..(1422)

SEQ ID NO: 46873 - protein, 473 aa, Bacillus cereus; identical to SEQ ID NO: 1918

SEQ ID NO: 46874 - DNA, 1422 bp, Bacillus anthracis; identical to SEQ ID NO: 1919
  CDS (1)..(1422)

SEQ ID NO: 46875 - protein, 473 aa, Bacillus anthracis; identical to SEQ ID NO: 1920

SEQ ID NO: 46876 - DNA, 2271 bp, Shigella flexneri; identical to SEQ ID NO: 1921
  CDS (1)..(2271)

SEQ ID NO: 46877 - protein, 756 aa, Shigella flexneri; identical to SEQ ID NO: 1922

SEQ ID NO: 46878 - DNA, 2136 bp, Shigella flexneri; identical to SEQ ID NO: 1923
  CDS (1)..(2136)

SEQ ID NO: 46879 - protein, 711 aa, Shigella flexneri; identical to SEQ ID NO: 1924

SEQ ID NO: 46880 - DNA, 2127 bp, Escherichia coli; identical to SEQ ID NO: 1925
  CDS (1)..(2127)

SEQ ID NO: 46881 - protein, 708 aa, Escherichia coli; identical to SEQ ID NO: 1926

SEQ ID NO: 46882 - DNA, 1563 bp, Oryza sativa; identical to SEQ ID NO: 1927
  CDS (1)..(1563)

SEQ ID NO: 46883 - protein, 520 aa, Oryza sativa; identical to SEQ ID NO: 1928

SEQ ID NO: 46884 - DNA, 2181 bp, Vibrio parahaemolyticus; identical to SEQ ID NO: 1929
  CDS (1)..(2181)

SEQ ID NO: 46885 - protein, 726 aa, Vibrio parahaemolyticus; identical to SEQ ID NO: 1930

SEQ ID NO: 46886 - DNA, 4026 bp, Vibrio parahaemolyticus; identical to SEQ ID NO: 1931
  CDS (1779)..(3914)

SEQ ID NO: 46887 - protein, 711 aa, Vibrio parahaemolyticus; identical to SEQ ID NO: 1932

SEQ ID NO: 46888 - DNA, 1461 bp, Clostridium tetani; identical to SEQ ID NO: 1933
  CDS (1)..(1461)

SEQ ID NO: 46889 - protein, 486 aa, Clostridium tetani; identical to SEQ ID NO: 1934

SEQ ID NO: 46890 - DNA, 1416 bp, Clostridium tetani; identical to SEQ ID NO: 1935
  CDS (1)..(1416)

SEQ ID NO: 46891 - protein, 471 aa, Clostridium tetani; identical to SEQ ID NO: 1936

SEQ ID NO: 46892 - DNA, 2766 bp, Bradyrhizobium japonicum; identical to SEQ ID NO: 1937
  CDS (1)..(2766)

SEQ ID NO: 46893 - protein, 921 aa, Bradyrhizobium japonicum; identical to SEQ ID NO: 1938

SEQ ID NO: 46894 - DNA, 2517 bp, Bradyrhizobium japonicum; identical to SEQ ID NO: 1939
  CDS (1)..(2517)

SEQ ID NO: 46895 - protein, 838 aa, Bradyrhizobium japonicum; identical to SEQ ID NO: 1940

SEQ ID NO: 46896 - DNA, 2181 bp, Vibrio vulnificus; identical to SEQ ID NO: 1941
  CDS (1)..(2181)

SEQ ID NO: 46897 - protein, 726 aa, Vibrio vulnificus; identical to SEQ ID NO: 1942

SEQ ID NO: 46898 - DNA, 2109 bp, Vibrio vulnificus; identical to SEQ ID NO: 1943
  CDS (1)..(2109)

SEQ ID NO: 46899 - protein, 702 aa, Vibrio vulnificus; identical to SEQ ID NO: 1944

SEQ ID NO: 46900 - DNA, 2163 bp, Shewanella oneidensis; identical to SEQ ID NO: 1945
  CDS (1)..(2163)

SEQ ID NO: 46901 - protein, 720 aa, Shewanella oneidensis; identical to SEQ ID NO: 1946

SEQ ID NO: 46902 - DNA, 1419 bp, Oceanobacillus iheyensis; identical to SEQ ID NO: 1947
  CDS (1)..(1419)

SEQ ID NO: 46903 - protein, 472 aa, Oceanobacillus iheyensis; identical to SEQ ID NO: 1948

SEQ ID NO: 46904 - DNA, 2154 bp, Escherichia coli O6; identical to SEQ ID NO: 1949
  CDS (1)..(2154)

SEQ ID NO: 46905 - protein, 717 aa, Escherichia coli O6; identical to SEQ ID NO: 1950

SEQ ID NO: 46906 - DNA, 2271 bp, Escherichia coli O6; identical to SEQ ID NO: 1951
  CDS (1)..(2271)

SEQ ID NO: 46907 - protein, 756 aa, Escherichia coli O6; identical to SEQ ID NO: 1952

SEQ ID NO: 46908 - DNA, 2370 bp, Escherichia coli O6; identical to SEQ ID NO: 1953
  CDS (1)..(2370)

SEQ ID NO: 46909 - protein, 789 aa, Escherichia coli O6; identical to SEQ ID NO: 1954

SEQ ID NO: 46910 - DNA, 2136 bp, Escherichia coli O6; identical to SEQ ID NO: 1955
  CDS (1)..(2136)

SEQ ID NO: 46911 - protein, 711 aa, Escherichia coli O6; identical to SEQ ID NO: 1956

SEQ ID NO: 46912 - DNA, 2208 bp, Escherichia coli O6; identical to SEQ ID NO: 1957
  CDS (1)..(2208)

SEQ ID NO: 46913 - protein, 735 aa, Escherichia coli O6; identical to SEQ ID NO: 1958

SEQ ID NO: 46914 - DNA, 2142 bp, Escherichia coli O6; identical to SEQ ID NO: 1959
  CDS (1)..(2142)

SEQ ID NO: 46915 - protein, 713 aa, Escherichia coli O6; identical to SEQ ID NO: 1960

SEQ ID NO: 46916 - DNA, 1488 bp, Thermoanaerobacter tengcongensis; identical to SEQ ID NO: 1961
  CDS (1)..(1488)

SEQ ID NO: 46917 - protein, 495 aa, Thermoanaerobacter tengcongensis; identical to SEQ ID NO: 1962

SEQ ID NO: 46918 - DNA, 1419 bp, Thermoanaerobacter tengcongensis; identical to SEQ ID NO: 1963
  CDS (1)..(1419)

SEQ ID NO: 46919 - protein, 472 aa, Thermoanaerobacter tengcongensis; identical to SEQ ID NO: 1964

SEQ ID NO: 46920 - DNA, 2352 bp, Fusobacterium nucleatum; identical to SEQ ID NO: 1965
  CDS (1)..(2352)

SEQ ID NO: 46921 - protein, 783 aa, Fusobacterium nucleatum; identical to SEQ ID NO: 1966

SEQ ID NO: 46922 - DNA, 1431 bp, Clostridium perfringens; identical to SEQ ID NO: 1967
  CDS (1)..(1431)

SEQ ID NO: 46923 - protein, 476 aa, Clostridium perfringens; identical to SEQ ID NO: 1968

SEQ ID NO: 46924 - DNA, 1455 bp, Clostridium perfringens; identical to SEQ ID NO: 1969
  CDS (1)..(1455)

SEQ ID NO: 46925 - protein, 484 aa, Clostridium perfringens; identical to SEQ ID NO: 1970

SEQ ID NO: 46926 - DNA, 2280 bp, Ralstonia solanacearum; identical to SEQ ID NO: 1971
  CDS (1)..(2280)

SEQ ID NO: 46927 - protein, 759 aa, Ralstonia solanacearum; identical to SEQ ID NO: 1972

SEQ ID NO: 46928 - DNA, 2271 bp, Salmonella typhimurium; identical to SEQ ID NO: 1973
  CDS (1)..(2271)

SEQ ID NO: 46929 - protein, 756 aa, Salmonella typhimurium; identical to SEQ ID NO: 1974

SEQ ID NO: 46930 - DNA, 2136 bp, Salmonella typhimurium; identical to SEQ ID NO: 1975
  CDS (1)..(2136)

SEQ ID NO: 46931 - protein, 711 aa, Salmonella typhimurium; identical to SEQ ID NO: 1976

SEQ ID NO: 46932 - DNA, 2199 bp, Salmonella typhimurium; identical to SEQ ID NO: 1977
  CDS (1)..(2199)

SEQ ID NO: 46933 - protein, 732 aa, Salmonella typhimurium; identical to SEQ ID NO: 1978

SEQ ID NO: 46934 - DNA, 2142 bp, Salmonella typhimurium; identical to SEQ ID NO: 1979
  CDS (1)..(2142)

SEQ ID NO: 46935 - protein, 713 aa, Salmonella typhimurium; identical to SEQ ID NO: 1980

SEQ ID NO: 46936 - DNA, 2136 bp, Vibrio vulnificus; identical to SEQ ID NO: 1981
  CDS (1)..(2136)

SEQ ID NO: 46937 - protein, 711 aa, Vibrio vulnificus; identical to SEQ ID NO: 1982

SEQ ID NO: 46938 - DNA, 2163 bp, Pasteurella multocida; identical to SEQ ID NO: 1983
  CDS (1)..(2163)

SEQ ID NO: 46939 - protein, 720 aa, Pasteurella multocida; identical to SEQ ID NO: 1984

SEQ ID NO: 46940 - DNA, 2139 bp, Moritella japonica; identical to SEQ ID NO: 1985
  CDS (1)..(2139)

SEQ ID NO: 46941 - protein, 712 aa, Moritella japonica; identical to SEQ ID NO: 1986

SEQ ID NO: 46942 - DNA, 1479 bp, Streptomyces coelicolor; identical to SEQ ID NO: 1987
  CDS (1)..(1479)

SEQ ID NO: 46943 - protein, 492 aa, Streptomyces coelicolor; identical to SEQ ID NO: 1988

SEQ ID NO: 46944 - DNA, 2130 bp, Eikenella corrodens; identical to SEQ ID NO: 1989
  CDS (1)..(2130)

SEQ ID NO: 46945 - protein, 709 aa, Eikenella corrodens; identical to SEQ ID NO: 1990

SEQ ID NO: 46946 - DNA, 2271 bp, Escherichia coli; identical to SEQ ID NO: 1859
  CDS (4)..(2271)

SEQ ID NO: 46947 - protein, 755 aa, Escherichia coli; identical to SEQ ID NO: 1992

SEQ ID NO: 46948 - DNA, 2196 bp, Lactobacillus sp; identical to SEQ ID NO: 1993
  CDS (1)..(2196)

SEQ ID NO: 46949 - protein, 731 aa, Lactobacillus sp; identical to SEQ ID NO: 1814

SEQ ID NO: 46950 - DNA, 1482 bp, Bacillus anthracis; identical to SEQ ID NO: 1995
  CDS (1)..(1482)

SEQ ID NO: 46951 - protein, 493 aa, Bacillus anthracis; identical to SEQ ID NO: 1996

SEQ ID NO: 46952 - DNA, 1383 bp, Bacillus cereus; identical to SEQ ID NO: 1997
  CDS (1)..(1383)

SEQ ID NO: 46953 - protein, 460 aa, Bacillus cereus; identical to SEQ ID NO: 1998

SEQ ID NO: 46954 - DNA, 20 bp, Artificial sequence
  Primer sequence
atggggcagggttttccacc

SEQ ID NO: 46955 - DNA, 25 bp, Artificial sequence
  Primer sequence
ttacttcaacacataaccgtacaac

SEQ ID NO: 46956 - protein, 642 aa, Artificial sequence; identical to SEQ ID NO: 2902
  Consensus
  Variant (2)..(5): Xaa in position 2 to 5 is any amino acid
  Variant (7)..(58): Xaa in position 7 to 58 is any amino acid
  Variant (60)..(61): Xaa in position 60 to 61 is any amino acid
  Variant (63)..(66): Xaa in position 63 to 66 is any amino acid
  Variant (68)..(71): Xaa in position 68 to 71 is any amino acid
  Variant (73)..(76): Xaa in position 73 to 76 is any amino acid
  Variant (78)..(90): Xaa in position 78 to 90 is any amino acid
  Variant (92)..(92): Xaa in position 92 is any amino acid
  Variant (94)..(113): Xaa in position 94 to 113 is any amino acid
  Variant (116)..(116): Xaa in position 116 is any amino acid
  Variant (120)..(131): Xaa in position 120 to 131 is any amino acid
  Variant (133)..(188): Xaa in position 133 to 188 is any amino acid
  Variant (191)..(191): Xaa in position 191 is any amino acid
  Variant (193)..(215): Xaa in position 193 to 215 is any amino acid
  Variant (217)..(217): Xaa in position 217 is any amino acid
  Variant (219)..(224): Xaa in position 219 to 224 is any amino acid
  Variant (226)..(290): Xaa in position 226 to 290 is any amino acid
  Variant (292)..(292): Xaa in position 292 is any amino acid
  Variant (295)..(300): Xaa in position 295 to 300 is any amino acid
  Variant (302)..(302): Xaa in position 302 is any amino acid
  Variant (304)..(305): Xaa in position 304 to 305 is any amino acid
  Variant (307)..(333): Xaa in position 307 to 333 is any amino acid
  Variant (337)..(337): Xaa in position 337 is any amino acid
  Variant (339)..(341): Xaa in position 339 to 341 is any amino acid
  Variant (343)..(355): Xaa in position 343 to 355 is any amino acid
  Variant (357)..(370): Xaa in position 357 to 370 is any amino acid
  Variant (372)..(457): Xaa in position 372 to 457 is any amino acid
  Variant (460)..(460): Xaa in position 460 is any amino acid
  Variant (462)..(494): Xaa in position 462 to 494 is any amino acid
  Variant (496)..(497): Xaa in position 496 to 497 is any amino acid
  Variant (499)..(505): Xaa in position 499 to 505 is any amino acid
  Variant (507)..(520): Xaa in position 507 to 520 is any amino acid
  Variant (522)..(524): Xaa in position 522 to 524 is any amino acid
  Variant (526)..(620): Xaa in position 526 to 620 is any amino acid
  Variant (622)..(624): Xaa in position 622 to 624 is any amino acid
  Variant (626)..(630): Xaa in position 626 to 630 is any amino acid
  Variant (635)..(640): Xaa in position 635 to 640 is any amino acid

SEQ ID NO: 46957 - protein, 101 aa, Artificial sequence; identical to SEQ ID NO: 1322
  Consensus
  Variant (2)..(23): Xaa in position 2 to 23 is any amino acid
  Variant (24)..(30): Xaa in position 24 to 30 is any or no amino acid
  Variant (32)..(32): Xaa in position 32 is any amino acid
  Variant (37)..(39): Xaa in position 37 to 39 is any amino acid
  Variant (41)..(55): Xaa in position 41 to 55 is any amino acid
  Variant (56)..(57): Xaa in position 56 to 57 is any or no amino acid
  Variant (59)..(62): Xaa in position 59 to 62 is any amino acid
  Variant (64)..(64): Xaa in position 64 is any amino acid
  Variant (67)..(70): Xaa in position 67 to 70 is any amino acid
  Variant (72)..(72): Xaa in position 72 is any amino acid
  Variant (75)..(77): Xaa in position 75 to 77 is any amino acid
  Variant (79)..(85): Xaa in position 79 to 85 is any amino acid
  Variant (87)..(90): Xaa in position 87 to 90 is any amino acid
  Variant (92)..(93): Xaa in position 92 to 93 is any amino acid
  Variant (97)..(97): Xaa in position 97 is any amino acid
  Variant (100)..(100): Xaa in position 100 is any amino acid

SEQ ID NO: 46958 - protein, 76 aa, Artificial sequence; identical to SEQ ID NO: 2897
  Consensus
  Variant (1)..(1): Xaa in position 1 is Leu, Met or Val
  Variant (2)..(2): Xaa in position 2 is Gly or Asp
  Variant (3)..(3): Xaa in position 3 is Asp, Ser, Asn, Gln or Gly
  Variant (4)..(4): Xaa in position 4 is Leu or Arg
  Variant (5)..(6): Xaa in position 5 to 6 is any amino acid
  Variant (7)..(7): Xaa in position 7 is His or Pro
  Variant (8)..(8): Xaa in position 8 is any amino acid
  Variant (9)..(9): Xaa in position 9 is Gly, Ser, Glu or Asp
  Variant (10)..(13): Xaa in position 10 to 13 is any amino acid
  Variant (14)..(14): Xaa in position 14 is Ala or Ser
  Variant (15)..(15): Xaa in position 15 is Gln, Glu or Met
  Variant (16)..(18): Xaa in position 16 to 18 is any amino acid
  Variant (19)..(19): Xaa in position 19 is Ala or Ser
  Variant (20)..(21): Xaa in position 20 to 21 is any amino acid
  Variant (22)..(22): Xaa in position 22 is Phe, Tyr, Trp or Val
  Variant (23)..(23): Xaa in position 23 is any amino acid
  Variant (24)..(24): Xaa in position 24 is Ala, Ser or Val
  Variant (25)..(27): Xaa in position 25 to 27 is any amino acid
  Variant (28)..(28): Xaa in position 28 is Tyr, Phe or Trp
  Variant (29)..(30): Xaa in position 29 to 30 is any amino acid
  Variant (31)..(31): Xaa in position 31 is Val, Thr, Leu or Ile
  Variant (32)..(32): Xaa in position 32 is any amino acid
  Variant (34)..(34): Xaa in position 34 is Thr or Ser
  Variant (35)..(35): Xaa in position 35 is Ser or Thr
  Variant (36)..(36): Xaa in position 36 is any amino acid
  Variant (37)..(37): Xaa in position 37 is Ser, Ala or Gly
  Variant (38)..(38): Xaa in position 38 is Asn, Ile, Val or Ser
  Variant (39)..(51): Xaa in position 39 to 51 is any amino acid
  Variant (52)..(52): Xaa in position 52 is Val, Ile, Leu or Ala
  Variant (53)..(53): Xaa in position 53 is Leu, Ile, Val or Met
  Variant (54)..(55): Xaa in position 54 to 55 is any amino acid
  Variant (57)..(57): Xaa in position 57 is Asn or Asp
  Variant (58)..(58): Xaa in position 58 is any amino acid
  Variant (60)..(60): Xaa in position 60 is Lys, Gln or Arg
  Variant (61)..(61): Xaa in position 61 is Ser or Ala
  Variant (62)..(65): Xaa in position 62 to 65 is any amino acid
  Variant (66)..(66): Xaa in position 66 is any or no amino acid
  Variant (67)..(67): Xaa in position 67 is Leu, Ile, Met or Val
  Variant (68)..(73): Xaa in position 68 to 73 is any amino acid
  Variant (74)..(74): Xaa in position 74 is Pro or Ala
  Variant (75)..(75): Xaa in position 75 is any amino acid
  Variant (76)..(76): Xaa in position 76 is Tyr, Phe or Trp

SEQ ID NO: 46959 - protein, 39 aa, Artificial sequence; identical to SEQ ID NO: 2898
  Consensus
  Variant (1)..(1): Xaa in position 1 is Val, Ile, Leu, Phe or Thr
  Variant (2)..(2): Xaa in position 2 is Ile, Val, Leu, Phe or Ala
  Variant (3)..(5): Xaa in position 3 to 5 is any amino acid
  Variant (6)..(6): Xaa in position 6 is Thr, Asn or Ser
  Variant (7)..(7): Xaa in position 7 is Tyr, Phe or Pro
  Variant (8)..(8): Xaa in position 8 is Asp, Tyr, Phe or His
  Variant (10)..(12): Xaa in position 10 to 12 is any amino acid
  Variant (13)..(13): Xaa in position 13 is Asn, Asp or Ser
  Variant (14)..(25): Xaa in position 14 to 25 is any amino acid
  Variant (26)..(29): Xaa in position 26 to 29 is any or no amino acid
  Variant (30)..(30): Xaa in position 30 is Ile, Val, Leu or Phe
  Variant (31)..(31): Xaa in position 31 is any amino acid
  Variant (32)..(32): Xaa in position 32 is Phe, Val, Trp or Ile
  Variant (34)..(34): Xaa in position 34 is Glu, Ser or Cys
  Variant (36)..(36): Xaa in position 36 is Trp or His
  Variant (37)..(37): Xaa in position 37 is any amino acid
  Variant (38)..(38): Xaa in position 38 is Ala, Gly, Pro or Val
  Variant (39)..(39): Xaa in position 39 is Tyr, His or Phe

SEQ ID NO: 46960 - protein, 84 aa, Artificial sequence; identical to SEQ ID NO: 2899
  Consensus
  Variant (1)..(1): Xaa in position 1 is Ser or Leu
  Variant (2)..(2): Xaa in position 2 is any amino acid
  Variant (5)..(7): Xaa in position 5 to 7 is any amino acid
  Variant (8)..(8): Xaa in position 8 is Ala, Gly or Ser
  Variant (9)..(9): Xaa in position 9 is Leu, Phe, Met or Ile
  Variant (10)..(10): Xaa in position 10 is Ser, Thr, Arg or Glu
  Variant (11)..(11): Xaa in position 11 is Gln or Met
  Variant (12)..(12): Xaa in position 12 is any amino acid
  Variant (13)..(13): Xaa in position 13 is Ser or Ala
  Variant (14)..(14): Xaa in position 14 is any amino acid
  Variant (15)..(15): Xaa in position 15 is Ile, Leu, Met, Val or Phe
  Variant (16)..(16): Xaa in position 16 is His, Asn, Leu or Ile
  Variant (17)..(25): Xaa in position 17 to 25 is any amino acid
  Variant (26)..(33): Xaa in position 26 to 33 is any or no amino acid
  Variant (34)..(34): Xaa in position 34 is Phe, Val, Leu, Met or Ile
  Variant (35)..(42): Xaa in position 35 to 42 is any amino acid
  Variant (43)..(43): Xaa in position 43 is Ser or Thr
  Variant (44)..(44): Xaa in position 44 is Thr or Ser
  Variant (46)..(47): Xaa in position 46 to 47 is any amino acid
  Variant (48)..(48): Xaa in position 48 is Tyr, Gln or Val
  Variant (49)..(49): Xaa in position 49 is any amino acid
  Variant (50)..(50): Xaa in position 50 is Leu, Ile, Phe or Met
  Variant (51)..(51): Xaa in position 51 is any amino acid
  Variant (52)..(52): Xaa in position 52 is Ala or Ser
  Variant (53)..(53): Xaa in position 53 is Ser, Ala or Thr
  Variant (54)..(54): Xaa in position 54 is any amino acid
  Variant (55)..(55): Xaa in position 55 is Asp or Glu
  Variant (56)..(63): Xaa in position 56 to 63 is any amino acid
  Variant (64)..(65): Xaa in position 64 to 65 is any or no amino acid
  Variant (66)..(66): Xaa in position 66 is Gly, Ala, Lys or Asn
  Variant (67)..(73): Xaa in position 67 to 73 is any amino acid
  Variant (74)..(74): Xaa in position 74 is Ile, Val, Leu, Tyr or Phe
  Variant (75)..(80): Xaa in position 75 to 80 is any amino acid
  Variant (81)..(81): Xaa in position 81 is Arg or Lys
  Variant (82)..(83): Xaa in position 82 to 83 is any amino acid
  Variant (84)..(84): Xaa in position 84 is Ile, Leu, Val, Met, Phe, Ala or Thr

SEQ ID NO: 46961 - protein, 31 aa, Artificial sequence; identical to SEQ ID NO: 2900
  Consensus
  Variant (1)..(1): Xaa in position 1 is Val, Ile, Leu, Cys or Arg
  Variant (2)..(5): Xaa in position 2 to 5 is any amino acid
  Variant (6)..(9): Xaa in position 6 to 9 is any or no amino acid
  Variant (10)..(10): Xaa in position 10 is Gly, Thr, Asp or Asn
  Variant (11)..(11): Xaa in position 11 is any amino acid
  Variant (12)..(12): Xaa in position 12 is Ile, Val or Thr
  Variant (13)..(13): Xaa in position 13 is any amino acid
  Variant (14)..(14): Xaa in position 14 is Ala, Gly, Thr or Leu
  Variant (15)..(16): Xaa in position 15 to 16 is any amino acid
  Variant (17)..(17): Xaa in position 17 is Val, Ile, Ala, Leu or Phe
  Variant (18)..(19): Xaa in position 18 to 19 is any amino acid
  Variant (24)..(24): Xaa in position 24 is Ile, Val or Phe
  Variant (25)..(26): Xaa in position 25 to 26 is any amino acid
  Variant (27)..(27): Xaa in position 27 is Val, Leu, Ile, Phe or Met
  Variant (28)..(29): Xaa in position 28 to 29 is any amino acid
  Variant (31)..(31): Xaa in position 31 is Glu or Gln

SEQ ID NO: 46962 - DNA, 1113 bp, Saccharomyces cerevisiae; identical to SEQ ID NO: 1363
  CDS (1)..(1113)

SEQ ID NO: 46963 - protein, 370 aa, Saccharomyces cerevisiae; identical to SEQ ID NO: 1364

SEQ ID NO: 46964 - DNA, 1086 bp, Deinococcus radiodurans; identical to SEQ ID NO: 1327
  CDS (1)..(1086)

SEQ ID NO: 46965 - protein, 361 aa, Deinococcus radiodurans; identical to SEQ ID NO: 1328

SEQ ID NO: 46966 - DNA, 1071 bp, Salmonella enterica subsp. enterica serovar Typhi; identical to SEQ ID NO: 2245
  CDS (1)..(1071)

SEQ ID NO: 46967 - protein, 356 aa, Salmonella enterica subsp. enterica serovar Typhi; identical to SEQ ID NO: 2246

SEQ ID NO: 46968 - DNA, 1071 bp, Yersinia pestis; identical to SEQ ID NO: 2247
  CDS (1)..(1071)

SEQ ID NO: 46969 - protein, 356 aa, Yersinia pestis; identical to SEQ ID NO: 2248

SEQ ID NO: 46970 - DNA, 1047 bp, Yersinia pestis; identical to SEQ ID NO: 1331
  CDS (1)..(1047)

SEQ ID NO: 46971 - protein, 348 aa, Yersinia pestis; identical to SEQ ID NO: 1332

SEQ ID NO: 46972 - DNA, 1053 bp, Escherichia coli; identical to SEQ ID NO: 2251
  CDS (1)..(1053)

SEQ ID NO: 46973 - protein, 350 aa, Escherichia coli; identical to SEQ ID NO: 1580

SEQ ID NO: 46974 - DNA, 1071 bp, Escherichia coli; identical to SEQ ID NO: 1333
  CDS (1)..(1071)

SEQ ID NO: 46975 - protein, 356 aa, Escherichia coli; identical to SEQ ID NO: 1334

SEQ ID NO: 46976 - DNA, 1131 bp, Nostoc sp. PCC 7120; identical to SEQ ID NO: 1335
  CDS (1)..(1131)

SEQ ID NO: 46977 - protein, 376 aa, Nostoc sp. PCC 7120; identical to SEQ ID NO: 1336

SEQ ID NO: 46978 - DNA, 1053 bp, Salmonella enterica subsp. enterica serovar Typhi; identical to SEQ ID NO: 1337
  CDS (1)..(1053)

SEQ ID NO: 46979 - protein, 350 aa, Salmonella enterica subsp. enterica serovar Typhi; identical to SEQ ID NO: 1338

SEQ ID NO: 46980 - DNA, 1077 bp, Pseudomonas aeruginosa; identical to SEQ ID NO: 1339
  CDS (1)..(1077)

SEQ ID NO: 46981 - protein, 358 aa, Pseudomonas aeruginosa; identical to SEQ ID NO: 1340

SEQ ID NO: 46982 - DNA, 1074 bp, Vibrio cholerae; identical to SEQ ID NO: 1343
  CDS (1)..(1074)

SEQ ID NO: 46983 - protein, 357 aa, Vibrio cholerae; identical to SEQ ID NO: 1344

SEQ ID NO: 46984 - DNA, 1038 bp, Lactococcus lactis subsp. lactis; identical to SEQ ID NO: 1345
  CDS (1)..(1038)

SEQ ID NO: 46985 - protein, 345 aa, Lactococcus lactis subsp. lactis; identical to SEQ ID NO: 1346

SEQ ID NO: 46986 - DNA, 1023 bp, Lactococcus lactis subsp. lactis; identical to SEQ ID NO: 1347
  CDS (1)..(1023)

SEQ ID NO: 46987 - protein, 340 aa, Lactococcus lactis subsp. lactis; identical to SEQ ID NO: 1348

SEQ ID NO: 46988 - DNA, 1032 bp, Streptococcus pneumoniae; identical to SEQ ID NO: 1349
  CDS (1)..(1032)

SEQ ID NO: 46989 - protein, 343 aa, Streptococcus pneumoniae; identical to SEQ ID NO: 1350

SEQ ID NO: 46990 - DNA, 1056 bp, Neisseria meningitidis; identical to SEQ ID NO: 2269
  CDS (1)..(1056)

SEQ ID NO: 46991 - protein, 351 aa, Neisseria meningitidis; identical to SEQ ID NO: 2270

SEQ ID NO: 46992 - DNA, 1095 bp, Pseudomonas aeruginosa; identical to SEQ ID NO: 1351
  CDS (1)..(1095)

SEQ ID NO: 46993 - protein, 364 aa, Pseudomonas aeruginosa; identical to SEQ ID NO: 1352

SEQ ID NO: 46994 - DNA, 1032 bp, Streptococcus pneumoniae; identical to SEQ ID NO: 1355
  CDS (1)..(1032)

SEQ ID NO: 46995 - protein, 343 aa, Streptococcus pneumoniae; identical to SEQ ID NO: 1356

SEQ ID NO: 46996 - DNA, 1143 bp, Xylella fastidiosa; identical to SEQ ID NO: 1603
  CDS (1)..(1143)

SEQ ID NO: 46997 - protein, 380 aa, Xylella fastidiosa; identical to SEQ ID NO: 1604

SEQ ID NO: 46998 - DNA, 1047 bp, Buchnera aphidicola; identical to SEQ ID NO: 1357
  CDS (1)..(1047)

SEQ ID NO: 46999 - protein, 348 aa, Buchnera aphidicola; identical to SEQ ID NO: 1358

SEQ ID NO: 47000 - DNA, 1104 bp, Corynebacterium glutamicum; identical to SEQ ID NO: 2279
  CDS (1)..(1104)

SEQ ID NO: 47001 - protein, 367 aa, Corynebacterium glutamicum; identical to SEQ ID NO: 2280

SEQ ID NO: 47002 - DNA, 1089 bp, Haemophilus influenzae; identical to SEQ ID NO: 1359
  CDS (1)..(1089)

SEQ ID NO: 47003 - protein, 362 aa, Haemophilus influenzae; identical to SEQ ID NO: 1360

SEQ ID NO: 47004 - DNA, 1502 bp, Candida albicans; identical to SEQ ID NO: 1361
  CDS (336)..(1442)

SEQ ID NO: 47005 - protein, 368 aa, Candida albicans; identical to SEQ ID NO: 1362

SEQ ID NO: 47006 - DNA, 2048 bp, Saccharomyces cerevisiae; identical to SEQ ID NO: 1365
  CDS (619)..(1731)

SEQ ID NO: 47007 - protein, 370 aa, Saccharomyces cerevisiae; identical to SEQ ID NO: 1366

SEQ ID NO: 47008 - DNA, 1107 bp, Schizosaccharomyces pombe; identical to SEQ ID NO: 1367
  CDS (1)..(1107)

SEQ ID NO: 47009 - protein, 368 aa, Schizosaccharomyces pombe; identical to SEQ ID NO: 1368

SEQ ID NO: 47010 - DNA, 1089 bp, Amycolatopsis orientalis; identical to SEQ ID NO: 1369
  CDS (1)..(1089)

SEQ ID NO: 47011 - protein, 362 aa, Amycolatopsis orientalis; identical to SEQ ID NO: 1370

SEQ ID NO: 47012 - DNA, 1119 bp, Schizosaccharomyces pombe; identical to SEQ ID NO: 1371
  CDS (1)..(1119)

SEQ ID NO: 47013 - protein, 372 aa, Schizosaccharomyces pombe; identical to SEQ ID NO: 1372

SEQ ID NO: 47014 - DNA, 1083 bp, Methylophilus methylotrophus; identical to SEQ ID NO: 1375
  CDS (1)..(1083)

SEQ ID NO: 47015 - protein, 360 aa, Methylophilus methylotrophus; identical to SEQ ID NO: 1376

SEQ ID NO: 47016 - DNA, 1770 bp, Debaryomyces hansenii; identical to SEQ ID NO: 2295
  CDS (1)..(1770)

SEQ ID NO: 47017 - protein, 589 aa, Debaryomyces hansenii; identical to SEQ ID NO: 2296

SEQ ID NO: 47018 - DNA, 1107 bp, Debaryomyces hansenii; identical to SEQ ID NO: 1377
  CDS (1)..(1107)

SEQ ID NO: 47019 - protein, 368 aa, Debaryomyces hansenii; identical to SEQ ID NO: 1378

SEQ ID NO: 47020 - DNA, 1074 bp, Yarrowia lipolytica; identical to SEQ ID NO: 1379
  CDS (1)..(1074)

SEQ ID NO: 47021 - protein, 357 aa, Yarrowia lipolytica; identical to SEQ ID NO: 1380

SEQ ID NO: 47022 - DNA, 1089 bp, Yarrowia lipolytica; identical to SEQ ID NO: 1381
  CDS (1)..(1089)

SEQ ID NO: 47023 - protein, 362 aa, Yarrowia lipolytica; identical to SEQ ID NO: 1382

SEQ ID NO: 47024 - DNA, 1119 bp, Kluyveromyces lactis; identical to SEQ ID NO: 1383
  CDS (1)..(1119)

SEQ ID NO: 47025 - protein, 372 aa, Kluyveromyces lactis; identical to SEQ ID NO: 1384

SEQ ID NO: 47026 - DNA, 1095 bp, Kluyveromyces lactis; identical to SEQ ID NO: 1385
  CDS (1)..(1095)

SEQ ID NO: 47027 - protein, 364 aa, Kluyveromyces lactis; identical to SEQ ID NO: 1386

SEQ ID NO: 47028 - DNA, 1074 bp, Erwinia carotovora subsp; identical to SEQ ID NO: 1387
  CDS (1)..(1074)

SEQ ID NO: 47029 - protein, 357 aa, Erwinia carotovora subsp; identical to SEQ ID NO: 1388

SEQ ID NO: 47030 - DNA, 1047 bp, Erwinia carotovora subsp; identical to SEQ ID NO: 1389
  CDS (1)..(1047)

SEQ ID NO: 47031 - protein, 348 aa, Erwinia carotovora subsp; identical to SEQ ID NO: 1390

SEQ ID NO: 47032 - DNA, 1056 bp, Erwinia carotovora subsp; identical to SEQ ID NO: 1391
  CDS (1)..(1056)

SEQ ID NO: 47033 - protein, 351 aa, Erwinia carotovora subsp; identical to SEQ ID NO: 1392

SEQ ID NO: 47034 - DNA, 1113 bp, Acinetobacter sp; identical to SEQ ID NO: 1393
  CDS (1)..(1113)

SEQ ID NO: 47035 - protein, 370 aa, Acinetobacter sp; identical to SEQ ID NO: 1394

SEQ ID NO: 47036 - DNA, 1056 bp, Acinetobacter sp; identical to SEQ ID NO: 1395
  CDS (1)..(1056)

SEQ ID NO: 47037 - protein, 351 aa, Acinetobacter sp; identical to SEQ ID NO: 1396

SEQ ID NO: 47038 - DNA, 1119 bp, Candida glabrata; identical to SEQ ID NO: 1397
  CDS (1)..(1119)

SEQ ID NO: 47039 - protein, 372 aa, Candida glabrata; identical to SEQ ID NO: 1398

SEQ ID NO: 47040 - DNA, 1071 bp, Candida glabrata; identical to SEQ ID NO: 1399
  CDS (1)..(1071)

SEQ ID NO: 47041 - protein, 356 aa, Candida glabrata; identical to SEQ ID NO: 1400

SEQ ID NO: 47042 - DNA, 1083 bp, Photobacterium profundum; identical to SEQ ID NO: 1401
  CDS (1)..(1083)

SEQ ID NO: 47043 - protein, 360 aa, Photobacterium profundum; identical to SEQ ID NO: 1402

SEQ ID NO: 47044 - DNA, 1053 bp, Photobacterium profundum; identical to SEQ ID NO: 1403
  CDS (1)..(1053)

SEQ ID NO: 47045 - protein, 350 aa, Photobacterium profundum; identical to SEQ ID NO: 1404

SEQ ID NO: 47046 - DNA, 1113 bp, Photobacterium profundum; identical to SEQ ID NO: 1405
  CDS (1)..(1113)

SEQ ID NO: 47047 - protein, 370 aa, Photobacterium profundum; identical to SEQ ID NO: 1406

SEQ ID NO: 47048 - DNA, 1056 bp, Photobacterium profundum; identical to SEQ ID NO: 1407
  CDS (1)..(1056)

SEQ ID NO: 47049 - protein, 351 aa, Photobacterium profundum; identical to SEQ ID NO: 1408

SEQ ID NO: 47050 - DNA, 1092 bp, Parachlamydia sp; identical to SEQ ID NO: 1409
  CDS (1)..(1092)

SEQ ID NO: 47051 - protein, 363 aa, Parachlamydia sp; identical to SEQ ID NO: 1410

SEQ ID NO: 47052 - DNA, 1095 bp, Rhodopseudomonas palustris; identical to SEQ ID NO: 1411
  CDS (1)..(1095)

SEQ ID NO: 47053 - protein, 364 aa, Rhodopseudomonas palustris; identical to SEQ ID NO: 1412

SEQ ID NO: 47054 - DNA, 1100 bp, Amycolatopsis methanolica; identical to SEQ ID NO: 1413
  CDS (1)..(1086)

SEQ ID NO: 47055 - protein, 361 aa, Amycolatopsis methanolica; identical to SEQ ID NO: 1414

SEQ ID NO: 47056 - DNA, 1071 bp, Treponema denticola; identical to SEQ ID NO: 1415
  CDS (1)..(1071)

SEQ ID NO: 47057 - protein, 356 aa, Treponema denticola; identical to SEQ ID NO: 1416

SEQ ID NO: 47058 - DNA, 1068 bp, Geobacter sulfurreducens; identical to SEQ ID NO: 1417
  CDS (1)..(1068)

SEQ ID NO: 47059 - protein, 355 aa, Geobacter sulfurreducens; identical to SEQ ID NO: 1418

SEQ ID NO: 47060 - DNA, 1095 bp, Ashbya gossypii; identical to SEQ ID NO: 1419
  CDS (1)..(1095)

SEQ ID NO: 47061 - protein, 364 aa, Ashbya gossypii; identical to SEQ ID NO: 1420

SEQ ID NO: 47062 - DNA, 1122 bp, Ashbya gossypii; identical to SEQ ID NO: 1421
  CDS (1)..(1122)

SEQ ID NO: 47063 - protein, 373 aa, Ashbya gossypii; identical to SEQ ID NO: 1422

SEQ ID NO: 47064 - DNA, 1098 bp, Amycolatopsis balhimycina; identical to SEQ ID NO: 1423
  CDS (1)..(1098)

SEQ ID NO: 47065 - protein, 365 aa, Amycolatopsis balhimycina; identical to SEQ ID NO: 1424

SEQ ID NO: 47066 - DNA, 1053 bp, Vibrio vulnificus; identical to SEQ ID NO: 2345
  CDS (1)..(1053)

SEQ ID NO: 47067 - protein, 350 aa, Vibrio vulnificus; identical to SEQ ID NO: 2346

SEQ ID NO: 47068 - DNA, 1047 bp, Photorhabdus luminescens; identical to SEQ ID NO: 1427
  CDS (1)..(1047)

SEQ ID NO: 47069 - protein, 348 aa, Photorhabdus luminescens; identical to SEQ ID NO: 1428

SEQ ID NO: 47070 - DNA, 1053 bp, Photorhabdus luminescens; identical to SEQ ID NO: 1429
  CDS (1)..(1053)

SEQ ID NO: 47071 - protein, 350 aa, Photorhabdus luminescens; identical to SEQ ID NO: 1430

SEQ ID NO: 47072 - DNA, 1095 bp, Photorhabdus luminescens; identical to SEQ ID NO: 1431
  CDS (1)..(1095)

SEQ ID NO: 47073 - protein, 364 aa, Photorhabdus luminescens; identical to SEQ ID NO: 1432

SEQ ID NO: 47074 - DNA, 1119 bp, Gloeobacter violaceus; identical to SEQ ID NO: 1433
  CDS (1)..(1119)

SEQ ID NO: 47075 - protein, 372 aa, Gloeobacter violaceus; identical to SEQ ID NO: 1434

SEQ ID NO: 47076 - DNA, 1107 bp, Chromobacterium violaceum; identical to SEQ ID NO: 1435
  CDS (1)..(1107)

SEQ ID NO: 47077 - protein, 368 aa, Chromobacterium violaceum; identical to SEQ ID NO: 1436

SEQ ID NO: 47078 - DNA, 1059 bp, Chromobacterium violaceum; identical to SEQ ID NO: 1437
  CDS (1)..(1059)

SEQ ID NO: 47079 - protein, 352 aa, Chromobacterium violaceum; identical to SEQ ID NO: 1438

SEQ ID NO: 47080 - DNA, 1140 bp, Neurospora crassa; identical to SEQ ID NO: 1439
  CDS (1)..(1140)

SEQ ID NO: 47081 - protein, 379 aa, Neurospora crassa; identical to SEQ ID NO: 1440

SEQ ID NO: 47082 - DNA, 1092 bp, Neurospora crassa; identical to SEQ ID NO: 1441
  CDS (1)..(1092)

SEQ ID NO: 47083 - protein, 363 aa, Neurospora crassa; identical to SEQ ID NO: 1442

SEQ ID NO: 47084 - DNA, 1068 bp, Synechococcus sp; identical to SEQ ID NO: 1443
  CDS (1)..(1068)

SEQ ID NO: 47085 - protein, 355 aa, Synechococcus sp; identical to SEQ ID NO: 1444

SEQ ID NO: 47086 - DNA, 1053 bp, Rhodopirellula baltica; identical to SEQ ID NO: 1445
  CDS (1)..(1053)

SEQ ID NO: 47087 - protein, 350 aa, Rhodopirellula baltica; identical to SEQ ID NO: 1446

SEQ ID NO: 47088 - DNA, 1068 bp, Prochlorococcus marinus subsp; identical to SEQ ID NO: 1447
  CDS (1)..(1068)

SEQ ID NO: 47089 - protein, 355 aa, Prochlorococcus marinus subsp; identical to SEQ ID NO: 1448

SEQ ID NO: 47090 - DNA, 1083 bp, Prochlorococcus marinus; identical to SEQ ID NO: 1449
  CDS (1)..(1083)

SEQ ID NO: 47091 - protein, 360 aa, Prochlorococcus marinus; identical to SEQ ID NO: 1450

SEQ ID NO: 47092 - DNA, 1074 bp, Prochlorococcus marinus; identical to SEQ ID NO: 1451
  CDS (1)..(1074)

SEQ ID NO: 47093 - protein, 357 aa, Prochlorococcus marinus; identical to SEQ ID NO: 1452

SEQ ID NO: 47094 - DNA, 1113 bp, Haemophilus ducreyi; identical to SEQ ID NO: 1453
  CDS (1)..(1113)

SEQ ID NO: 47095 - protein, 370 aa, Haemophilus ducreyi; identical to SEQ ID NO: 1454

SEQ ID NO: 47096 - DNA, 1080 bp, Haemophilus ducreyi; identical to SEQ ID NO: 1455
  CDS (1)..(1080)

SEQ ID NO: 47097 - protein, 359 aa, Haemophilus ducreyi; identical to SEQ ID NO: 1456

SEQ ID NO: 47098 - DNA, 1086 bp, Candidatus Blochmannia floridanus; identical to SEQ ID NO: 1457
  CDS (1)..(1086)

SEQ ID NO: 47099 - protein, 361 aa, Candidatus Blochmannia floridanus; identical to SEQ ID NO: 1458

SEQ ID NO: 47100 - DNA, 1074 bp, Bordetella pertussis; identical to SEQ ID NO: 2379
  CDS (1)..(1074)

SEQ ID NO: 47101 - protein, 357 aa, Bordetella pertussis; identical to SEQ ID NO: 1460

SEQ ID NO: 47102 - DNA, 1119 bp, Bordetella bronchiseptica; identical to SEQ ID NO: 1461
  CDS (1)..(1119)

SEQ ID NO: 47103 - protein, 372 aa, Bordetella bronchiseptica; identical to SEQ ID NO: 1462

SEQ ID NO: 47104 - DNA, 1179 bp, Nitrosomonas europaea; identical to SEQ ID NO: 1463
  CDS (1)..(1179)

SEQ ID NO: 47105 - protein, 392 aa, Nitrosomonas europaea; identical to SEQ ID NO: 1464

SEQ ID NO: 47106 - DNA, 1083 bp, Coxiella burnetii; identical to SEQ ID NO: 1465
  CDS (1)..(1083)

SEQ ID NO: 47107 - protein, 360 aa, Coxiella burnetii; identical to SEQ ID NO: 1466

SEQ ID NO: 47108 - DNA, 1053 bp, Vibrio parahaemolyticus; identical to SEQ ID NO: 1471
  CDS (1)..(1053)

SEQ ID NO: 47109 - protein, 350 aa, Vibrio parahaemolyticus; identical to SEQ ID NO: 1472

SEQ ID NO: 47110 - DNA, 1053 bp, Vibrio parahaemolyticus; identical to SEQ ID NO: 1473
  CDS (1)..(1053)

SEQ ID NO: 47111 - protein, 350 aa, Vibrio parahaemolyticus; identical to SEQ ID NO: 1474

SEQ ID NO: 47112 - DNA, 1074 bp, Vibrio parahaemolyticus; identical to SEQ ID NO: 1475
  CDS (1)..(1074)

SEQ ID NO: 47113 - protein, 357 aa, Vibrio parahaemolyticus; identical to SEQ ID NO: 1476

SEQ ID NO: 47114 - DNA, 1083 bp, Pseudomonas syringae; identical to SEQ ID NO: 1477
  CDS (1)..(1083)

SEQ ID NO: 47115 - protein, 360 aa, Pseudomonas syringae; identical to SEQ ID NO: 1478

SEQ ID NO: 47116 - DNA, 1077 bp, Pseudomonas syringae; identical to SEQ ID NO: 1479
  CDS (1)..(1077)

SEQ ID NO: 47117 - protein, 358 aa, Pseudomonas syringae; identical to SEQ ID NO: 1480

SEQ ID NO: 47118 - DNA, 1062 bp, Pseudomonas putida; identical to SEQ ID NO: 1481
  CDS (1)..(1062)

SEQ ID NO: 47119 - protein, 353 aa, Pseudomonas putida; identical to SEQ ID NO: 1482

SEQ ID NO: 47120 - DNA, 1113 bp, Pseudomonas putida; identical to SEQ ID NO: 1483
  CDS (1)..(1113)

SEQ ID NO: 47121 - protein, 370 aa, Pseudomonas putida; identical to SEQ ID NO: 1484

SEQ ID NO: 47122 - DNA, 1086 bp, Bradyrhizobium japonicum; identical to SEQ ID NO: 1485
  CDS (1)..(1086)

SEQ ID NO: 47123 - protein, 361 aa, Bradyrhizobium japonicum; identical to SEQ ID NO: 1486

SEQ ID NO: 47124 - DNA, 1053 bp, Yersinia pestis; identical to SEQ ID NO: 1487
  CDS (1)..(1053)

SEQ ID NO: 47125 - protein, 350 aa, Yersinia pestis; identical to SEQ ID NO: 1488

SEQ ID NO: 47126 - DNA, 1038 bp, Wigglesworthia glossinidia brevipalpis; identical to SEQ ID NO: 1491
  CDS (1)..(1038)

SEQ ID NO: 47127 - protein, 345 aa, Wigglesworthia glossinidia brevipalpis; identical to SEQ ID NO: 1492

SEQ ID NO: 47128 - DNA, 1071 bp, Vibrio vulnificus; identical to SEQ ID NO: 1739
  CDS (1)..(1071)

SEQ ID NO: 47129 - protein, 356 aa, Vibrio vulnificus; identical to SEQ ID NO: 1740

SEQ ID NO: 47130 - DNA, 1053 bp, Vibrio vulnificus; identical to SEQ ID NO: 1493
  CDS (1)..(1053)

SEQ ID NO: 47131 - protein, 350 aa, Vibrio vulnificus; identical to SEQ ID NO: 1494

SEQ ID NO: 47132 - DNA, 1071 bp, Vibrio vulnificus; identical to SEQ ID NO: 1497
  CDS (1)..(1071)

SEQ ID NO: 47133 - protein, 356 aa, Vibrio vulnificus; identical to SEQ ID NO: 1498

SEQ ID NO: 47134 - DNA, 1062 bp, Synechococcus elongatus; identical to SEQ ID NO: 1499
  CDS (1)..(1062)

SEQ ID NO: 47135 - protein, 353 aa, Synechococcus elongatus; identical to SEQ ID NO: 1500

SEQ ID NO: 47136 - DNA, 1032 bp, Streptococcus mutans; identical to SEQ ID NO: 1501
  CDS (1)..(1032)

SEQ ID NO: 47137 - protein, 343 aa, Streptococcus mutans; identical to SEQ ID NO: 1502

SEQ ID NO: 47138 - DNA, 1035 bp, Streptococcus mutans; identical to SEQ ID NO: 1503
  CDS (1)..(1035)

SEQ ID NO: 47139 - protein, 344 aa, Streptococcus mutans; identical to SEQ ID NO: 1504

SEQ ID NO: 47140 - DNA, 1008 bp, Streptococcus agalactiae; identical to SEQ ID NO: 1505
  CDS (1)..(1008)

SEQ ID NO: 47141 - protein, 335 aa, Streptococcus agalactiae; identical to SEQ ID NO: 1506

SEQ ID NO: 47142 - DNA, 1065 bp, Shewanella oneidensis; identical to SEQ ID NO: 1507
  CDS (1)..(1065)

SEQ ID NO: 47143 - protein, 354 aa, Shewanella oneidensis; identical to SEQ ID NO: 1508

SEQ ID NO: 47144 - DNA, 1092 bp, Shewanella oneidensis; identical to SEQ ID NO: 1509
  CDS (1)..(1092)

SEQ ID NO: 47145 - protein, 363 aa, Shewanella oneidensis; identical to SEQ ID NO: 1510

SEQ ID NO: 47146 - DNA, 1059 bp, Shewanella oneidensis; identical to SEQ ID NO: 1511
  CDS (1)..(1059)

SEQ ID NO: 47147 - protein, 352 aa, Shewanella oneidensis; identical to SEQ ID NO: 1512

SEQ ID NO: 47148 - DNA, 1170 bp, Corynebacterium efficiens; identical to SEQ ID NO: 1515
  CDS (1)..(1170)

SEQ ID NO: 47149 - protein, 389 aa, Corynebacterium efficiens; identical to SEQ ID NO: 1516

SEQ ID NO: 47150 - DNA, 1134 bp, Bifidobacterium longum; identical to SEQ ID NO: 1517
  CDS (1)..(1134)

SEQ ID NO: 47151 - protein, 377 aa, Bifidobacterium longum; identical to SEQ ID NO: 1518

SEQ ID NO: 47152 - DNA, 1233 bp, Bifidobacterium longum; identical to SEQ ID NO: 1519
  CDS (1)..(1233)

SEQ ID NO: 47153 - protein, 410 aa, Bifidobacterium longum; identical to SEQ ID NO: 1520

SEQ ID NO: 47154 - DNA, 1221 bp, Phytophthora infestans; identical to SEQ ID NO: 1521
  CDS (20)..(1153)

SEQ ID NO: 47155 - protein, 377 aa, Phytophthora infestans; identical to SEQ ID NO: 1522

SEQ ID NO: 47156 - DNA, 1062 bp, Chlorobium tepidum; identical to SEQ ID NO: 1523
  CDS (1)..(1062)

SEQ ID NO: 47157 - protein, 353 aa, Chlorobium tepidum; identical to SEQ ID NO: 1524

SEQ ID NO: 47158 - DNA, 1074 bp, Xanthomonas campestris; identical to SEQ ID NO: 1525
  CDS (1)..(1074)

SEQ ID NO: 47159 - protein, 357 aa, Xanthomonas campestris; identical to SEQ ID NO: 1526

SEQ ID NO: 47160 - DNA, 1074 bp, Xanthomonas axonopodis; identical to SEQ ID NO: 1527
  CDS (1)..(1074)

SEQ ID NO: 47161 - protein, 357 aa, Xanthomonas axonopodis; identical to SEQ ID NO: 1528

SEQ ID NO: 47162 - DNA, 1080 bp, Ralstonia solanacearum; identical to SEQ ID NO: 1529
  CDS (1)..(1080)

SEQ ID NO: 47163 - protein, 359 aa, Ralstonia solanacearum; identical to SEQ ID NO: 1530

SEQ ID NO: 47164 - DNA, 1179 bp, Ralstonia solanacearum; identical to SEQ ID NO: 1531
  CDS (1)..(1179)

SEQ ID NO: 47165 - protein, 392 aa, Ralstonia solanacearum; identical to SEQ ID NO: 1532

SEQ ID NO: 47166 - DNA, 1065 bp, Synechococcus sp; identical to SEQ ID NO: 1533
  CDS (1)..(1065)

SEQ ID NO: 47167 - protein, 354 aa, Synechococcus sp; identical to SEQ ID NO: 1534

SEQ ID NO: 47168 - DNA, 1035 bp, Escherichia coli; identical to SEQ ID NO: 1535
  CDS (1)..(1035)

SEQ ID NO: 47169 - protein, 344 aa, Escherichia coli; identical to SEQ ID NO: 1536

SEQ ID NO: 47170 - DNA, 1200 bp, Stigmatella aurantiaca; identical to SEQ ID NO: 1537
  CDS (62)..(1147)

SEQ ID NO: 47171 - protein, 361 aa, Stigmatella aurantiaca; identical to SEQ ID NO: 1538

SEQ ID NO: 47172 - DNA, 1083 bp, Amycolatopsis mediterranei; identical to SEQ ID NO: 1541
  CDS (1)..(1083)

SEQ ID NO: 47173 - protein, 360 aa, Amycolatopsis mediterranei; identical to SEQ ID NO: 1542

SEQ ID NO: 47174 - DNA, 1053 bp, Pasteurella multocida; identical to SEQ ID NO: 1543
  CDS (1)..(1053)

SEQ ID NO: 47175 - protein, 350 aa, Pasteurella multocida; identical to SEQ ID NO: 1544

SEQ ID NO: 47176 - DNA, 1086 bp, Pasteurella multocida; identical to SEQ ID NO: 1545
  CDS (1)..(1086)

SEQ ID NO: 47177 - protein, 361 aa, Pasteurella multocida; identical to SEQ ID NO: 1546

SEQ ID NO: 47178 - DNA, 1125 bp, Emericella nidulans; identical to SEQ ID NO: 1547
  CDS (1)..(1125)

SEQ ID NO: 47179 - protein, 374 aa, Emericella nidulans; identical to SEQ ID NO: 1548

SEQ ID NO: 47180 - DNA, 1089 bp, Emericella nidulans; identical to SEQ ID NO: 1549
  CDS (1)..(1089)

SEQ ID NO: 47181 - protein, 362 aa, Emericella nidulans; identical to SEQ ID NO: 1550

SEQ ID NO: 47182 - DNA, 1239 bp, Vibrio cholerae; identical to SEQ ID NO: 1551
  CDS (114)..(1175)

SEQ ID NO: 47183 - protein, 353 aa, Vibrio cholerae; identical to SEQ ID NO: 1552

SEQ ID NO: 47184 - DNA, 2184 bp, Candida albicans; identical to SEQ ID NO: 1553
  CDS (461)..(1573)

SEQ ID NO: 47185 - protein, 370 aa, Candida albicans; identical to SEQ ID NO: 1554

SEQ ID NO: 47186 - DNA, 1047 bp, Buchnera aphidicola; identical to SEQ ID NO: 1555
  CDS (1)..(1047)

SEQ ID NO: 47187 - protein, 348 aa, Buchnera aphidicola; identical to SEQ ID NO: 1556

SEQ ID NO: 47188 - DNA, 1047 bp, Buchnera aphidicola; identical to SEQ ID NO: 1557
  CDS (1)..(1047)

SEQ ID NO: 47189 - protein, 348 aa, Buchnera aphidicola; identical to SEQ ID NO: 1558

SEQ ID NO: 47190 - DNA, 1047 bp, Erwinia herbicola; identical to SEQ ID NO: 1559
  CDS (1)..(1047)

SEQ ID NO: 47191 - protein, 348 aa, Erwinia herbicola; identical to SEQ ID NO: 1560

SEQ ID NO: 47192 - DNA, 1047 bp, Salmonella typhimurium; identical to SEQ ID NO: 1561
  CDS (1)..(1047)

SEQ ID NO: 47193 - protein, 348 aa, Salmonella typhimurium; identical to SEQ ID NO: 1562

SEQ ID NO: 47194 - DNA, 1047 bp, Shigella flexneri; identical to SEQ ID NO: 2473
  CDS (1)..(1047)

SEQ ID NO: 47195 - protein, 348 aa, Shigella flexneri; identical to SEQ ID NO: 2474

SEQ ID NO: 47196 - DNA, 25 bp, Artificial sequence
  Primer sequence
atgttcattaaaaacgatcacgccg

SEQ ID NO: 47197 - DNA, 25 bp, Artificial sequence
  Primer sequence
ctattttttcaaggcctttcttctg

SEQ ID NO: 47198 - protein, 353 aa, Artificial sequence; identical to SEQ ID NO: 24922
  Consensus
  Variant (2)..(3): Xaa in position 2 to 3 is any amino acid
  Variant (5)..(11): Xaa in position 5 to 11 is any amino acid
  Variant (13)..(24): Xaa in position 13 to 24 is any amino acid
  Variant (26)..(30): Xaa in position 26 to 30 is any amino acid
  Variant (32)..(33): Xaa in position 32 to 33 is any amino acid
  Variant (35)..(35): Xaa in position 35 is any amino acid
  Variant (37)..(37): Xaa in position 37 is any amino acid
  Variant (39)..(46): Xaa in position 39 to 46 is any amino acid
  Variant (51)..(51): Xaa in position 51 is any amino acid
  Variant (54)..(56): Xaa in position 54 to 56 is any amino acid
  Variant (58)..(59): Xaa in position 58 to 59 is any amino acid
  Variant (62)..(63): Xaa in position 62 to 63 is any amino acid
  Variant (65)..(76): Xaa in position 65 to 76 is any amino acid
  Variant (78)..(80): Xaa in position 78 to 80 is any amino acid
  Variant (83)..(83): Xaa in position 83 is any amino acid
  Variant (85)..(85): Xaa in position 85 is any amino acid
  Variant (91)..(93): Xaa in position 91 to 93 is any amino acid
  Variant (100)..(100): Xaa in position 100 is any amino acid
  Variant (103)..(112): Xaa in position 103 to 112 is any amino acid
  Variant (115)..(117): Xaa in position 115 to 117 is any amino acid
  Variant (119)..(119): Xaa in position 119 is any amino acid
  Variant (121)..(130): Xaa in position 121 to 130 is any amino acid
  Variant (132)..(132): Xaa in position 132 is any amino acid
  Variant (134)..(134): Xaa in position 134 is any amino acid
  Variant (136)..(136): Xaa in position 136 is any amino acid
  Variant (139)..(142): Xaa in position 139 to 142 is any amino acid
  Variant (144)..(146): Xaa in position 144 to 146 is any amino acid
  Variant (148)..(152): Xaa in position 148 to 152 is any amino acid
  Variant (163)..(163): Xaa in position 163 is any amino acid
  Variant (166)..(168): Xaa in position 166 to 168 is any amino acid
  Variant (171)..(171): Xaa in position 171 is any amino acid
  Variant (174)..(174): Xaa in position 174 is any amino acid
  Variant (176)..(176): Xaa in position 176 is any amino acid
  Variant (181)..(181): Xaa in position 181 is any amino acid
  Variant (183)..(183): Xaa in position 183 is any amino acid
  Variant (185)..(188): Xaa in position 185 to 188 is any amino acid
  Variant (190)..(191): Xaa in position 190 to 191 is any amino acid
  Variant (193)..(195): Xaa in position 193 to 195 is any amino acid
  Variant (197)..(199): Xaa in position 197 to 199 is any amino acid
  Variant (201)..(201): Xaa in position 201 is any amino acid
  Variant (203)..(208): Xaa in position 203 to 208 is any amino acid
  Variant (210)..(215): Xaa in position 210 to 215 is any amino acid
  Variant (217)..(217): Xaa in position 217 is any amino acid
  Variant (220)..(222): Xaa in position 220 to 222 is any amino acid
  Variant (224)..(225): Xaa in position 224 to 225 is any amino acid
  Variant (230)..(238): Xaa in position 230 to 238 is any amino acid
  Variant (241)..(269): Xaa in position 241 to 269 is any amino acid
  Variant (271)..(271): Xaa in position 271 is any amino acid
  Variant (274)..(274): Xaa in position 274 is any amino acid
  Variant (277)..(277): Xaa in position 277 is any amino acid
  Variant (279)..(282): Xaa in position 279 to 282 is any amino acid
  Variant (284)..(285): Xaa in position 284 to 285 is any amino acid
  Variant (287)..(292): Xaa in position 287 to 292 is any amino acid
  Variant (294)..(296): Xaa in position 294 to 296 is any amino acid
  Variant (298)..(305): Xaa in position 298 to 305 is any amino acid
  Variant (307)..(307): Xaa in position 307 is any amino acid
  Variant (309)..(309): Xaa in position 309 is any amino acid
  Variant (312)..(315): Xaa in position 312 to 315 is any amino acid
  Variant (317)..(317): Xaa in position 317 is any amino acid
  Variant (319)..(334): Xaa in position 319 to 334 is any amino acid
  Variant (337)..(337): Xaa in position 337 is any amino acid
  Variant (339)..(339): Xaa in position 339 is any amino acid
  Variant (342)..(342): Xaa in position 342 is any amino acid
  Variant (344)..(345): Xaa in position 344 to 345 is any amino acid
  Variant (347)..(348): Xaa in position 347 to 348 is any amino acid
  Variant (350)..(352): Xaa in position 350 to 352 is any amino acid

SEQ ID NO: 47199 - protein, 72 aa, Artificial sequence; identical to SEQ ID NO: 2906
  Consensus
  Variant (5)..(5): Xaa in position 5 is Ile, Val, Ser or Leu
  Variant (6)..(6): Xaa in position 6 is His or Asp
  Variant (7)..(7): Xaa in position 7 is Asp or Asn
  Variant (8)..(10): Xaa in position 8 to 10 is any amino acid
  Variant (11)..(11): Xaa in position 11 is Ala, Val or Gly
  Variant (12)..(12): Xaa in position 12 is any amino acid
  Variant (13)..(13): Xaa in position 13 is Glu, Asp, Ala or Gln
  Variant (15)..(15): Xaa in position 15 is Ala, Gly or Cys
  Variant (16)..(17): Xaa in position 16 to 17 is any amino acid
  Variant (18)..(18): Xaa in position 18 is Leu, Ile or Phe
  Variant (19)..(28): Xaa in position 19 to 28 is any amino acid
  Variant (29)..(30): Xaa in position 29 to 30 is any or no amino acid
  Variant (31)..(31): Xaa in position 31 is Leu, Ile, Phe or Met
  Variant (32)..(32): Xaa in position 32 is any amino acid
  Variant (33)..(33): Xaa in position 33 is Ile, Val, Leu or Met
  Variant (34)..(34): Xaa in position 34 is Val, Ile or Leu
  Variant (37)..(37): Xaa in position 37 is Val, Ala or Thr
  Variant (39)..(39): Xaa in position 39 is Phe, Leu, Thr or Val
  Variant (40)..(40): Xaa in position 40 is Glu or Ala
  Variant (45)..(46): Xaa in position 45 to 46 is any amino acid
  Variant (47)..(47): Xaa in position 47 is any or no amino acid
  Variant (49)..(49): Xaa in position 49 is Trp or Tyr
  Variant (50)..(50): Xaa in position 50 is Lys or Arg
  Variant (52)..(52): Xaa in position 52 is Leu, Phe, Met or Tyr
  Variant (53)..(53): Xaa in position 53 is Ile, Val, Ala or Leu
  Variant (54)..(54): Xaa in position 54 is any amino acid
  Variant (55)..(55): Xaa in position 55 is Asp, Glu or Gln
  Variant (57)..(57): Xaa in position 57 is any amino acid
  Variant (58)..(58): Xaa in position 58 is Leu, Met, Ile, Val, Ala or Thr
  Variant (59)..(59): Xaa in position 59 is Asp, Asn or Ser
  Variant (60)..(63): Xaa in position 60 to 63 is any amino acid
  Variant (64)..(64): Xaa in position 64 is Ile, Val, Leu or Met
  Variant (65)..(66): Xaa in position 65 to 66 is any amino acid
  Variant (68)..(68): Xaa in position 68 is Leu, Ile, Met or Val
  Variant (69)..(70): Xaa in position 69 to 70 is any amino acid
  Variant (71)..(71): Xaa in position 71 is Ala, Ser, Gly, Val or Thr

SEQ ID NO: 47200 - protein, 76 aa, Artificial sequence; identical to SEQ ID NO: 2907
  Consensus
  Variant (1)..(1): Xaa in position 1 is Ala or Ser
  Variant (2)..(2): Xaa in position 2 is Ile or Val
  Variant (6)..(6): Xaa in position 6 is Thr, Ser or Asn
  Variant (7)..(7): Xaa in position 7 is Thr, Val, Ala, Ser or Ile
  Variant (8)..(8): Xaa in position 8 is Glu or Ala
  Variant (9)..(9): Xaa in position 9 is Ser, Asp or Asn
  Variant (11)..(11): Xaa in position 11 is any amino acid
  Variant (14)..(14): Xaa in position 14 is Glu, Gln, Phe or Met
  Variant (15)..(15): Xaa in position 15 is Leu, Met, Val, Phe or Ile
  Variant (16)..(16): Xaa in position 16 is Ala, Ser, Thr, Cys or Val
  Variant (18)..(18): Xaa in position 18 is Gly, Ala or Asn
  Variant (19)..(21): Xaa in position 19 to 21 is any amino acid
  Variant (22)..(22): Xaa in position 22 is Pro or Ala
  Variant (23)..(23): Xaa in position 23 is Val, Ile, Thr or Leu
  Variant (25)..(25): Xaa in position 25 is Phe, Met, Tyr or Ile
  Variant (28)..(28): Xaa in position 28 is any amino acid
  Variant (29)..(29): Xaa in position 29 is Thr, Ser or Arg
  Variant (30)..(30): Xaa in position 30 is any amino acid
  Variant (32)..(35): Xaa in position 32 to 35 is any amino acid
  Variant (36)..(36): Xaa in position 36 is Ala or Met
  Variant (37)..(37): Xaa in position 37 is any amino acid
  Variant (38)..(38): Xaa in position 38 is Asp, Asn or Glu
  Variant (39)..(39): Xaa in position 39 is Ala or Gly
  Variant (40)..(41): Xaa in position 40 to 41 is any amino acid
  Variant (42)..(42): Xaa in position 42 is Ala or Ser
  Variant (43)..(43): Xaa in position 43 is Ala, Ser, Val or Thr
  Variant (44)..(46): Xaa in position 44 to 46 is any amino acid
  Variant (47)..(47): Xaa in position 47 is His or Gln
  Variant (48)..(48): Xaa in position 48 is any amino acid
  Variant (49)..(49): Xaa in position 49 is Phe, Tyr, His or Val
  Variant (50)..(51): Xaa in position 50 to 51 is any amino acid
  Variant (52)..(55): Xaa in position 52 to 55 is any or no amino acid
  Variant (57)..(60): Xaa in position 57 to 60 is any amino acid
  Variant (61)..(62): Xaa in position 61 to 62 is any or no amino acid
  Variant (63)..(63): Xaa in position 63 is Thr or Ser
  Variant (64)..(64): Xaa in position 64 is any amino acid
  Variant (67)..(69): Xaa in position 67 to 69 is any amino acid
  Variant (70)..(70): Xaa in position 70 is His or Phe
  Variant (71)..(71): Xaa in position 71 is Val, Ile, Leu or Ala
  Variant (72)..(72): Xaa in position 72 is Ile or Val
  Variant (73)..(73): Xaa in position 73 is Leu or Met
  Variant (76)..(76): Xaa in position 76 is Gly, Ala or Ser

SEQ ID NO: 47201 - protein, 83 aa, Artificial sequence; identical to SEQ ID NO: 2908
  Consensus
  Variant (1)..(1): Xaa in position 1 is Leu, Ile or Val
  Variant (2)..(2): Xaa in position 2 is Met, Val, Ile or Leu
  Variant (3)..(3): Xaa in position 3 is Ile or Val
  Variant (5)..(5): Xaa in position 5 is Cys, Phe, Ala, Thr or Tyr
  Variant (6)..(6): Xaa in position 6 is Ser, Asn or Ala
  Variant (8)..(8): Xaa in position 8 is Gly, Ala or Asp
  Variant (10)..(10): Xaa in position 10 is Ser or Cys
  Variant (11)..(11): Xaa in position 11 is any amino acid
  Variant (13)..(15): Xaa in position 13 to 15 is any amino acid
  Variant (16)..(16): Xaa in position 16 is Arg, Asn, Lys, Leu or Glu
  Variant (18)..(19): Xaa in position 18 to 19 is any amino acid
  Variant (20)..(20): Xaa in position 20 is Val or Ile
  Variant (21)..(26): Xaa in position 21 to 26 is any amino acid
  Variant (27)..(27): Xaa in position 27 is Gln, Asn or Arg
  Variant (28)..(28): Xaa in position 28 is Ile, Leu, Val, Arg or Met
  Variant (29)..(30): Xaa in position 29 to 30 is any amino acid
  Variant (31)..(31): Xaa in position 31 is Gly, Asn or Asp
  Variant (32)..(32): Xaa in position 32 is any amino acid
  Variant (33)..(37): Xaa in position 33 to 37 is any or no amino acid
  Variant (38)..(38): Xaa in position 38 is Ile, Val or Leu
  Variant (39)..(39): Xaa in position 39 is any amino acid
  Variant (41)..(41): Xaa in position 41 is any amino acid
  Variant (43)..(43): Xaa in position 43 is Ile, Leu, Val, Ala or Met
  Variant (46)..(46): Xaa in position 46 is His, Phe, Asn or Tyr
  Variant (47)..(47): Xaa in position 47 is Leu or Ile
  Variant (48)..(49): Xaa in position 48 to 49 is any amino acid
  Variant (51)..(51): Xaa in position 51 is any amino acid
  Variant (53)..(57): Xaa in position 53 to 57 is any amino acid
  Variant (58)..(69): Xaa in position 58 to 69 is any or no amino acid
  Variant (71)..(71): Xaa in position 71 is any amino acid
  Variant (73)..(73): Xaa in position 73 is Ile or Val
  Variant (76)..(76): Xaa in position 76 is any amino acid
  Variant (78)..(78): Xaa in position 78 is Ile, Leu or Val
  Variant (79)..(79): Xaa in position 79 is any amino acid
  Variant (80)..(80): Xaa in position 80 is Trp, Ile, Leu or Phe
  Variant (81)..(82): Xaa in position 81 to 82 is any amino acid
  Variant (83)..(83): Xaa in position 83 is Thr or Ser

SEQ ID NO: 47202 - DNA, 1992 bp, Saccharomyces cerevisiae; identical to SEQ ID NO: 46090
  CDS (1)..(1992)

SEQ ID NO: 47203 - protein, 663 aa, Saccharomyces cerevisiae; identical to SEQ ID NO: 46091

SEQ ID NO: 47204 - DNA, 28 bp, Artificial sequence
  Primer sequence
atgaagttactttttaaaagatattcgt

SEQ ID NO: 47205 - DNA, 27 bp, Artificial sequence
  Primer sequence
ttatttttgttgcatttgcttagatct

SEQ ID NO: 47206 - DNA, 1163 bp, Escherichia coli; identical to SEQ ID NO: 17374
  CDS (215)..(1009)

SEQ ID NO: 47207 - protein, 264 aa, Escherichia coli; identical to SEQ ID NO: 17375

SEQ ID NO: 47208 - DNA, 927 bp, Xenopus tropicalis; identical to SEQ ID NO: 17376
  CDS (1)..(927)

SEQ ID NO: 47209 - protein, 308 aa, Xenopus tropicalis; identical to SEQ ID NO: 17377

SEQ ID NO: 47210 - DNA, 780 bp, Saccharomyces cerevisiae; identical to SEQ ID NO: 17378
  CDS (1)..(780)

SEQ ID NO: 47211 - protein, 259 aa, Saccharomyces cerevisiae; identical to SEQ ID NO: 17379

SEQ ID NO: 47212 - DNA, 873 bp, Ateline herpesvirus 3; identical to SEQ ID NO: 17380
  CDS (1)..(873)

SEQ ID NO: 47213 - protein, 290 aa, Ateline herpesvirus 3; identical to SEQ ID NO: 17381

SEQ ID NO: 47214 - DNA, 879 bp, Melanoplus sanguinipes entomopoxvirus; identical to SEQ ID NO: 17382
  CDS (1)..(879)

SEQ ID NO: 47215 - protein, 292 aa, Melanoplus sanguinipes entomopoxvirus; identical to SEQ ID NO: 17383

SEQ ID NO: 47216 - DNA, 888 bp, Cercopithecine herpesvirus 9; identical to SEQ ID NO: 17384
  CDS (1)..(888)

SEQ ID NO: 47217 - protein, 295 aa, Cercopithecine herpesvirus 9; identical to SEQ ID NO: 17385

SEQ ID NO: 47218 - DNA, 987 bp, Mycoplasma pneumoniae M129; identical to SEQ ID NO: 17386
  CDS (1)..(987): transl_table=4

SEQ ID NO: 47219 - protein, 328 aa, Mycoplasma pneumoniae M129; identical to SEQ ID NO: 17387

SEQ ID NO: 47220 - DNA, 888 bp, Invertebrate iridescent virus 6; identical to SEQ ID NO: 17388
  CDS (1)..(888)

SEQ ID NO: 47221 - protein, 295 aa, Invertebrate iridescent virus 6; identical to SEQ ID NO: 17389

SEQ ID NO: 47222 - DNA, 1479 bp, Arabidopsis thaliana; identical to SEQ ID NO: 17390
  CDS (1)..(1479)

SEQ ID NO: 47223 - protein, 492 aa, Arabidopsis thaliana; identical to SEQ ID NO: 17391

SEQ ID NO: 47224 - DNA, 1698 bp, Arabidopsis thaliana; identical to SEQ ID NO: 17392
  CDS (1)..(1698)

SEQ ID NO: 47225 - protein, 565 aa, Arabidopsis thaliana; identical to SEQ ID NO: 17393

SEQ ID NO: 47226 - DNA, 1164 bp, Deinococcus radiodurans R1; identical to SEQ ID NO: 17394
  CDS (1)..(1164): transl_table=11

SEQ ID NO: 47227 - protein, 387 aa, Deinococcus radiodurans R1; identical to SEQ ID NO: 17395

SEQ ID NO: 47228 - DNA, 801 bp, Mycobacterium tuberculosis CDC1551; identical to SEQ ID NO: 17396
  CDS (1)..(801): transl_table=11

SEQ ID NO: 47229 - protein, 266 aa, Mycobacterium tuberculosis CDC1551; identical to SEQ ID NO: 17397

SEQ ID NO: 47230 - DNA, 840 bp, Agrobacterium tumefaciens str. C58; identical to SEQ ID NO: 17398
  CDS (1)..(840): transl_table=11

SEQ ID NO: 47231 - protein, 279 aa, Agrobacterium tumefaciens str. C58; identical to SEQ ID NO: 17399

SEQ ID NO: 47232 - DNA, 870 bp, Shrimp white spot syndrome virus; identical to SEQ ID NO: 17400
  CDS (1)..(870)

SEQ ID NO: 47233 - protein, 289 aa, Shrimp white spot syndrome virus; identical to SEQ ID NO: 17401

SEQ ID NO: 47234 - DNA, 1116 bp, Salmonella enterica subsp. enterica serovar Typhi str. CT18; identical to SEQ ID NO: 17402
  CDS (1)..(1116): transl_table=11

SEQ ID NO: 47235 - protein, 371 aa, Salmonella enterica subsp. enterica serovar Typhi str. CT18; identical to SEQ ID NO: 17403

SEQ ID NO: 47236 - DNA, 1002 bp, Cercopithecine herpesvirus 17; identical to SEQ ID NO: 17404
  CDS (1)..(1002)

SEQ ID NO: 47237 - protein, 333 aa, Cercopithecine herpesvirus 17; identical to SEQ ID NO: 17405

SEQ ID NO: 47238 - DNA, 960 bp, Danio rerio; identical to SEQ ID NO: 17406
  CDS (1)..(960)

SEQ ID NO: 47239 - protein, 319 aa, Danio rerio; identical to SEQ ID NO: 17407

SEQ ID NO: 47240 - DNA, 1878 bp, Schizosaccharomyces pombe 972h-; identical to SEQ ID NO: 17408
  CDS (1)..(1878)

SEQ ID NO: 47241 - protein, 625 aa, Schizosaccharomyces pombe 972h-; identical to SEQ ID NO: 17409

SEQ ID NO: 47242 - DNA, 864 bp, Streptococcus pyogenes MGAS315; identical to SEQ ID NO: 17410
  CDS (1)..(864): transl_table=11

SEQ ID NO: 47243 - protein, 287 aa, Streptococcus pyogenes MGAS315; identical to SEQ ID NO: 17411

SEQ ID NO: 47244 - DNA, 876 bp, Heliothis zea virus 1; identical to SEQ ID NO: 17412
  CDS (1)..(876)

SEQ ID NO: 47245 - protein, 291 aa, Heliothis zea virus 1; identical to SEQ ID NO: 17413

SEQ ID NO: 47246 - DNA, 1827 bp, Plasmodium falciparum 3D7; identical to SEQ ID NO: 17414
  CDS (1)..(1827)

SEQ ID NO: 47247 - protein, 608 aa, Plasmodium falciparum 3D7; identical to SEQ ID NO: 17415

SEQ ID NO: 47248 - DNA, 861 bp, Enterobacteria phage RB69; identical to SEQ ID NO: 17416
  CDS (1)..(861): transl_table=11

SEQ ID NO: 47249 - protein, 286 aa, Enterobacteria phage RB69; identical to SEQ ID NO: 17417

SEQ ID NO: 47250 - DNA, 804 bp, Porphyromonas gingivalis W83; identical to SEQ ID NO: 17418
  CDS (1)..(804): transl_table=11

SEQ ID NO: 47251 - protein, 267 aa, Porphyromonas gingivalis W83; identical to SEQ ID NO: 17419

SEQ ID NO: 47252 - DNA, 840 bp, Bacteriophage 44RR2.8t; identical to SEQ ID NO: 17420
  CDS (1)..(840): transl_table=11

SEQ ID NO: 47253 - protein, 279 aa, Bacteriophage 44RR2.8t; identical to SEQ ID NO: 17421

SEQ ID NO: 47254 - DNA, 834 bp, Bacteriophage Aeh1; identical to SEQ ID NO: 17422
  CDS (1)..(834): transl_table=11

SEQ ID NO: 47255 - protein, 277 aa, Bacteriophage Aeh1; identical to SEQ ID NO: 17423

SEQ ID NO: 47256 - DNA, 900 bp, Bacteriophage Felix 01; identical to SEQ ID NO: 17424
  CDS (1)..(900): transl_table=11

SEQ ID NO: 47257 - protein, 299 aa, Bacteriophage Felix 01; identical to SEQ ID NO: 17425

SEQ ID NO: 47258 - DNA, 1023 bp, Eremothecium gossypii; identical to SEQ ID NO: 17426
  CDS (1)..(1023)

SEQ ID NO: 47259 - protein, 340 aa, Eremothecium gossypii; identical to SEQ ID NO: 17427

SEQ ID NO: 47260 - DNA, 870 bp, Anopheles gambiae str. PEST; identical to SEQ ID NO: 17428
  CDS (1)..(870)

SEQ ID NO: 47261 - protein, 289 aa, Anopheles gambiae str. PEST; identical to SEQ ID NO: 17429

SEQ ID NO: 47262 - DNA, 1107 bp, Neurospora crassa; identical to SEQ ID NO: 17430
  CDS (1)..(1107)

SEQ ID NO: 47263 - protein, 368 aa, Neurospora crassa; identical to SEQ ID NO: 17431

SEQ ID NO: 47264 - DNA, 1020 bp, Magnaporthe grisea 70-15; identical to SEQ ID NO: 17432
  CDS (1)..(1020)

SEQ ID NO: 47265 - protein, 339 aa, Magnaporthe grisea 70-15; identical to SEQ ID NO: 17433

SEQ ID NO: 47266 - DNA, 978 bp, Gibberella zeae PH-1; identical to SEQ ID NO: 17434
  CDS (1)..(978)

SEQ ID NO: 47267 - protein, 325 aa, Gibberella zeae PH-1; identical to SEQ ID NO: 17435

SEQ ID NO: 47268 - DNA, 1665 bp, Ustilago maydis 521; identical to SEQ ID NO: 17436
  CDS (1)..(1665)

SEQ ID NO: 47269 - protein, 554 aa, Ustilago maydis 521; identical to SEQ ID NO: 17437

SEQ ID NO: 47270 - DNA, 3207 bp, Gallus gallus; identical to SEQ ID NO: 17438
  CDS (1)..(3207)

SEQ ID NO: 47271 - protein, 1068 aa, Gallus gallus; identical to SEQ ID NO: 17439

SEQ ID NO: 47272 - DNA, 897 bp, Candida glabrata CBS138; identical to SEQ ID NO: 17440
  CDS (1)..(897)

SEQ ID NO: 47273 - protein, 298 aa, Candida glabrata CBS138; identical to SEQ ID NO: 17441

SEQ ID NO: 47274 - DNA, 939 bp, Kluyveromyces lactis NRRL Y-1140; identical to SEQ ID NO: 17442
  CDS (1)..(939)

SEQ ID NO: 47275 - protein, 312 aa, Kluyveromyces lactis NRRL Y-1140; identical to SEQ ID NO: 17443

SEQ ID NO: 47276 - DNA, 951 bp, Debaryomyces hansenii CBS767; identical to SEQ ID NO: 17444
  CDS (1)..(951)

SEQ ID NO: 47277 - protein, 316 aa, Debaryomyces hansenii CBS767; identical to SEQ ID NO: 17445

SEQ ID NO: 47278 - DNA, 891 bp, Yarrowia lipolytica CLIB99; identical to SEQ ID NO: 17446
  CDS (1)..(891)

SEQ ID NO: 47279 - protein, 296 aa, Yarrowia lipolytica CLIB99; identical to SEQ ID NO: 17447

SEQ ID NO: 47280 - DNA, 978 bp, Canis familiaris; identical to SEQ ID NO: 17448
  CDS (1)..(978)

SEQ ID NO: 47281 - protein, 325 aa, Canis familiaris; identical to SEQ ID NO: 17449

SEQ ID NO: 47282 - DNA, 1257 bp, Canis familiaris; identical to SEQ ID NO: 17450
  CDS (1)..(1257)

SEQ ID NO: 47283 - protein, 418 aa, Canis familiaris; identical to SEQ ID NO: 17451

SEQ ID NO: 47284 - DNA, 918 bp, Apis mellifera; identical to SEQ ID NO: 17452
  CDS (1)..(918)

SEQ ID NO: 47285 - protein, 305 aa, Apis mellifera; identical to SEQ ID NO: 17453

SEQ ID NO: 47286 - DNA, 1965 bp, Aspergillus nidulans FGSC A4; identical to SEQ ID NO: 17454
  CDS (1)..(1965)

SEQ ID NO: 47287 - protein, 654 aa, Aspergillus nidulans FGSC A4; identical to SEQ ID NO: 17455

SEQ ID NO: 47288 - DNA, 1566 bp, Cryptosporidium hominis; identical to SEQ ID NO: 17456
  CDS (1)..(1566)

SEQ ID NO: 47289 - protein, 521 aa, Cryptosporidium hominis; identical to SEQ ID NO: 17457

SEQ ID NO: 47290 - DNA, 1758 bp, Plasmodium berghei; identical to SEQ ID NO: 17458
  CDS (1)..(1758)

SEQ ID NO: 47291 - protein, 585 aa, Plasmodium berghei; identical to SEQ ID NO: 17459

SEQ ID NO: 47292 - DNA, 840 bp, Enterobacteria phage T5; identical to SEQ ID NO: 17460
  CDS (1)..(840): transl_table=11

SEQ ID NO: 47293 - protein, 279 aa, Enterobacteria phage T5; identical to SEQ ID NO: 17461

SEQ ID NO: 47294 - DNA, 864 bp, Streptococcus pyogenes MGAS10394; identical to SEQ ID NO: 17462
  CDS (1)..(864): transl_table=11

SEQ ID NO: 47295 - protein, 287 aa, Streptococcus pyogenes MGAS10394; identical to SEQ ID NO: 17463

SEQ ID NO: 47296 - DNA, 861 bp, Lymphocystis disease virus - isolate China; identical to SEQ ID NO: 17464
  CDS (1)..(861)

SEQ ID NO: 47297 - protein, 286 aa, Lymphocystis disease virus - isolate China; identical to SEQ ID NO: 17465

SEQ ID NO: 47298 - DNA, 972 bp, Burkholderia mallei ATCC 23344; identical to SEQ ID NO: 17466
  CDS (1)..(972): transl_table=11

SEQ ID NO: 47299 - protein, 323 aa, Burkholderia mallei ATCC 23344; identical to SEQ ID NO: 17467

SEQ ID NO: 47300 - DNA, 990 bp, Burkholderia pseudomallei K96243; identical to SEQ ID NO: 17468
  CDS (1)..(990): transl_table=11

SEQ ID NO: 47301 - protein, 329 aa, Burkholderia pseudomallei K96243; identical to SEQ ID NO: 17469

SEQ ID NO: 47302 - DNA, 1692 bp, Acanthamoeba polyphaga mimivirus; identical to SEQ ID NO: 17470
  CDS (1)..(1692)

SEQ ID NO: 47303 - protein, 563 aa, Acanthamoeba polyphaga mimivirus; identical to SEQ ID NO: 17471

SEQ ID NO: 47304 - DNA, 858 bp, Vibrio fischeri ES114; identical to SEQ ID NO: 17472
  CDS (1)..(858): transl_table=11

SEQ ID NO: 47305 - protein, 285 aa, Vibrio fischeri ES114; identical to SEQ ID NO: 17473

SEQ ID NO: 47306 - DNA, 795 bp, Neisseria gonorrhoeae FA 1090; identical to SEQ ID NO: 17474
  CDS (1)..(795): transl_table=11

SEQ ID NO: 47307 - protein, 264 aa, Neisseria gonorrhoeae FA 1090; identical to SEQ ID NO: 17475

SEQ ID NO: 47308 - DNA, 795 bp, Bacteroides fragilis NCTC 9343; identical to SEQ ID NO: 17476
  CDS (1)..(795): transl_table=11

SEQ ID NO: 47309 - protein, 264 aa, Bacteroides fragilis NCTC 9343; identical to SEQ ID NO: 17477

SEQ ID NO: 47310 - DNA, 972 bp, Pseudomonas syringae pv. syringae B728a; identical to SEQ ID NO: 17478
  CDS (1)..(972)

SEQ ID NO: 47311 - protein, 323 aa, Pseudomonas syringae pv. syringae B728a; identical to SEQ ID NO: 17479

SEQ ID NO: 47312 - DNA, 1002 bp, Macaca fuscata rhadinovirus; identical to SEQ ID NO: 17480
  CDS (1)..(1002)

SEQ ID NO: 47313 - protein, 333 aa, Macaca fuscata rhadinovirus; identical to SEQ ID NO: 17481

SEQ ID NO: 47314 - DNA, 858 bp, Enterobacteria phage RB43; identical to SEQ ID NO: 17482
  CDS (1)..(858): transl_table=11

SEQ ID NO: 47315 - protein, 285 aa, Enterobacteria phage RB43; identical to SEQ ID NO: 17483

SEQ ID NO: 47316 - DNA, 852 bp, Haemophilus influenzae 86-028NP; identical to SEQ ID NO: 17484
  CDS (1)..(852): transl_table=11

SEQ ID NO: 47317 - protein, 283 aa, Haemophilus influenzae 86-028NP; identical to SEQ ID NO: 17485

SEQ ID NO: 47318 - DNA, 822 bp, Corynebacterium jeikeium K411; identical to SEQ ID NO: 17486
  CDS (1)..(822): transl_table=11

SEQ ID NO: 47319 - protein, 273 aa, Corynebacterium jeikeium K411; identical to SEQ ID NO: 17487

SEQ ID NO: 47320 - DNA, 897 bp, Rhodobacter sphaeroides 2.4.1; identical to SEQ ID NO: 17488
  CDS (1)..(897)

SEQ ID NO: 47321 - protein, 298 aa, Rhodobacter sphaeroides 2.4.1; identical to SEQ ID NO: 17489

SEQ ID NO: 47322 - DNA, 957 bp, Lactobacillus gasseri; identical to SEQ ID NO: 17490
  CDS (1)..(957)

SEQ ID NO: 47323 - protein, 318 aa, Lactobacillus gasseri; identical to SEQ ID NO: 17491

SEQ ID NO: 47324 - DNA, 795 bp, Magnetospirillum magnetotacticum MS-1; identical to SEQ ID NO: 17492
  CDS (1)..(795)

SEQ ID NO: 47325 - protein, 264 aa, Magnetospirillum magnetotacticum MS-1; identical to SEQ ID NO: 17493

SEQ ID NO: 47326 - DNA, 969 bp, Leuconostoc mesenteroides subsp. mesenteroides ATCC 8293; identical to SEQ ID NO: 17494
  CDS (1)..(969)

SEQ ID NO: 47327 - protein, 322 aa, Leuconostoc mesenteroides subsp. mesenteroides ATCC 8293; identical to SEQ ID NO: 17495

SEQ ID NO: 47328 - DNA, 852 bp, Haemophilus somnus 129PT; identical to SEQ ID NO: 17496
  CDS (1)..(852)

SEQ ID NO: 47329 - protein, 283 aa, Haemophilus somnus 129PT; identical to SEQ ID NO: 17497

SEQ ID NO: 47330 - DNA, 828 bp, Fusobacterium nucleatum subsp. vincentii ATCC 49256; identical to SEQ ID NO: 17498
  CDS (1)..(828): transl_table=11

SEQ ID NO: 47331 - protein, 275 aa, Fusobacterium nucleatum subsp. vincentii ATCC 49256; identical to SEQ ID NO: 17499

SEQ ID NO: 47332 - DNA, 795 bp, Dechloromonas aromatica RCB; identical to SEQ ID NO: 17500
  CDS (1)..(795)

SEQ ID NO: 47333 - protein, 264 aa, Dechloromonas aromatica RCB; identical to SEQ ID NO: 17501

SEQ ID NO: 47334 - DNA, 795 bp, Ralstonia eutropha JMP134; identical to SEQ ID NO: 17502
  CDS (1)..(795)

SEQ ID NO: 47335 - protein, 264 aa, Ralstonia eutropha JMP134; identical to SEQ ID NO: 17503

SEQ ID NO: 47336 - DNA, 852 bp, Haemophilus influenzae R2846; identical to SEQ ID NO: 17504
  CDS (1)..(852)

SEQ ID NO: 47337 - protein, 283 aa, Haemophilus influenzae R2846; identical to SEQ ID NO: 17505

SEQ ID NO: 47338 - DNA, 873 bp, Bifidobacterium longum DJO10A; identical to SEQ ID NO: 17506
  CDS (1)..(873)

SEQ ID NO: 47339 - protein, 290 aa, Bifidobacterium longum DJO10A; identical to SEQ ID NO: 17507

SEQ ID NO: 47340 - DNA, 972 bp, Burkholderia cepacia R18194; identical to SEQ ID NO: 17508
  CDS (1)..(972)

SEQ ID NO: 47341 - protein, 323 aa, Burkholderia cepacia R18194; identical to SEQ ID NO: 17509

SEQ ID NO: 47342 - DNA, 945 bp, Listeria monocytogenes str. 1/2a F6854; identical to SEQ ID NO: 17510
  CDS (1)..(945): transl_table=11

SEQ ID NO: 47343 - protein, 314 aa, Listeria monocytogenes str. 1/2a F6854; identical to SEQ ID NO: 17511

SEQ ID NO: 47344 - DNA, 957 bp, Bacillus cereus G9241; identical to SEQ ID NO: 17512
  CDS (1)..(957): transl_table=11

SEQ ID NO: 47345 - protein, 318 aa, Bacillus cereus G9241; identical to SEQ ID NO: 17513

SEQ ID NO: 47346 - DNA, 951 bp, Rubrivivax gelatinosus PM1; identical to SEQ ID NO: 17514
  CDS (1)..(951)

SEQ ID NO: 47347 - protein, 316 aa, Rubrivivax gelatinosus PM1; identical to SEQ ID NO: 17515

SEQ ID NO: 47348 - DNA, 786 bp, Rubrivivax gelatinosus PM1; identical to SEQ ID NO: 17516
  CDS (1)..(786)

SEQ ID NO: 47349 - protein, 261 aa, Rubrivivax gelatinosus PM1; identical to SEQ ID NO: 17517

SEQ ID NO: 47350 - DNA, 972 bp, Pseudomonas fluorescens PfO-1; identical to SEQ ID NO: 17518
  CDS (1)..(972)

SEQ ID NO: 47351 - protein, 323 aa, Pseudomonas fluorescens PfO-1; identical to SEQ ID NO: 17519

SEQ ID NO: 47352 - DNA, 972 bp, Burkholderia fungorum LB400; identical to SEQ ID NO: 17520
  CDS (1)..(972)

SEQ ID NO: 47353 - protein, 323 aa, Burkholderia fungorum LB400; identical to SEQ ID NO: 17521

SEQ ID NO: 47354 - DNA, 945 bp, Novosphingobium aromaticivorans DSM 12444; identical to SEQ ID NO: 17522
  CDS (1)..(945)

SEQ ID NO: 47355 - protein, 314 aa, Novosphingobium aromaticivorans DSM 12444; identical to SEQ ID NO: 17523

SEQ ID NO: 47356 - DNA, 795 bp, Cytophaga hutchinsonii; identical to SEQ ID NO: 17524
  CDS (1)..(795)

SEQ ID NO: 47357 - protein, 264 aa, Cytophaga hutchinsonii; identical to SEQ ID NO: 17525

SEQ ID NO: 47358 - DNA, 834 bp, Microbulbifer degradans 2-40; identical to SEQ ID NO: 17526
  CDS (1)..(834)

SEQ ID NO: 47359 - protein, 277 aa, Microbulbifer degradans 2-40; identical to SEQ ID NO: 17527

SEQ ID NO: 47360 - DNA, 960 bp, Oenococcus oeni PSU-1; identical to SEQ ID NO: 17528
  CDS (1)..(960)

SEQ ID NO: 47361 - protein, 319 aa, Oenococcus oeni PSU-1; identical to SEQ ID NO: 17529

SEQ ID NO: 47362 - DNA, 951 bp, Pediococcus pentosaceus ATCC 25745; identical to SEQ ID NO: 17530
  CDS (1)..(951)

SEQ ID NO: 47363 - protein, 316 aa, Pediococcus pentosaceus ATCC 25745; identical to SEQ ID NO: 17531

SEQ ID NO: 47364 - DNA, 840 bp, Streptococcus suis 89/1591; identical to SEQ ID NO: 17532
  CDS (1)..(840)

SEQ ID NO: 47365 - protein, 279 aa, Streptococcus suis 89/1591; identical to SEQ ID NO: 17533

SEQ ID NO: 47366 - DNA, 795 bp, Thiobacillus denitrificans ATCC 25259; identical to SEQ ID NO: 17534
  CDS (1)..(795)

SEQ ID NO: 47367 - protein, 264 aa, Thiobacillus denitrificans ATCC 25259; identical to SEQ ID NO: 17535

SEQ ID NO: 47368 - DNA, 984 bp, Erythrobacter litoralis HTCC2594; identical to SEQ ID NO: 17536
  CDS (1)..(984): transl_table=11

SEQ ID NO: 47369 - protein, 327 aa, Erythrobacter litoralis HTCC2594; identical to SEQ ID NO: 17537

SEQ ID NO: 47370 - DNA, 840 bp, Lactococcus lactis subsp. cremoris SK11; identical to SEQ ID NO: 17538
  CDS (1)..(840)

SEQ ID NO: 47371 - protein, 279 aa, Lactococcus lactis subsp. cremoris SK11; identical to SEQ ID NO: 17539

SEQ ID NO: 47372 - DNA, 912 bp, Lactobacillus delbrueckii subsp. bulgaricus ATCC BAA-365; identical to SEQ ID NO: 17540
  CDS (1)..(912)

SEQ ID NO: 47373 - protein, 303 aa, Lactobacillus delbrueckii subsp. bulgaricus ATCC BAA-365; identical to SEQ ID NO: 17541

SEQ ID NO: 47374 - DNA, 861 bp, Streptococcus thermophilus LMD-9; identical to SEQ ID NO: 17542
  CDS (1)..(861)

SEQ ID NO: 47375 - protein, 286 aa, Streptococcus thermophilus LMD-9; identical to SEQ ID NO: 17543

SEQ ID NO: 47376 - DNA, 804 bp, Arthrobacter sp. FB24; identical to SEQ ID NO: 17544
  CDS (1)..(804): transl_table=11

SEQ ID NO: 47377 - protein, 267 aa, Arthrobacter sp. FB24; identical to SEQ ID NO: 17545

SEQ ID NO: 47378 - DNA, 795 bp, Azotobacter vinelandii AvOP; identical to SEQ ID NO: 17546
  CDS (1)..(795): transl_table=11

SEQ ID NO: 47379 - protein, 264 aa, Azotobacter vinelandii AvOP; identical to SEQ ID NO: 17547

SEQ ID NO: 47380 - DNA, 972 bp, Burkholderia vietnamiensis G4; identical to SEQ ID NO: 17548
  CDS (1)..(972): transl_table=11

SEQ ID NO: 47381 - protein, 323 aa, Burkholderia vietnamiensis G4; identical to SEQ ID NO: 17549

SEQ ID NO: 47382 - DNA, 972 bp, Burkholderia cenocepacia AU 1054; identical to SEQ ID NO: 17550
  CDS (1)..(972): transl_table=11

SEQ ID NO: 47383 - protein, 323 aa, Burkholderia cenocepacia AU 1054; identical to SEQ ID NO: 17551

SEQ ID NO: 47384 - DNA, 795 bp, Chromohalobacter salexigens DSM 3043; identical to SEQ ID NO: 17552
  CDS (1)..(795): transl_table=11

SEQ ID NO: 47385 - protein, 264 aa, Chromohalobacter salexigens DSM 3043; identical to SEQ ID NO: 17553

SEQ ID NO: 47386 - DNA, 972 bp, Burkholderia pseudomallei 668; identical to SEQ ID NO: 17554
  CDS (1)..(972)

SEQ ID NO: 47387 - protein, 323 aa, Burkholderia pseudomallei 668; identical to SEQ ID NO: 17555

SEQ ID NO: 47388 - DNA, 990 bp, Burkholderia pseudomallei S13; identical to SEQ ID NO: 17556
  CDS (1)..(990)

SEQ ID NO: 47389 - protein, 329 aa, Burkholderia pseudomallei S13; identical to SEQ ID NO: 17557

SEQ ID NO: 47390 - DNA, 831 bp, Clostridium thermocellum ATCC 27405; identical to SEQ ID NO: 17558
  CDS (1)..(831): transl_table=11

SEQ ID NO: 47391 - protein, 276 aa, Clostridium thermocellum ATCC 27405; identical to SEQ ID NO: 17559

SEQ ID NO: 47392 - DNA, 855 bp, Polaromonas sp. JS666; identical to SEQ ID NO: 17560
  CDS (1)..(855): transl_table=11

SEQ ID NO: 47393 - protein, 284 aa, Polaromonas sp. JS666; identical to SEQ ID NO: 17561

SEQ ID NO: 47394 - DNA, 795 bp, Exiguobacterium sp. 255-15; identical to SEQ ID NO: 17562
  CDS (1)..(795): transl_table=11

SEQ ID NO: 47395 - protein, 264 aa, Exiguobacterium sp. 255-15; identical to SEQ ID NO: 17563

SEQ ID NO: 47396 - DNA, 795 bp, Methylobacillus flagellatus KT; identical to SEQ ID NO: 17564
  CDS (1)..(795): transl_table=11

SEQ ID NO: 47397 - protein, 264 aa, Methylobacillus flagellatus KT; identical to SEQ ID NO: 17565

SEQ ID NO: 47398 - DNA, 963 bp, Sphingopyxis alaskensis RB2256; identical to SEQ ID NO: 17566
  CDS (1)..(963): transl_table=11

SEQ ID NO: 47399 - protein, 320 aa, Sphingopyxis alaskensis RB2256; identical to SEQ ID NO: 17567

SEQ ID NO: 47400 - DNA, 795 bp, Shewanella amazonensis SB2B; identical to SEQ ID NO: 17568
  CDS (1)..(795): transl_table=11

SEQ ID NO: 47401 - protein, 264 aa, Shewanella amazonensis SB2B; identical to SEQ ID NO: 17569

SEQ ID NO: 47402 - DNA, 795 bp, Ralstonia metallidurans CH34; identical to SEQ ID NO: 17570
  CDS (1)..(795): transl_table=11

SEQ ID NO: 47403 - protein, 264 aa, Ralstonia metallidurans CH34; identical to SEQ ID NO: 17571

SEQ ID NO: 47404 - DNA, 975 bp, Enterococcus faecium DO; identical to SEQ ID NO: 17572
  CDS (1)..(975): transl_table=11

SEQ ID NO: 47405 - protein, 324 aa, Enterococcus faecium DO; identical to SEQ ID NO: 17573

SEQ ID NO: 47406 - DNA, 795 bp, Mesorhizobium sp. BNC1; identical to SEQ ID NO: 17574
  CDS (1)..(795): transl_table=11

SEQ ID NO: 47407 - protein, 264 aa, Mesorhizobium sp. BNC1; identical to SEQ ID NO: 17575

SEQ ID NO: 47408 - DNA, 807 bp, Kineococcus radiotolerans SRS30216; identical to SEQ ID NO: 17576
  CDS (1)..(807): transl_table=11

SEQ ID NO: 47409 - protein, 268 aa, Kineococcus radiotolerans SRS30216; identical to SEQ ID NO: 17577

SEQ ID NO: 47410 - DNA, 834 bp, Silicibacter sp. TM1040; identical to SEQ ID NO: 17578
  CDS (1)..(834): transl_table=11

SEQ ID NO: 47411 - protein, 277 aa, Silicibacter sp. TM1040; identical to SEQ ID NO: 17579

SEQ ID NO: 47412 - DNA, 795 bp, Nitrobacter hamburgensis X14; identical to SEQ ID NO: 17580
  CDS (1)..(795): transl_table=11

SEQ ID NO: 47413 - protein, 264 aa, Nitrobacter hamburgensis X14; identical to SEQ ID NO: 17581

SEQ ID NO: 47414 - DNA, 795 bp, Shewanella denitrificans OS-217; identical to SEQ ID NO: 17582
  CDS (1)..(795): transl_table=11

SEQ ID NO: 47415 - protein, 264 aa, Shewanella denitrificans OS-217; identical to SEQ ID NO: 17583

SEQ ID NO: 47416 - DNA, 852 bp, Shewanella frigidimarina NCIMB 400; identical to SEQ ID NO: 17584
  CDS (1)..(852): transl_table=11

SEQ ID NO: 47417 - protein, 283 aa, Shewanella frigidimarina NCIMB 400; identical to SEQ ID NO: 17585

SEQ ID NO: 47418 - DNA, 1500 bp, Cryptosporidium parvum; identical to SEQ ID NO: 17586
  CDS (1)..(1500)

SEQ ID NO: 47419 - protein, 499 aa, Cryptosporidium parvum; identical to SEQ ID NO: 17587

SEQ ID NO: 47420 - DNA, 879 bp, Bacteriophage beta; identical to SEQ ID NO: 17588
  CDS (1)..(879): transl_table=11

SEQ ID NO: 47421 - protein, 292 aa, Bacteriophage beta; identical to SEQ ID NO: 17589

SEQ ID NO: 47422 - DNA, 1734 bp, Daucus carota; identical to SEQ ID NO: 17590
  CDS (1)..(1734)

SEQ ID NO: 47423 - protein, 577 aa, Daucus carota; identical to SEQ ID NO: 17591

SEQ ID NO: 47424 - DNA, 972 bp, Pseudomonas fluorescens; identical to SEQ ID NO: 17592
  CDS (1)..(972): transl_table=11

SEQ ID NO: 47425 - protein, 323 aa, Pseudomonas fluorescens; identical to SEQ ID NO: 17593

SEQ ID NO: 47426 - DNA, 1569 bp, Theileria parva; identical to SEQ ID NO: 17594
  CDS (1)..(1569)

SEQ ID NO: 47427 - protein, 522 aa, Theileria parva; identical to SEQ ID NO: 17595

SEQ ID NO: 47428 - DNA, 1572 bp, Theileria annulata; identical to SEQ ID NO: 17596
  CDS (1)..(1572)

SEQ ID NO: 47429 - protein, 523 aa, Theileria annulata; identical to SEQ ID NO: 17597

SEQ ID NO: 47430 - DNA, 1500 bp, Plasmodium chabaudi; identical to SEQ ID NO: 17598
  CDS (1)..(1500)

SEQ ID NO: 47431 - protein, 499 aa, Plasmodium chabaudi; identical to SEQ ID NO: 17599

SEQ ID NO: 47432 - DNA, 942 bp, Homo sapiens; identical to SEQ ID NO: 17600
  CDS (1)..(942)

SEQ ID NO: 47433 - protein, 313 aa, Homo sapiens; identical to SEQ ID NO: 17601

SEQ ID NO: 47434 - DNA, 1584 bp, Trypanosoma brucei; identical to SEQ ID NO: 17602
  CDS (1)..(1584)

SEQ ID NO: 47435 - protein, 527 aa, Trypanosoma brucei; identical to SEQ ID NO: 17603

SEQ ID NO: 47436 - DNA, 852 bp, Haemophilus parasuis; identical to SEQ ID NO: 17604
  CDS (1)..(852): transl_table=11

SEQ ID NO: 47437 - protein, 283 aa, Haemophilus parasuis; identical to SEQ ID NO: 17605

SEQ ID NO: 47438 - DNA, 948 bp, Caenorhabditis briggsae; identical to SEQ ID NO: 17606
  CDS (1)..(948)

SEQ ID NO: 47439 - protein, 315 aa, Caenorhabditis briggsae; identical to SEQ ID NO: 17607

SEQ ID NO: 47440 - DNA, 957 bp, Brachydanio rerio; identical to SEQ ID NO: 17608
  CDS (1)..(957)

SEQ ID NO: 47441 - protein, 318 aa, Brachydanio rerio; identical to SEQ ID NO: 17609

SEQ ID NO: 47442 - DNA, 861 bp, Bacteriophage T6; identical to SEQ ID NO: 17610
  CDS (1)..(861): transl_table=11

SEQ ID NO: 47443 - protein, 286 aa, Bacteriophage T6; identical to SEQ ID NO: 17611

SEQ ID NO: 47444 - DNA, 861 bp, Bacteriophage U5; identical to SEQ ID NO: 17612
  CDS (1)..(861): transl_table=11

SEQ ID NO: 47445 - protein, 286 aa, Bacteriophage U5; identical to SEQ ID NO: 17613

SEQ ID NO: 47446 - DNA, 861 bp, Bacteriophage RB3; identical to SEQ ID NO: 17614
  CDS (1)..(861): transl_table=11

SEQ ID NO: 47447 - protein, 286 aa, Bacteriophage RB3; identical to SEQ ID NO: 17615

SEQ ID NO: 47448 - DNA, 861 bp, Bacteriophage RB27; identical to SEQ ID NO: 17616
  CDS (1)..(861): transl_table=11

SEQ ID NO: 47449 - protein, 286 aa, Bacteriophage RB27; identical to SEQ ID NO: 17617

SEQ ID NO: 47450 - DNA, 861 bp, Bacteriophage RB23; identical to SEQ ID NO: 17618
  CDS (1)..(861): transl_table=11

SEQ ID NO: 47451 - protein, 286 aa, Bacteriophage RB23; identical to SEQ ID NO: 17619

SEQ ID NO: 47452 - DNA, 861 bp, Bacteriophage RB61; identical to SEQ ID NO: 17620
  CDS (1)..(861): transl_table=11

SEQ ID NO: 47453 - protein, 286 aa, Bacteriophage RB61; identical to SEQ ID NO: 17621

SEQ ID NO: 47454 - DNA, 861 bp, Bacteriophage LZ2; identical to SEQ ID NO: 17622
  CDS (1)..(861): transl_table=11

SEQ ID NO: 47455 - protein, 286 aa, Bacteriophage LZ2; identical to SEQ ID NO: 17623

SEQ ID NO: 47456 - DNA, 861 bp, Bacteriophage RB14; identical to SEQ ID NO: 17624
  CDS (1)..(861): transl_table=11

SEQ ID NO: 47457 - protein, 286 aa, Bacteriophage RB14; identical to SEQ ID NO: 17625

SEQ ID NO: 47458 - DNA, 861 bp, Bacteriophage RB32; identical to SEQ ID NO: 17626
  CDS (1)..(861): transl_table=11

SEQ ID NO: 47459 - protein, 286 aa, Bacteriophage RB32; identical to SEQ ID NO: 17627

SEQ ID NO: 47460 - DNA, 840 bp, Lactococcus lactis; identical to SEQ ID NO: 17628
  CDS (1)..(840): transl_table=11

SEQ ID NO: 47461 - protein, 279 aa, Lactococcus lactis; identical to SEQ ID NO: 17629

SEQ ID NO: 47462 - DNA, 1767 bp, Plasmodium yoelii yoelii; identical to SEQ ID NO: 17630
  CDS (1)..(1767)

SEQ ID NO: 47463 - protein, 588 aa, Plasmodium yoelii yoelii; identical to SEQ ID NO: 17631

SEQ ID NO: 47464 - DNA, 861 bp, Bacteriophage T2; identical to SEQ ID NO: 17632
  CDS (1)..(861): transl_table=11

SEQ ID NO: 47465 - protein, 286 aa, Bacteriophage T2; identical to SEQ ID NO: 17633

SEQ ID NO: 47466 - DNA, 1536 bp, Babesia bovis; identical to SEQ ID NO: 17634
  CDS (1)..(1536)

SEQ ID NO: 47467 - protein, 511 aa, Babesia bovis; identical to SEQ ID NO: 17635

SEQ ID NO: 47468 - DNA, 960 bp, Brachydanio rerio; identical to SEQ ID NO: 17636
  CDS (1)..(960)

SEQ ID NO: 47469 - protein, 319 aa, Brachydanio rerio; identical to SEQ ID NO: 17637

SEQ ID NO: 47470 - DNA, 1593 bp, Pisum sativum; identical to SEQ ID NO: 17638
  CDS (1)..(1593)

SEQ ID NO: 47471 - protein, 530 aa, Pisum sativum; identical to SEQ ID NO: 17639

SEQ ID NO: 47472 - DNA, 1563 bp, Leishmania chagasi; identical to SEQ ID NO: 17640
  CDS (1)..(1563)

SEQ ID NO: 47473 - protein, 520 aa, Leishmania chagasi; identical to SEQ ID NO: 17641

SEQ ID NO: 47474 - DNA, 1563 bp, Leishmania infantum; identical to SEQ ID NO: 17642
  CDS (1)..(1563)

SEQ ID NO: 47475 - protein, 520 aa, Leishmania infantum; identical to SEQ ID NO: 17643

SEQ ID NO: 47476 - DNA, 1563 bp, Leishmania tropica; identical to SEQ ID NO: 17644
  CDS (1)..(1563): Xaa of translated CDS can stand for any naturally occuring amino acid which can be translated from respective CDS-codon

SEQ ID NO: 47477 - protein, 520 aa, Leishmania tropica; identical to SEQ ID NO: 17645
  misc_feature (304)..(304): Xaa can be any naturally occuring amino acid

SEQ ID NO: 47478 - DNA, 870 bp, White spot syndrome virus; identical to SEQ ID NO: 17646
  CDS (1)..(870)

SEQ ID NO: 47479 - protein, 289 aa, White spot syndrome virus; identical to SEQ ID NO: 17647

SEQ ID NO: 47480 - DNA, 924 bp, Mus musculus; identical to SEQ ID NO: 17648
  CDS (1)..(924)

SEQ ID NO: 47481 - protein, 307 aa, Mus musculus; identical to SEQ ID NO: 17649

SEQ ID NO: 47482 - DNA, 840 bp, Homo sapiens; identical to SEQ ID NO: 17650
  CDS (1)..(840)

SEQ ID NO: 47483 - protein, 279 aa, Homo sapiens; identical to SEQ ID NO: 17651

SEQ ID NO: 47484 - DNA, 951 bp, Macropodid herpesvirus 1; identical to SEQ ID NO: 17652
  CDS (1)..(951)

SEQ ID NO: 47485 - protein, 316 aa, Macropodid herpesvirus 1; identical to SEQ ID NO: 17653

SEQ ID NO: 47486 - DNA, 1770 bp, Plasmodium gallinaceum; identical to SEQ ID NO: 17654
  CDS (1)..(1770)

SEQ ID NO: 47487 - protein, 589 aa, Plasmodium gallinaceum; identical to SEQ ID NO: 17655

SEQ ID NO: 47488 - DNA, 1002 bp, Rhesus monkey rhadinovirus H26; identical to SEQ ID NO: 17656
  CDS (1)..(1002)

SEQ ID NO: 47489 - protein, 333 aa, Rhesus monkey rhadinovirus H26; identical to SEQ ID NO: 17657

SEQ ID NO: 47490 - DNA, 939 bp, Caenorhabditis elegans; identical to SEQ ID NO: 17658
  CDS (1)..(939)

SEQ ID NO: 47491 - protein, 312 aa, Caenorhabditis elegans; identical to SEQ ID NO: 17659

SEQ ID NO: 47492 - DNA, 924 bp, Trichinella spiralis; identical to SEQ ID NO: 17660
  CDS (1)..(924)

SEQ ID NO: 47493 - protein, 307 aa, Trichinella spiralis; identical to SEQ ID NO: 17661

SEQ ID NO: 47494 - DNA, 1029 bp, Halobacterium volcanii; identical to SEQ ID NO: 17662
  CDS (1)..(1029): transl_table=11

SEQ ID NO: 47495 - protein, 342 aa, Halobacterium volcanii; identical to SEQ ID NO: 17663

SEQ ID NO: 47496 - DNA, 969 bp, Oryza sativa; identical to SEQ ID NO: 17664
  CDS (1)..(969)

SEQ ID NO: 47497 - protein, 322 aa, Oryza sativa; identical to SEQ ID NO: 17665

SEQ ID NO: 47498 - DNA, 741 bp, Bacteriophage T4; identical to SEQ ID NO: 17666
  CDS (1)..(741): transl_table=11

SEQ ID NO: 47499 - protein, 246 aa, Bacteriophage T4; identical to SEQ ID NO: 17667

SEQ ID NO: 47500 - DNA, 1560 bp, Arabidopsis thaliana; identical to SEQ ID NO: 17668
  CDS (1)..(1560)

SEQ ID NO: 47501 - protein, 519 aa, Arabidopsis thaliana; identical to SEQ ID NO: 17669

SEQ ID NO: 47502 - DNA, 1557 bp, Arabidopsis thaliana; identical to SEQ ID NO: 17670
  CDS (1)..(1557)

SEQ ID NO: 47503 - protein, 518 aa, Arabidopsis thaliana; identical to SEQ ID NO: 17671

SEQ ID NO: 47504 - DNA, 1548 bp, Crithidia fasciculata; identical to SEQ ID NO: 17672
  CDS (1)..(1548)

SEQ ID NO: 47505 - protein, 515 aa, Crithidia fasciculata; identical to SEQ ID NO: 17673

SEQ ID NO: 47506 - DNA, 1587 bp, Daucus carota; identical to SEQ ID NO: 17674
  CDS (1)..(1587)

SEQ ID NO: 47507 - protein, 528 aa, Daucus carota; identical to SEQ ID NO: 17675

SEQ ID NO: 47508 - DNA, 1563 bp, Leishmania amazonensis; identical to SEQ ID NO: 17676
  CDS (1)..(1563)

SEQ ID NO: 47509 - protein, 520 aa, Leishmania amazonensis; identical to SEQ ID NO: 17677

SEQ ID NO: 47510 - DNA, 1563 bp, Leishmania major; identical to SEQ ID NO: 17678
  CDS (1)..(1563)

SEQ ID NO: 47511 - protein, 520 aa, Leishmania major; identical to SEQ ID NO: 17679

SEQ ID NO: 47512 - DNA, 1566 bp, Zea mays; identical to SEQ ID NO: 17680
  CDS (1)..(1566)

SEQ ID NO: 47513 - protein, 521 aa, Zea mays; identical to SEQ ID NO: 17681

SEQ ID NO: 47514 - DNA, 1389 bp, Paramecium tetraurelia; identical to SEQ ID NO: 17682
  CDS (1)..(1389): transl_table=6

SEQ ID NO: 47515 - protein, 462 aa, Paramecium tetraurelia; identical to SEQ ID NO: 17683

SEQ ID NO: 47516 - DNA, 1752 bp, Plasmodium chabaudi; identical to SEQ ID NO: 17684
  CDS (1)..(1752)

SEQ ID NO: 47517 - protein, 583 aa, Plasmodium chabaudi; identical to SEQ ID NO: 17685

SEQ ID NO: 47518 - DNA, 1827 bp, Plasmodium falciparum; identical to SEQ ID NO: 17686
  CDS (1)..(1827)

SEQ ID NO: 47519 - protein, 608 aa, Plasmodium falciparum; identical to SEQ ID NO: 17687

SEQ ID NO: 47520 - DNA, 1872 bp, Plasmodium vivax; identical to SEQ ID NO: 17688
  CDS (1)..(1872)

SEQ ID NO: 47521 - protein, 623 aa, Plasmodium vivax; identical to SEQ ID NO: 17689

SEQ ID NO: 47522 - DNA, 1593 bp, Glycine max; identical to SEQ ID NO: 17690
  CDS (1)..(1593)

SEQ ID NO: 47523 - protein, 530 aa, Glycine max; identical to SEQ ID NO: 17691

SEQ ID NO: 47524 - DNA, 1833 bp, Toxoplasma gondii; identical to SEQ ID NO: 17692
  CDS (1)..(1833)

SEQ ID NO: 47525 - protein, 610 aa, Toxoplasma gondii; identical to SEQ ID NO: 17693

SEQ ID NO: 47526 - DNA, 1566 bp, Trypanosoma cruzi; identical to SEQ ID NO: 17694
  CDS (1)..(1566)

SEQ ID NO: 47527 - protein, 521 aa, Trypanosoma cruzi; identical to SEQ ID NO: 17695

SEQ ID NO: 47528 - DNA, 885 bp, Encephalitozoon cuniculi; identical to SEQ ID NO: 17696
  CDS (1)..(885)

SEQ ID NO: 47529 - protein, 294 aa, Encephalitozoon cuniculi; identical to SEQ ID NO: 17697

SEQ ID NO: 47530 - DNA, 840 bp, Bacillus licheniformis; identical to SEQ ID NO: 17698
  CDS (1)..(840): transl_table=11

SEQ ID NO: 47531 - protein, 279 aa, Bacillus licheniformis; identical to SEQ ID NO: 17699

SEQ ID NO: 47532 - DNA, 840 bp, Bacillus subtilis; identical to SEQ ID NO: 17700
  CDS (1)..(840): transl_table=11

SEQ ID NO: 47533 - protein, 279 aa, Bacillus subtilis; identical to SEQ ID NO: 17701

SEQ ID NO: 47534 - DNA, 1243 bp, Bacillus amyloliquefaciens; identical to SEQ ID NO: 17702
  CDS (157)..(951)

SEQ ID NO: 47535 - protein, 264 aa, Bacillus amyloliquefaciens; identical to SEQ ID NO: 17703

SEQ ID NO: 47536 - DNA, 795 bp, Bacillus subtilis; identical to SEQ ID NO: 17704
  CDS (1)..(795): transl_table=11

SEQ ID NO: 47537 - protein, 264 aa, Bacillus subtilis; identical to SEQ ID NO: 17705

SEQ ID NO: 47538 - DNA, 843 bp, Acinetobacter sp; identical to SEQ ID NO: 17706
  CDS (1)..(843): transl_table=11

SEQ ID NO: 47539 - protein, 280 aa, Acinetobacter sp; identical to SEQ ID NO: 17707

SEQ ID NO: 47540 - DNA, 891 bp, Agaricus bisporus; identical to SEQ ID NO: 17708
  CDS (1)..(891)

SEQ ID NO: 47541 - protein, 296 aa, Agaricus bisporus; identical to SEQ ID NO: 17709

SEQ ID NO: 47542 - DNA, 795 bp, Agrobacterium tumefaciens; identical to SEQ ID NO: 17710
  CDS (1)..(795): transl_table=11

SEQ ID NO: 47543 - protein, 264 aa, Agrobacterium tumefaciens; identical to SEQ ID NO: 17711

SEQ ID NO: 47544 - DNA, 885 bp, Ascaris suum; identical to SEQ ID NO: 17712
  CDS (1)..(885)

SEQ ID NO: 47545 - protein, 294 aa, Ascaris suum; identical to SEQ ID NO: 17713

SEQ ID NO: 47546 - DNA, 795 bp, Azoarcus sp; identical to SEQ ID NO: 17714
  CDS (1)..(795): transl_table=11

SEQ ID NO: 47547 - protein, 264 aa, Azoarcus sp; identical to SEQ ID NO: 17715

SEQ ID NO: 47548 - DNA, 957 bp, Bacillus cereus; identical to SEQ ID NO: 17716
  CDS (1)..(957): transl_table=11

SEQ ID NO: 47549 - protein, 318 aa, Bacillus cereus; identical to SEQ ID NO: 17717

SEQ ID NO: 47550 - DNA, 795 bp, Bacteroides fragilis; identical to SEQ ID NO: 17718
  CDS (1)..(795): transl_table=11

SEQ ID NO: 47551 - protein, 264 aa, Bacteroides fragilis; identical to SEQ ID NO: 17719

SEQ ID NO: 47552 - DNA, 795 bp, Bacillus halodurans; identical to SEQ ID NO: 17720
  CDS (1)..(795): transl_table=11

SEQ ID NO: 47553 - protein, 264 aa, Bacillus halodurans; identical to SEQ ID NO: 17721

SEQ ID NO: 47554 - DNA, 840 bp, Bacillus mojavensis; identical to SEQ ID NO: 17722
  CDS (1)..(840): transl_table=11

SEQ ID NO: 47555 - protein, 279 aa, Bacillus mojavensis; identical to SEQ ID NO: 17723

SEQ ID NO: 47556 - DNA, 840 bp, Bacillus subtilis var; identical to SEQ ID NO: 17724
  CDS (1)..(840): transl_table=11

SEQ ID NO: 47557 - protein, 279 aa, Bacillus subtilis var; identical to SEQ ID NO: 17725

SEQ ID NO: 47558 - DNA, 795 bp, Bacillus clausii; identical to SEQ ID NO: 17726
  CDS (1)..(795): transl_table=11

SEQ ID NO: 47559 - protein, 264 aa, Bacillus clausii; identical to SEQ ID NO: 17727

SEQ ID NO: 47560 - DNA, 795 bp, Bacteroides thetaiotaomicron; identical to SEQ ID NO: 17728
  CDS (1)..(795): transl_table=11

SEQ ID NO: 47561 - protein, 264 aa, Bacteroides thetaiotaomicron; identical to SEQ ID NO: 17729

SEQ ID NO: 47562 - DNA, 795 bp, Bartonella henselae; identical to SEQ ID NO: 17730
  CDS (1)..(795): transl_table=11

SEQ ID NO: 47563 - protein, 264 aa, Bartonella henselae; identical to SEQ ID NO: 17731

SEQ ID NO: 47564 - DNA, 795 bp, Bartonella quintana; identical to SEQ ID NO: 17732
  CDS (1)..(795): transl_table=11

SEQ ID NO: 47565 - protein, 264 aa, Bartonella quintana; identical to SEQ ID NO: 17733

SEQ ID NO: 47566 - DNA, 795 bp, Bdellovibrio bacteriovorus; identical to SEQ ID NO: 17734
  CDS (1)..(795): transl_table=11

SEQ ID NO: 47567 - protein, 264 aa, Bdellovibrio bacteriovorus; identical to SEQ ID NO: 17735

SEQ ID NO: 47568 - DNA, 801 bp, Bifidobacterium longum; identical to SEQ ID NO: 17736
  CDS (1)..(801): transl_table=11

SEQ ID NO: 47569 - protein, 266 aa, Bifidobacterium longum; identical to SEQ ID NO: 17737

SEQ ID NO: 47570 - DNA, 972 bp, Bordetella pertussis; identical to SEQ ID NO: 17738
  CDS (1)..(972): transl_table=11

SEQ ID NO: 47571 - protein, 323 aa, Bordetella pertussis; identical to SEQ ID NO: 17739

SEQ ID NO: 47572 - DNA, 840 bp, Bacteriophage phi; identical to SEQ ID NO: 17740
  CDS (1)..(840): transl_table=11

SEQ ID NO: 47573 - protein, 279 aa, Bacteriophage phi; identical to SEQ ID NO: 17741

SEQ ID NO: 47574 - DNA, 861 bp, Bacteriophage T4; identical to SEQ ID NO: 17742
  CDS (1)..(861): transl_table=11

SEQ ID NO: 47575 - protein, 286 aa, Bacteriophage T4; identical to SEQ ID NO: 17743

SEQ ID NO: 47576 - DNA, 795 bp, Bradyrhizobium japonicum; identical to SEQ ID NO: 17744
  CDS (1)..(795): transl_table=11

SEQ ID NO: 47577 - protein, 264 aa, Bradyrhizobium japonicum; identical to SEQ ID NO: 17745

SEQ ID NO: 47578 - DNA, 795 bp, Brucella melitensis; identical to SEQ ID NO: 17746
  CDS (1)..(795): transl_table=11

SEQ ID NO: 47579 - protein, 264 aa, Brucella melitensis; identical to SEQ ID NO: 17747

SEQ ID NO: 47580 - DNA, 795 bp, Buchnera aphidicola; identical to SEQ ID NO: 17748
  CDS (1)..(795): transl_table=11

SEQ ID NO: 47581 - protein, 264 aa, Buchnera aphidicola; identical to SEQ ID NO: 17749

SEQ ID NO: 47582 - DNA, 795 bp, Buchnera aphidicola; identical to SEQ ID NO: 17750
  CDS (1)..(795): transl_table=11

SEQ ID NO: 47583 - protein, 264 aa, Buchnera aphidicola; identical to SEQ ID NO: 17751

SEQ ID NO: 47584 - DNA, 795 bp, Buchnera aphidicola; identical to SEQ ID NO: 17752
  CDS (1)..(795): transl_table=11

SEQ ID NO: 47585 - protein, 264 aa, Buchnera aphidicola; identical to SEQ ID NO: 17753

SEQ ID NO: 47586 - DNA, 840 bp, Caulobacter crescentus; identical to SEQ ID NO: 17754
  CDS (1)..(840): transl_table=11

SEQ ID NO: 47587 - protein, 279 aa, Caulobacter crescentus; identical to SEQ ID NO: 17755

SEQ ID NO: 47588 - DNA, 795 bp, Chromobacterium violaceum; identical to SEQ ID NO: 17756
  CDS (1)..(795): transl_table=11

SEQ ID NO: 47589 - protein, 264 aa, Chromobacterium violaceum; identical to SEQ ID NO: 17757

SEQ ID NO: 47590 - DNA, 792 bp, Clostridium acetobutylicum; identical to SEQ ID NO: 17758
  CDS (1)..(792): transl_table=11

SEQ ID NO: 47591 - protein, 263 aa, Clostridium acetobutylicum; identical to SEQ ID NO: 17759

SEQ ID NO: 47592 - DNA, 813 bp, Corynebacterium diphtheriae; identical to SEQ ID NO: 17760
  CDS (1)..(813): transl_table=11

SEQ ID NO: 47593 - protein, 270 aa, Corynebacterium diphtheriae; identical to SEQ ID NO: 17761

SEQ ID NO: 47594 - DNA, 804 bp, Corynebacterium efficiens; identical to SEQ ID NO: 17762
  CDS (1)..(804): transl_table=11

SEQ ID NO: 47595 - protein, 267 aa, Corynebacterium efficiens; identical to SEQ ID NO: 17763

SEQ ID NO: 47596 - DNA, 801 bp, Corynebacterium glutamicum; identical to SEQ ID NO: 17764
  CDS (1)..(801): transl_table=11

SEQ ID NO: 47597 - protein, 266 aa, Corynebacterium glutamicum; identical to SEQ ID NO: 17765

SEQ ID NO: 47598 - DNA, 795 bp, Coxiella burnetii; identical to SEQ ID NO: 17766
  CDS (1)..(795)

SEQ ID NO: 47599 - protein, 264 aa, Coxiella burnetii; identical to SEQ ID NO: 17767

SEQ ID NO: 47600 - DNA, 954 bp, Cryptococcus neoformans; identical to SEQ ID NO: 17768
  CDS (1)..(954)

SEQ ID NO: 47601 - protein, 317 aa, Cryptococcus neoformans; identical to SEQ ID NO: 17769

SEQ ID NO: 47602 - DNA, 966 bp, Drosophila melanogaster; identical to SEQ ID NO: 17770
  CDS (1)..(966)

SEQ ID NO: 47603 - protein, 321 aa, Drosophila melanogaster; identical to SEQ ID NO: 17771

SEQ ID NO: 47604 - DNA, 870 bp, Equine herpesvirus 2; identical to SEQ ID NO: 17772
  CDS (1)..(870)

SEQ ID NO: 47605 - protein, 289 aa, Equine herpesvirus 2; identical to SEQ ID NO: 17773

SEQ ID NO: 47606 - DNA, 948 bp, Enterococcus faecalis; identical to SEQ ID NO: 17774
  CDS (1)..(948): transl_table=11

SEQ ID NO: 47607 - protein, 315 aa, Enterococcus faecalis; identical to SEQ ID NO: 17775

SEQ ID NO: 47608 - DNA, 795 bp, Erwinia carotovora; identical to SEQ ID NO: 17776
  CDS (1)..(795): transl_table=11

SEQ ID NO: 47609 - protein, 264 aa, Erwinia carotovora; identical to SEQ ID NO: 17777

SEQ ID NO: 47610 - DNA, 825 bp, Francisella tularensis; identical to SEQ ID NO: 17778
  CDS (1)..(825): transl_table=11

SEQ ID NO: 47611 - protein, 274 aa, Francisella tularensis; identical to SEQ ID NO: 17779

SEQ ID NO: 47612 - DNA, 828 bp, Fusobacterium nucleatum; identical to SEQ ID NO: 17780
  CDS (1)..(828): transl_table=11

SEQ ID NO: 47613 - protein, 275 aa, Fusobacterium nucleatum; identical to SEQ ID NO: 17781

SEQ ID NO: 47614 - DNA, 795 bp, Geobacillus kaustophilus; identical to SEQ ID NO: 17782
  CDS (1)..(795): transl_table=11

SEQ ID NO: 47615 - protein, 264 aa, Geobacillus kaustophilus; identical to SEQ ID NO: 17783

SEQ ID NO: 47616 - DNA, 852 bp, Haemophilus ducreyi; identical to SEQ ID NO: 17784
  CDS (1)..(852): transl_table=11

SEQ ID NO: 47617 - protein, 283 aa, Haemophilus ducreyi; identical to SEQ ID NO: 17785

SEQ ID NO: 47618 - DNA, 852 bp, Haemophilus influenzae; identical to SEQ ID NO: 17786
  CDS (1)..(852): transl_table=11

SEQ ID NO: 47619 - protein, 283 aa, Haemophilus influenzae; identical to SEQ ID NO: 17787

SEQ ID NO: 47620 - DNA, 1014 bp, Human herpesvirus 8; identical to SEQ ID NO: 17788
  CDS (1)..(1014)

SEQ ID NO: 47621 - protein, 337 aa, Human herpesvirus 8; identical to SEQ ID NO: 17789

SEQ ID NO: 47622 - DNA, 852 bp, Idiomarina loihiensis; identical to SEQ ID NO: 17790
  CDS (1)..(852): transl_table=11

SEQ ID NO: 47623 - protein, 283 aa, Idiomarina loihiensis; identical to SEQ ID NO: 17791

SEQ ID NO: 47624 - DNA, 957 bp, Lactobacillus acidophilus; identical to SEQ ID NO: 17792
  CDS (1)..(957): transl_table=11

SEQ ID NO: 47625 - protein, 318 aa, Lactobacillus acidophilus; identical to SEQ ID NO: 17793

SEQ ID NO: 47626 - DNA, 971 bp, Lactobacillus casei; identical to SEQ ID NO: 17794
  CDS (20)..(970)

SEQ ID NO: 47627 - protein, 316 aa, Lactobacillus casei; identical to SEQ ID NO: 17795

SEQ ID NO: 47628 - DNA, 957 bp, Lactobacillus johnsonii; identical to SEQ ID NO: 17796
  CDS (1)..(957): transl_table=11

SEQ ID NO: 47629 - protein, 318 aa, Lactobacillus johnsonii; identical to SEQ ID NO: 17797

SEQ ID NO: 47630 - DNA, 840 bp, Lactococcus lactis; identical to SEQ ID NO: 17798
  CDS (1)..(840): transl_table=11

SEQ ID NO: 47631 - protein, 279 aa, Lactococcus lactis; identical to SEQ ID NO: 17799

SEQ ID NO: 47632 - DNA, 951 bp, Lactobacillus plantarum; identical to SEQ ID NO: 17800
  CDS (1)..(951): transl_table=11

SEQ ID NO: 47633 - protein, 316 aa, Lactobacillus plantarum; identical to SEQ ID NO: 17801

SEQ ID NO: 47634 - DNA, 795 bp, Legionella pneumophila; identical to SEQ ID NO: 17802
  CDS (1)..(795): transl_table=11

SEQ ID NO: 47635 - protein, 264 aa, Legionella pneumophila; identical to SEQ ID NO: 17803

SEQ ID NO: 47636 - DNA, 795 bp, Legionella pneumophila subsp; identical to SEQ ID NO: 17804
  CDS (1)..(795): transl_table=11

SEQ ID NO: 47637 - protein, 264 aa, Legionella pneumophila subsp; identical to SEQ ID NO: 17805

SEQ ID NO: 47638 - DNA, 810 bp, Leifsonia xyli; identical to SEQ ID NO: 17806
  CDS (1)..(810): transl_table=11

SEQ ID NO: 47639 - protein, 269 aa, Leifsonia xyli; identical to SEQ ID NO: 17807

SEQ ID NO: 47640 - DNA, 945 bp, Listeria monocytogenes; identical to SEQ ID NO: 17808
  CDS (1)..(945): transl_table=11

SEQ ID NO: 47641 - protein, 314 aa, Listeria monocytogenes; identical to SEQ ID NO: 17809

SEQ ID NO: 47642 - DNA, 852 bp, Mannheimia succiniciproducens; identical to SEQ ID NO: 17810
  CDS (1)..(852): transl_table=11

SEQ ID NO: 47643 - protein, 283 aa, Mannheimia succiniciproducens; identical to SEQ ID NO: 17811

SEQ ID NO: 47644 - DNA, 867 bp, Mesoplasma florum; identical to SEQ ID NO: 17812
  CDS (1)..(867): transl_table=4

SEQ ID NO: 47645 - protein, 288 aa, Mesoplasma florum; identical to SEQ ID NO: 17813

SEQ ID NO: 47646 - DNA, 783 bp, Methylococcus capsulatus; identical to SEQ ID NO: 17814
  CDS (1)..(783): transl_table=11

SEQ ID NO: 47647 - protein, 260 aa, Methylococcus capsulatus; identical to SEQ ID NO: 17815

SEQ ID NO: 47648 - DNA, 795 bp, Methylobacillus flagellatum; identical to SEQ ID NO: 17816
  CDS (1)..(795): transl_table=11

SEQ ID NO: 47649 - protein, 264 aa, Methylobacillus flagellatum; identical to SEQ ID NO: 17817

SEQ ID NO: 47650 - DNA, 924 bp, Mus musculus; identical to SEQ ID NO: 17818
  CDS (1)..(924)

SEQ ID NO: 47651 - protein, 307 aa, Mus musculus; identical to SEQ ID NO: 17819

SEQ ID NO: 47652 - DNA, 792 bp, Mycobacterium bovis; identical to SEQ ID NO: 17820
  CDS (1)..(792): transl_table=11

SEQ ID NO: 47653 - protein, 263 aa, Mycobacterium bovis; identical to SEQ ID NO: 17821

SEQ ID NO: 47654 - DNA, 870 bp, Mycoplasma gallisepticum; identical to SEQ ID NO: 17822
  CDS (1)..(870): transl_table=4

SEQ ID NO: 47655 - protein, 289 aa, Mycoplasma gallisepticum; identical to SEQ ID NO: 17823

SEQ ID NO: 47656 - DNA, 864 bp, Mycoplasma genitalium; identical to SEQ ID NO: 17824
  CDS (1)..(864): transl_table=4

SEQ ID NO: 47657 - protein, 287 aa, Mycoplasma genitalium; identical to SEQ ID NO: 17825

SEQ ID NO: 47658 - DNA, 801 bp, Mycobacterium leprae; identical to SEQ ID NO: 17826
  CDS (1)..(801): transl_table=11

SEQ ID NO: 47659 - protein, 266 aa, Mycobacterium leprae; identical to SEQ ID NO: 17827

SEQ ID NO: 47660 - DNA, 867 bp, Mycoplasma mobile; identical to SEQ ID NO: 17828
  CDS (1)..(867): transl_table=4

SEQ ID NO: 47661 - protein, 288 aa, Mycoplasma mobile; identical to SEQ ID NO: 17829

SEQ ID NO: 47662 - DNA, 801 bp, Mycobacterium paratuberculosis; identical to SEQ ID NO: 17830
  CDS (1)..(801): transl_table=11

SEQ ID NO: 47663 - protein, 266 aa, Mycobacterium paratuberculosis; identical to SEQ ID NO: 17831

SEQ ID NO: 47664 - DNA, 870 bp, Mycoplasma penetrans; identical to SEQ ID NO: 17832
  CDS (1)..(870): transl_table=4

SEQ ID NO: 47665 - protein, 289 aa, Mycoplasma penetrans; identical to SEQ ID NO: 17833

SEQ ID NO: 47666 - DNA, 861 bp, Mycoplasma pulmonis; identical to SEQ ID NO: 17836
  CDS (1)..(861): transl_table=4

SEQ ID NO: 47667 - protein, 286 aa, Mycoplasma pulmonis; identical to SEQ ID NO: 17837

SEQ ID NO: 47668 - DNA, 1422 bp, Neisseria gonorrhoeae; identical to SEQ ID NO: 17838
  CDS (446)..(1243)

SEQ ID NO: 47669 - protein, 265 aa, Neisseria gonorrhoeae; identical to SEQ ID NO: 17839

SEQ ID NO: 47670 - DNA, 795 bp, Neisseria meningitidis; identical to SEQ ID NO: 17840
  CDS (1)..(795): transl_table=11

SEQ ID NO: 47671 - protein, 264 aa, Neisseria meningitidis; identical to SEQ ID NO: 17841

SEQ ID NO: 47672 - DNA, 795 bp, Nitrosomonas europaea; identical to SEQ ID NO: 17842
  CDS (1)..(795): transl_table=11

SEQ ID NO: 47673 - protein, 264 aa, Nitrosomonas europaea; identical to SEQ ID NO: 17843

SEQ ID NO: 47674 - DNA, 801 bp, Nocardia farcinica; identical to SEQ ID NO: 17844
  CDS (1)..(801): transl_table=11

SEQ ID NO: 47675 - protein, 266 aa, Nocardia farcinica; identical to SEQ ID NO: 17845

SEQ ID NO: 47676 - DNA, 954 bp, Oceanobacillus iheyensis; identical to SEQ ID NO: 17846
  CDS (1)..(954): transl_table=11

SEQ ID NO: 47677 - protein, 317 aa, Oceanobacillus iheyensis; identical to SEQ ID NO: 17847

SEQ ID NO: 47678 - DNA, 867 bp, Onion yellows phytoplasma; identical to SEQ ID NO: 17848
  CDS (1)..(867): transl_table=11

SEQ ID NO: 47679 - protein, 288 aa, Onion yellows phytoplasma; identical to SEQ ID NO: 17849

SEQ ID NO: 47680 - DNA, 852 bp, Pasteurella multocida; identical to SEQ ID NO: 17850
  CDS (1)..(852): transl_table=11

SEQ ID NO: 47681 - protein, 283 aa, Pasteurella multocida; identical to SEQ ID NO: 17851

SEQ ID NO: 47682 - DNA, 795 bp, Photorhabdus luminescens; identical to SEQ ID NO: 17852
  CDS (1)..(795): transl_table=11

SEQ ID NO: 47683 - protein, 264 aa, Photorhabdus luminescens; identical to SEQ ID NO: 17853

SEQ ID NO: 47684 - DNA, 852 bp, Photobacterium profundum; identical to SEQ ID NO: 17854
  CDS (1)..(852): transl_table=11

SEQ ID NO: 47685 - protein, 283 aa, Photobacterium profundum; identical to SEQ ID NO: 17855

SEQ ID NO: 47686 - DNA, 795 bp, Porphyromonas gingivalis; identical to SEQ ID NO: 17856
  CDS (1)..(795)

SEQ ID NO: 47687 - protein, 264 aa, Porphyromonas gingivalis; identical to SEQ ID NO: 17857

SEQ ID NO: 47688 - DNA, 810 bp, Propionibacterium acnes; identical to SEQ ID NO: 17858
  CDS (1)..(810): transl_table=11

SEQ ID NO: 47689 - protein, 269 aa, Propionibacterium acnes; identical to SEQ ID NO: 17859

SEQ ID NO: 47690 - DNA, 795 bp, Pseudomonas aeruginosa; identical to SEQ ID NO: 17860
  CDS (1)..(795): transl_table=11

SEQ ID NO: 47691 - protein, 264 aa, Pseudomonas aeruginosa; identical to SEQ ID NO: 17861

SEQ ID NO: 47692 - DNA, 972 bp, Pseudomonas syringae; identical to SEQ ID NO: 17862
  CDS (1)..(972): transl_table=11

SEQ ID NO: 47693 - protein, 323 aa, Pseudomonas syringae; identical to SEQ ID NO: 17863

SEQ ID NO: 47694 - DNA, 795 bp, Ralstonia solanacearum; identical to SEQ ID NO: 17864
  CDS (1)..(795): transl_table=11

SEQ ID NO: 47695 - protein, 264 aa, Ralstonia solanacearum; identical to SEQ ID NO: 17865

SEQ ID NO: 47696 - DNA, 924 bp, Rattus norvegicus; identical to SEQ ID NO: 17866
  CDS (1)..(924)

SEQ ID NO: 47697 - protein, 307 aa, Rattus norvegicus; identical to SEQ ID NO: 17867

SEQ ID NO: 47698 - DNA, 795 bp, Rhizobium loti; identical to SEQ ID NO: 17868
  CDS (1)..(795): transl_table=11

SEQ ID NO: 47699 - protein, 264 aa, Rhizobium loti; identical to SEQ ID NO: 17869

SEQ ID NO: 47700 - DNA, 795 bp, Rhizobium meliloti; identical to SEQ ID NO: 17870
  CDS (1)..(795): transl_table=11

SEQ ID NO: 47701 - protein, 264 aa, Rhizobium meliloti; identical to SEQ ID NO: 17871

SEQ ID NO: 47702 - DNA, 795 bp, Rhodopirellula baltica; identical to SEQ ID NO: 17872
  CDS (1)..(795): transl_table=11

SEQ ID NO: 47703 - protein, 264 aa, Rhodopirellula baltica; identical to SEQ ID NO: 17873

SEQ ID NO: 47704 - DNA, 795 bp, Rhodopseudomonas palustris; identical to SEQ ID NO: 17874
  CDS (1)..(795): transl_table=11

SEQ ID NO: 47705 - protein, 264 aa, Rhodopseudomonas palustris; identical to SEQ ID NO: 17875

SEQ ID NO: 47706 - DNA, 795 bp, Salmonella paratyphi; identical to SEQ ID NO: 17876
  CDS (1)..(795): transl_table=11

SEQ ID NO: 47707 - protein, 264 aa, Salmonella paratyphi; identical to SEQ ID NO: 17877

SEQ ID NO: 47708 - DNA, 795 bp, Salmonella typhi; identical to SEQ ID NO: 17878
  CDS (1)..(795): transl_table=11

SEQ ID NO: 47709 - protein, 264 aa, Salmonella typhi; identical to SEQ ID NO: 17879

SEQ ID NO: 47710 - DNA, 795 bp, Shewanella oneidensis; identical to SEQ ID NO: 17880
  CDS (1)..(795): transl_table=11

SEQ ID NO: 47711 - protein, 264 aa, Shewanella oneidensis; identical to SEQ ID NO: 17881

SEQ ID NO: 47712 - DNA, 885 bp, Saimiriine herpesvirus 2; identical to SEQ ID NO: 17882
  CDS (1)..(885)

SEQ ID NO: 47713 - protein, 294 aa, Saimiriine herpesvirus 2; identical to SEQ ID NO: 17883

SEQ ID NO: 47714 - DNA, 957 bp, Staphylococcus aureus; identical to SEQ ID NO: 17884
  CDS (1)..(957): transl_table=11

SEQ ID NO: 47715 - protein, 318 aa, Staphylococcus aureus; identical to SEQ ID NO: 17885

SEQ ID NO: 47716 - DNA, 840 bp, Streptococcus agalactiae; identical to SEQ ID NO: 17886
  CDS (1)..(840): transl_table=11

SEQ ID NO: 47717 - protein, 279 aa, Streptococcus agalactiae; identical to SEQ ID NO: 17887

SEQ ID NO: 47718 - DNA, 840 bp, Streptococcus agalactiae; identical to SEQ ID NO: 17888
  CDS (1)..(840): transl_table=11

SEQ ID NO: 47719 - protein, 279 aa, Streptococcus agalactiae; identical to SEQ ID NO: 17889

SEQ ID NO: 47720 - DNA, 840 bp, Streptococcus mutans; identical to SEQ ID NO: 17890
  CDS (1)..(840): transl_table=11

SEQ ID NO: 47721 - protein, 279 aa, Streptococcus mutans; identical to SEQ ID NO: 17891

SEQ ID NO: 47722 - DNA, 840 bp, Streptococcus pyogenes; identical to SEQ ID NO: 17892
  CDS (1)..(840): transl_table=11

SEQ ID NO: 47723 - protein, 279 aa, Streptococcus pyogenes; identical to SEQ ID NO: 17893

SEQ ID NO: 47724 - DNA, 840 bp, Streptococcus pyogenes; identical to SEQ ID NO: 17894
  CDS (1)..(840)

SEQ ID NO: 47725 - protein, 279 aa, Streptococcus pyogenes; identical to SEQ ID NO: 17895

SEQ ID NO: 47726 - DNA, 840 bp, Streptococcus pneumoniae; identical to SEQ ID NO: 17896
  CDS (1)..(840): transl_table=11

SEQ ID NO: 47727 - protein, 279 aa, Streptococcus pneumoniae; identical to SEQ ID NO: 17897

SEQ ID NO: 47728 - DNA, 861 bp, Streptococcus thermophilus; identical to SEQ ID NO: 17898
  CDS (1)..(861): transl_table=11

SEQ ID NO: 47729 - protein, 286 aa, Streptococcus thermophilus; identical to SEQ ID NO: 17899

SEQ ID NO: 47730 - DNA, 861 bp, Streptococcus thermophilus; identical to SEQ ID NO: 17900
  CDS (1)..(861): transl_table=11

SEQ ID NO: 47731 - protein, 286 aa, Streptococcus thermophilus; identical to SEQ ID NO: 17901

SEQ ID NO: 47732 - DNA, 852 bp, Symbiobacterium thermophilum; identical to SEQ ID NO: 17902
  CDS (1)..(852): transl_table=11

SEQ ID NO: 47733 - protein, 283 aa, Symbiobacterium thermophilum; identical to SEQ ID NO: 17903

SEQ ID NO: 47734 - DNA, 852 bp, Vibrio cholerae; identical to SEQ ID NO: 17904
  CDS (1)..(852): transl_table=11

SEQ ID NO: 47735 - protein, 283 aa, Vibrio cholerae; identical to SEQ ID NO: 17905

SEQ ID NO: 47736 - DNA, 852 bp, Vibrio fischeri; identical to SEQ ID NO: 17906
  CDS (1)..(852)

SEQ ID NO: 47737 - protein, 283 aa, Vibrio fischeri; identical to SEQ ID NO: 17907

SEQ ID NO: 47738 - DNA, 852 bp, Vibrio parahaemolyticus; identical to SEQ ID NO: 17908
  CDS (1)..(852): transl_table=11

SEQ ID NO: 47739 - protein, 283 aa, Vibrio parahaemolyticus; identical to SEQ ID NO: 17909

SEQ ID NO: 47740 - DNA, 852 bp, Vibrio vulnificus; identical to SEQ ID NO: 17910
  CDS (1)..(852): transl_table=11

SEQ ID NO: 47741 - protein, 283 aa, Vibrio vulnificus; identical to SEQ ID NO: 17911

SEQ ID NO: 47742 - DNA, 852 bp, Vibrio vulnificus; identical to SEQ ID NO: 17912
  CDS (1)..(852): transl_table=11

SEQ ID NO: 47743 - protein, 283 aa, Vibrio vulnificus; identical to SEQ ID NO: 17913

SEQ ID NO: 47744 - DNA, 906 bp, Varicella; identical to SEQ ID NO: 17914
  CDS (1)..(906)

SEQ ID NO: 47745 - protein, 301 aa, Varicella; identical to SEQ ID NO: 17915

SEQ ID NO: 47746 - DNA, 795 bp, Wigglesworthia glossinidia brevipalpis; identical to SEQ ID NO: 17916
  CDS (1)..(795): transl_table=11

SEQ ID NO: 47747 - protein, 264 aa, Wigglesworthia glossinidia brevipalpis; identical to SEQ ID NO: 17917

SEQ ID NO: 47748 - DNA, 795 bp, Xanthomonas axonopodis; identical to SEQ ID NO: 17918
  CDS (1)..(795): transl_table=11

SEQ ID NO: 47749 - protein, 264 aa, Xanthomonas axonopodis; identical to SEQ ID NO: 17919

SEQ ID NO: 47750 - DNA, 795 bp, Xanthomonas campestris; identical to SEQ ID NO: 17920
  CDS (1)..(795): transl_table=11

SEQ ID NO: 47751 - protein, 264 aa, Xanthomonas campestris; identical to SEQ ID NO: 17921

SEQ ID NO: 47752 - DNA, 795 bp, Xanthomonas oryzae; identical to SEQ ID NO: 17922
  CDS (1)..(795): transl_table=11

SEQ ID NO: 47753 - protein, 264 aa, Xanthomonas oryzae; identical to SEQ ID NO: 17923

SEQ ID NO: 47754 - DNA, 795 bp, Xenorhabdus nematophilus; identical to SEQ ID NO: 17924
  CDS (1)..(795): transl_table=11

SEQ ID NO: 47755 - protein, 264 aa, Xenorhabdus nematophilus; identical to SEQ ID NO: 17925

SEQ ID NO: 47756 - DNA, 795 bp, Xylella fastidiosa; identical to SEQ ID NO: 17926
  CDS (1)..(795): transl_table=11

SEQ ID NO: 47757 - protein, 264 aa, Xylella fastidiosa; identical to SEQ ID NO: 17927

SEQ ID NO: 47758 - DNA, 795 bp, Xylella fastidiosa; identical to SEQ ID NO: 17928
  CDS (1)..(795): transl_table=11

SEQ ID NO: 47759 - protein, 264 aa, Xylella fastidiosa; identical to SEQ ID NO: 17929

SEQ ID NO: 47760 - DNA, 915 bp, Saccharomyces cerevisiae; identical to SEQ ID NO: 17930
  CDS (1)..(915)

SEQ ID NO: 47761 - protein, 304 aa, Saccharomyces cerevisiae; identical to SEQ ID NO: 17931

SEQ ID NO: 47762 - DNA, 795 bp, Yersinia pestis; identical to SEQ ID NO: 17932
  CDS (1)..(795): transl_table=11

SEQ ID NO: 47763 - protein, 264 aa, Yersinia pestis; identical to SEQ ID NO: 17933

SEQ ID NO: 47764 - DNA, 795 bp, Yersinia pseudotuberculosis; identical to SEQ ID NO: 17934
  CDS (1)..(795): transl_table=11

SEQ ID NO: 47765 - protein, 264 aa, Yersinia pseudotuberculosis; identical to SEQ ID NO: 17935

SEQ ID NO: 47766 - DNA, 24 bp, Artificial sequence
  Primer sequence
atgaaacagtatttagaactgatg

SEQ ID NO: 47767 - DNA, 23 bp, Artificial sequence
  Primer sequence
ttagatagccaccggcgctttaa

SEQ ID NO: 47768 - protein, 579 aa, Artificial sequence; identical to SEQ ID NO: 17938
  Consensus
  Variant (2)..(4): Xaa in position 2 to 4 is any amino acid
  Variant (6)..(7): Xaa in position 6 to 7 is any amino acid
  Variant (10)..(11): Xaa in position 10 to 11 is any amino acid
  Variant (13)..(17): Xaa in position 13 to 17 is any amino acid
  Variant (19)..(26): Xaa in position 19 to 26 is any or no amino acid
  Variant (29)..(29): Xaa in position 29 is any or no amino acid
  Variant (31)..(32): Xaa in position 31 to 32 is any amino acid
  Variant (34)..(34): Xaa in position 34 is any amino acid
  Variant (37)..(37): Xaa in position 37 is any amino acid
  Variant (38)..(41): Xaa in position 38 to 41 is any or no amino acid
  Variant (44)..(44): Xaa in position 44 is any or no amino acid
  Variant (46)..(141): Xaa in position 46 to 141 is any or no amino acid
  Variant (151)..(151): Xaa in position 151 is any amino acid
  Variant (152)..(155): Xaa in position 152 to 155 is any or no amino acid
  Variant (157)..(158): Xaa in position 157 to 158 is any or no amino acid
  Variant (160)..(160): Xaa in position 160 is any or no amino acid
  Variant (167)..(167): Xaa in position 167 is any amino acid
  Variant (169)..(169): Xaa in position 169 is any amino acid
  Variant (171)..(171): Xaa in position 171 is any amino acid
  Variant (172)..(175): Xaa in position 172 to 175 is any or no amino acid
  Variant (177)..(182): Xaa in position 177 to 182 is any amino acid
  Variant (185)..(188): Xaa in position 185 to 188 is any amino acid
  Variant (189)..(243): Xaa in position 189 to 243 is any or no amino acid
  Variant (246)..(246): Xaa in position 246 is any amino acid
  Variant (250)..(250): Xaa in position 250 is any amino acid
  Variant (254)..(254): Xaa in position 254 is any amino acid
  Variant (256)..(257): Xaa in position 256 to 257 is any amino acid
  Variant (258)..(296): Xaa in position 258 to 296 is any or no amino acid
  Variant (301)..(302): Xaa in position 301 to 302 is any or no amino acid
  Variant (305)..(306): Xaa in position 305 to 306 is any amino acid
  Variant (308)..(318): Xaa in position 308 to 318 is any or no amino acid
  Variant (320)..(321): Xaa in position 320 to 321 is any or no amino acid
  Variant (324)..(324): Xaa in position 324 is any or no amino acid
  Variant (327)..(328): Xaa in position 327 to 328 is any or no amino acid
  Variant (331)..(331): Xaa in position 331 is any amino acid
  Variant (332)..(333): Xaa in position 332 to 333 is any or no amino acid
  Variant (335)..(335): Xaa in position 335 is any amino acid
  Variant (336)..(349): Xaa in position 336 to 349 is any or no amino acid
  Variant (351)..(351): Xaa in position 351 is any amino acid
  Variant (353)..(353): Xaa in position 353 is any amino acid
  Variant (357)..(359): Xaa in position 357 to 359 is any amino acid
  Variant (362)..(362): Xaa in position 362 is any amino acid
  Variant (364)..(367): Xaa in position 364 to 367 is any amino acid
  Variant (368)..(418): Xaa in position 368 to 418 is any or no amino acid
  Variant (420)..(422): Xaa in position 420 to 422 is any amino acid
  Variant (428)..(428): Xaa in position 428 is any amino acid
  Variant (431)..(431): Xaa in position 431 is any amino acid
  Variant (439)..(440): Xaa in position 439 to 440 is any amino acid
  Variant (445)..(446): Xaa in position 445 to 446 is any amino acid
  Variant (450)..(456): Xaa in position 450 to 456 is any amino acid
  Variant (457)..(463): Xaa in position 457 to 463 is any or no amino acid
  Variant (465)..(470): Xaa in position 465 to 470 is any amino acid
  Variant (472)..(473): Xaa in position 472 to 473 is any amino acid
  Variant (477)..(478): Xaa in position 477 to 478 is any amino acid
  Variant (480)..(485): Xaa in position 480 to 485 is any amino acid
  Variant (486)..(521): Xaa in position 486 to 521 is any or no amino acid
  Variant (524)..(524): Xaa in position 524 is any amino acid
  Variant (526)..(526): Xaa in position 526 is any amino acid
  Variant (528)..(530): Xaa in position 528 to 530 is any amino acid
  Variant (532)..(532): Xaa in position 532 is any amino acid
  Variant (534)..(534): Xaa in position 534 is any amino acid
  Variant (536)..(539): Xaa in position 536 to 539 is any amino acid
  Variant (540)..(553): Xaa in position 540 to 553 is any or no amino acid
  Variant (555)..(560): Xaa in position 555 to 560 is any amino acid
  Variant (562)..(563): Xaa in position 562 to 563 is any amino acid
  Variant (565)..(566): Xaa in position 565 to 566 is any amino acid
  Variant (568)..(572): Xaa in position 568 to 572 is any amino acid
  Variant (574)..(576): Xaa in position 574 to 576 is any amino acid

SEQ ID NO: 47769 - protein, 27 aa, Artificial sequence
  Consensus
  Variant (2)..(8): Xaa in position 2 to 8 is any amino acid
  Variant (9)..(10): Xaa in position 9 to 10 is any or no amino acid
  Variant (12)..(15): Xaa in position 12 to 15 is any amino acid
  Variant (16)..(16): Xaa in position 16 is Asp or Asn
  Variant (19)..(21): Xaa in position 19 to 21 is any amino acid
  Variant (22)..(22): Xaa in position 22 is Ala, Cys, Gly, Thr or Val
  Variant (23)..(26): Xaa in position 23 to 26 is any amino acid
  Variant (27)..(27): Xaa in position 27 is Ala, Asp, Glu, Gly or Ser
LXXXXXXXXXGXXXXXRTXXXXXXXXX

SEQ ID NO: 47770 - protein, 21 aa, Artificial sequence
  Consensus
  Variant (2)..(2): Xaa in position 2 is any amino acid
  Variant (3)..(3): Xaa in position 3 is Ile, Leu, Met or Val
  Variant (7)..(15): Xaa in position 7 to 15 is any amino acid
  Variant (17)..(17): Xaa in position 17 is any or no amino acid
  Variant (19)..(20): Xaa in position 19 to 20 is any amino acid
  Variant (21)..(21): Xaa in position 21 is Phe, Ile, Leu, Met or Val
PXXTTKXXXXXXXXXEXLXXX

SEQ ID NO: 47771 - protein, 37 aa, Artificial sequence; identical to SEQ ID NO: 17941
  Consensus
  Variant (2)..(2): Xaa in position 2 is Ile, Leu, Met or Val
  Variant (3)..(5): Xaa in position 3 to 5 is any amino acid
  Variant (6)..(6): Xaa in position 6 is Ile, Leu or Val
  Variant (7)..(8): Xaa in position 7 to 8 is any amino acid
  Variant (9)..(9): Xaa in position 9 is Ile, Leu or Val
  Variant (10)..(12): Xaa in position 10 to 12 is any amino acid
  Variant (14)..(14): Xaa in position 14 is any amino acid
  Variant (15)..(15): Xaa in position 15 is Cys, Asp, Gly, Asn or Ser
  Variant (18)..(18): Xaa in position 18 is any amino acid
  Variant (19)..(19): Xaa in position 19 is Ile, Leu, Met or Val
  Variant (20)..(22): Xaa in position 20 to 22 is any amino acid
  Variant (23)..(23): Xaa in position 23 is Phe, Trp or Tyr
  Variant (25)..(32): Xaa in position 25 to 32 is any amino acid
  Variant (34)..(34): Xaa in position 34 is any or no amino acid
  Variant (36)..(36): Xaa in position 36 is any or no amino acid

SEQ ID NO: 47772 - protein, 32 aa, Artificial sequence; identical to SEQ ID NO: 17942
  Consensus
  Variant (2)..(3): Xaa in position 2 to 3 is any amino acid
  Variant (4)..(6): Xaa in position 4 to 6 is any or no amino acid
  Variant (8)..(8): Xaa in position 8 is any or no amino acid
  Variant (11)..(11): Xaa in position 11 is Ala, Cys, Gly or Val
  Variant (13)..(14): Xaa in position 13 to 14 is any amino acid
  Variant (17)..(17): Xaa in position 17 is Ile, Leu or Val
  Variant (18)..(18): Xaa in position 18 is Asn or Pro
  Variant (21)..(21): Xaa in position 21 is any amino acid
  Variant (22)..(22): Xaa in position 22 is Ala, Gly, Ile or Val
  Variant (23)..(23): Xaa in position 23 is Ala, Gly, Gln or Ser
  Variant (24)..(26): Xaa in position 24 to 26 is any amino acid
  Variant (27)..(27): Xaa in position 27 is Phe or Leu
  Variant (28)..(29): Xaa in position 28 to 29 is any amino acid
  Variant (30)..(30): Xaa in position 30 is Ile, Leu, Met or Val
  Variant (31)..(31): Xaa in position 31 is any amino acid

SEQ ID NO: 47773 - DNA, 192 bp, Escherichia coli
  CDS (1)..(192)
atggtagtgccagcgatgactggagttaacaccatcatgcgtgaatatccaaatggcgaaaaaacacaccttactgtaatggccgcagggtttccatctctgaccggagatcataaagtcatttatgtagccgcggatcgacatgttacttcagaagaaattctggaagcagcaataaggctcttgagttga

SEQ ID NO: 47774 - protein, 63 aa, Escherichia coli
MVVPAMTGVNTIMREYPNGEKTHLTVMAAGFPSLTGDHKVIYVAADRHVTSEEILEAAIRLLS

SEQ ID NO: 47775 - DNA, 156 bp, Escherichia coli
  CDS (1)..(156)
atgcgtgaatatccaaatggcgaaaaaacacaccttactgtaatggccgcagggtttccatctctgaccggagatcataaagtcatttatgtagccgcggatcgacatgttacttcagaagaaattctggaagcagcaataaggctcttgagttga

SEQ ID NO: 47776 - protein, 51 aa, Escherichia coli
MREYPNGEKTHLTVMAAGFPSLTGDHKVIYVAADRHVTSEEILEAAIRLLS

SEQ ID NO: 47777 - DNA, 23 bp, Artificial sequence
  Primer sequence
atggtagtgccagcgatgactgg

SEQ ID NO: 47778 - DNA, 26 bp, Artificial sequence
  Primer sequence
ttaactcaagagccttattgctgctt

SEQ ID NO: 47779 - protein, 51 aa, Artificial sequence; identical to SEQ ID NO: 47776
  Consensus
  Artificial sequence

SEQ ID NO: 47780 - protein, 51 aa, Artificial sequence; identical to SEQ ID NO: 47776
  Consensus
  Artificial sequence

SEQ ID NO: 47781 - DNA, 291 bp, Escherichia coli K12; identical to SEQ ID NO: 18608
  CDS (1)..(291): transl_table=11

SEQ ID NO: 47782 - protein, 96 aa, Escherichia coli K12; identical to SEQ ID NO: 18609

SEQ ID NO: 47783 - DNA, 216 bp, Bacteriophage 933W; identical to SEQ ID NO: 18610
  CDS (1)..(216): transl_table=11

SEQ ID NO: 47784 - protein, 71 aa, Bacteriophage 933W; identical to SEQ ID NO: 18611

SEQ ID NO: 47785 - DNA, 291 bp, Bacteriophage VT2-Sa; identical to SEQ ID NO: 18612
  CDS (1)..(291): transl_table=11

SEQ ID NO: 47786 - protein, 96 aa, Bacteriophage VT2-Sa; identical to SEQ ID NO: 18613

SEQ ID NO: 47787 - DNA, 315 bp, Escherichia coli O157:H7 EDL933; identical to SEQ ID NO: 18614
  CDS (1)..(315): transl_table=11

SEQ ID NO: 47788 - protein, 104 aa, Escherichia coli O157:H7 EDL933; identical to SEQ ID NO: 18615

SEQ ID NO: 47789 - DNA, 315 bp, Escherichia coli O157:H7 EDL933; identical to SEQ ID NO: 18616
  CDS (1)..(315): transl_table=11

SEQ ID NO: 47790 - protein, 104 aa, Escherichia coli O157:H7 EDL933; identical to SEQ ID NO: 18617

SEQ ID NO: 47791 - DNA, 273 bp, Escherichia coli O157:H7 EDL933; identical to SEQ ID NO: 18618
  CDS (1)..(273): transl_table=11

SEQ ID NO: 47792 - protein, 90 aa, Escherichia coli O157:H7 EDL933; identical to SEQ ID NO: 18619

SEQ ID NO: 47793 - DNA, 216 bp, Escherichia coli O157:H7; identical to SEQ ID NO: 18620
  CDS (1)..(216): transl_table=11

SEQ ID NO: 47794 - protein, 71 aa, Escherichia coli O157:H7; identical to SEQ ID NO: 18621

SEQ ID NO: 47795 - DNA, 207 bp, Escherichia coli O157:H7; identical to SEQ ID NO: 18622
  CDS (1)..(207): transl_table=11

SEQ ID NO: 47796 - protein, 68 aa, Escherichia coli O157:H7; identical to SEQ ID NO: 18623

SEQ ID NO: 47797 - DNA, 216 bp, Escherichia coli O157:H7; identical to SEQ ID NO: 18624
  CDS (1)..(216): transl_table=11

SEQ ID NO: 47798 - protein, 71 aa, Escherichia coli O157:H7; identical to SEQ ID NO: 18625

SEQ ID NO: 47799 - DNA, 216 bp, Escherichia coli O157:H7; identical to SEQ ID NO: 18626
  CDS (1)..(216): transl_table=11

SEQ ID NO: 47800 - protein, 71 aa, Escherichia coli O157:H7; identical to SEQ ID NO: 18627

SEQ ID NO: 47801 - DNA, 216 bp, Escherichia coli O157:H7; identical to SEQ ID NO: 18628
  CDS (1)..(216): transl_table=11

SEQ ID NO: 47802 - protein, 71 aa, Escherichia coli O157:H7; identical to SEQ ID NO: 18629

SEQ ID NO: 47803 - DNA, 207 bp, Escherichia coli O157:H7; identical to SEQ ID NO: 18630
  CDS (1)..(207): transl_table=11

SEQ ID NO: 47804 - protein, 68 aa, Escherichia coli O157:H7; identical to SEQ ID NO: 18631

SEQ ID NO: 47805 - DNA, 207 bp, Escherichia coli O157:H7; identical to SEQ ID NO: 18632
  CDS (1)..(207): transl_table=11

SEQ ID NO: 47806 - protein, 68 aa, Escherichia coli O157:H7; identical to SEQ ID NO: 18633

SEQ ID NO: 47807 - DNA, 216 bp, Shigella flexneri 2a str. 301; identical to SEQ ID NO: 18634
  CDS (1)..(216): transl_table=11

SEQ ID NO: 47808 - protein, 71 aa, Shigella flexneri 2a str. 301; identical to SEQ ID NO: 18635

SEQ ID NO: 47809 - DNA, 216 bp, Shigella flexneri 2a str. 301; identical to SEQ ID NO: 18636
  CDS (1)..(216): transl_table=11

SEQ ID NO: 47810 - protein, 71 aa, Shigella flexneri 2a str. 301; identical to SEQ ID NO: 18637

SEQ ID NO: 47811 - DNA, 321 bp, Escherichia coli CFT073; identical to SEQ ID NO: 18638
  CDS (1)..(321): transl_table=11

SEQ ID NO: 47812 - protein, 106 aa, Escherichia coli CFT073; identical to SEQ ID NO: 18639

SEQ ID NO: 47813 - DNA, 216 bp, Escherichia coli CFT073; identical to SEQ ID NO: 18640
  CDS (1)..(216): transl_table=11

SEQ ID NO: 47814 - protein, 71 aa, Escherichia coli CFT073; identical to SEQ ID NO: 18641

SEQ ID NO: 47815 - DNA, 216 bp, Shigella flexneri 2a str. 2457T; identical to SEQ ID NO: 18642
  CDS (1)..(216): transl_table=11

SEQ ID NO: 47816 - protein, 71 aa, Shigella flexneri 2a str. 2457T; identical to SEQ ID NO: 18643

SEQ ID NO: 47817 - DNA, 180 bp, Shigella flexneri 2a str. 2457T; identical to SEQ ID NO: 18644
  CDS (1)..(180): transl_table=11

SEQ ID NO: 47818 - protein, 59 aa, Shigella flexneri 2a str. 2457T; identical to SEQ ID NO: 18645

SEQ ID NO: 47819 - DNA, 213 bp, Yersinia pseudotuberculosis IP 32953; identical to SEQ ID NO: 18646
  CDS (1)..(213): transl_table=11

SEQ ID NO: 47820 - protein, 70 aa, Yersinia pseudotuberculosis IP 32953; identical to SEQ ID NO: 18647

SEQ ID NO: 47821 - DNA, 216 bp, Shigella sonnei Ss046; identical to SEQ ID NO: 18648
  CDS (1)..(216): transl_table=11

SEQ ID NO: 47822 - protein, 71 aa, Shigella sonnei Ss046; identical to SEQ ID NO: 18649

SEQ ID NO: 47823 - DNA, 216 bp, Shigella sonnei Ss046; identical to SEQ ID NO: 18650
  CDS (1)..(216): transl_table=11

SEQ ID NO: 47824 - protein, 71 aa, Shigella sonnei Ss046; identical to SEQ ID NO: 18651

SEQ ID NO: 47825 - DNA, 207 bp, Bacteriophage H19B; identical to SEQ ID NO: 18652
  CDS (1)..(207): transl_table=11

SEQ ID NO: 47826 - protein, 68 aa, Bacteriophage H19B; identical to SEQ ID NO: 18653

SEQ ID NO: 47827 - DNA, 291 bp, Stx1; identical to SEQ ID NO: 18654
  CDS (1)..(291): transl_table=11

SEQ ID NO: 47828 - protein, 96 aa, Stx1; identical to SEQ ID NO: 18655

SEQ ID NO: 47829 - DNA, 150 bp, Escherichia coli; identical to SEQ ID NO: 18656
  CDS (1)..(150): transl_table=11

SEQ ID NO: 47830 - protein, 49 aa, Escherichia coli; identical to SEQ ID NO: 18657

SEQ ID NO: 47831 - DNA, 216 bp, Escherichia coli; identical to SEQ ID NO: 18658
  CDS (1)..(216): transl_table=11

SEQ ID NO: 47832 - protein, 71 aa, Escherichia coli; identical to SEQ ID NO: 18659

SEQ ID NO: 47833 - DNA, 216 bp, Shigella dysenteriae; identical to SEQ ID NO: 18660
  CDS (1)..(216): transl_table=11

SEQ ID NO: 47834 - protein, 71 aa, Shigella dysenteriae; identical to SEQ ID NO: 18661

SEQ ID NO: 47835 - DNA, 216 bp, Escherichia coli O6; identical to SEQ ID NO: 18662
  CDS (1)..(216): transl_table=11

SEQ ID NO: 47836 - protein, 71 aa, Escherichia coli O6; identical to SEQ ID NO: 18663

SEQ ID NO: 47837 - DNA, 216 bp, Bacteriophage P21; identical to SEQ ID NO: 18664
  CDS (1)..(216): transl_table=11

SEQ ID NO: 47838 - protein, 71 aa, Bacteriophage P21; identical to SEQ ID NO: 18665

SEQ ID NO: 47839 - DNA, 24 bp, Artificial sequence
  Primer sequence
atgctgtcaaaactaccccgtaga

SEQ ID NO: 47840 - DNA, 23 bp, Artificial sequence
  Primer sequence
ttactctcctctcgcagccttac

SEQ ID NO: 47841 - protein, 71 aa, Artificial sequence; identical to SEQ ID NO: 18668
  Consensus
  Variant (2)..(3): Xaa in position 2 to 3 is any amino acid
  Variant (14)..(14): Xaa in position 14 is any amino acid
  Variant (18)..(20): Xaa in position 18 to 20 is any amino acid
  Variant (24)..(24): Xaa in position 24 is any amino acid
  Variant (27)..(27): Xaa in position 27 is any amino acid
  Variant (30)..(30): Xaa in position 30 is any amino acid
  Variant (37)..(37): Xaa in position 37 is any amino acid
  Variant (47)..(47): Xaa in position 47 is any amino acid
  Variant (49)..(49): Xaa in position 49 is any amino acid
  Variant (67)..(67): Xaa in position 67 is any amino acid

SEQ ID NO: 47842 - protein, 10 aa, Artificial sequence
  Consensus
  Variant (2)..(2): Xaa in position 2 is Asp or Glu
  Variant (5)..(5): Xaa in position 5 is Ser or Thr
  Variant (7)..(7): Xaa in position 7 is Gly or Ser
  Variant (8)..(8): Xaa in position 8 is Ile or Val
  Variant (9)..(9): Xaa in position 9 is Ala or Ser
MXKIXTXXXY

SEQ ID NO: 47843 - protein, 6 aa, Artificial sequence
  Consensus
  Variant (2)..(2): Xaa in position 2 is Phe or Leu
  Variant (5)..(5): Xaa in position 5 is any amino acid
WXLQXL

SEQ ID NO: 47844 - protein, 14 aa, Artificial sequence
  Consensus
  Variant (5)..(5): Xaa in position 5 is any or no amino acid
  Variant (7)..(7): Xaa in position 7 is any or no amino acid
PSQWXAXIGVLGSL

SEQ ID NO: 47845 - DNA, 1047 bp, Escherichia coli K12; identical to SEQ ID NO: 1323
  CDS (1)..(1047)

SEQ ID NO: 47846 - protein, 348 aa, Escherichia coli K12; identical to SEQ ID NO: 1324

SEQ ID NO: 47847 - DNA, 1235 bp, Salmonella typhimurium; identical to SEQ ID NO: 1325
  CDS (165)..(1235)

SEQ ID NO: 47848 - protein, 356 aa, Salmonella typhimurium; identical to SEQ ID NO: 1326

SEQ ID NO: 47849 - DNA, 1086 bp, Deinococcus radiodurans; identical to SEQ ID NO: 1327
  CDS (1)..(1086)

SEQ ID NO: 47850 - protein, 361 aa, Deinococcus radiodurans; identical to SEQ ID NO: 1328

SEQ ID NO: 47851 - DNA, 1056 bp, Neisseria meningitidis; identical to SEQ ID NO: 1329
  CDS (1)..(1056)

SEQ ID NO: 47852 - protein, 351 aa, Neisseria meningitidis; identical to SEQ ID NO: 1330

SEQ ID NO: 47853 - DNA, 1047 bp, Yersinia pestis; identical to SEQ ID NO: 1331
  CDS (1)..(1047)

SEQ ID NO: 47854 - protein, 348 aa, Yersinia pestis; identical to SEQ ID NO: 1332

SEQ ID NO: 47855 - DNA, 1071 bp, Escherichia coli; identical to SEQ ID NO: 1333
  CDS (1)..(1071)

SEQ ID NO: 47856 - protein, 356 aa, Escherichia coli; identical to SEQ ID NO: 1334

SEQ ID NO: 47857 - DNA, 1131 bp, Nostoc sp. PCC 7120; identical to SEQ ID NO: 1335
  CDS (1)..(1131)

SEQ ID NO: 47858 - protein, 376 aa, Nostoc sp. PCC 7120; identical to SEQ ID NO: 1336

SEQ ID NO: 47859 - DNA, 1053 bp, Salmonella enterica subsp. enterica serovar Typhi; identical to SEQ ID NO: 1337
  CDS (1)..(1053)

SEQ ID NO: 47860 - protein, 350 aa, Salmonella enterica subsp. enterica serovar Typhi; identical to SEQ ID NO: 1338

SEQ ID NO: 47861 - DNA, 1077 bp, Pseudomonas aeruginosa; identical to SEQ ID NO: 1339
  CDS (1)..(1077)

SEQ ID NO: 47862 - protein, 358 aa, Pseudomonas aeruginosa; identical to SEQ ID NO: 1340

SEQ ID NO: 47863 - DNA, 1047 bp, Buchnera sp; identical to SEQ ID NO: 1341
  CDS (1)..(1047)

SEQ ID NO: 47864 - protein, 348 aa, Buchnera sp; identical to SEQ ID NO: 1342

SEQ ID NO: 47865 - DNA, 1074 bp, Vibrio cholerae; identical to SEQ ID NO: 1343
  CDS (1)..(1074)

SEQ ID NO: 47866 - protein, 357 aa, Vibrio cholerae; identical to SEQ ID NO: 1344

SEQ ID NO: 47867 - DNA, 1038 bp, Lactococcus lactis subsp. lactis; identical to SEQ ID NO: 1345
  CDS (1)..(1038)

SEQ ID NO: 47868 - protein, 345 aa, Lactococcus lactis subsp. lactis; identical to SEQ ID NO: 1346

SEQ ID NO: 47869 - DNA, 1023 bp, Lactococcus lactis subsp. lactis; identical to SEQ ID NO: 1347
  CDS (1)..(1023)

SEQ ID NO: 47870 - protein, 340 aa, Lactococcus lactis subsp. lactis; identical to SEQ ID NO: 1348

SEQ ID NO: 47871 - DNA, 1032 bp, Streptococcus pneumoniae; identical to SEQ ID NO: 1349
  CDS (1)..(1032)

SEQ ID NO: 47872 - protein, 343 aa, Streptococcus pneumoniae; identical to SEQ ID NO: 1350

SEQ ID NO: 47873 - DNA, 1095 bp, Pseudomonas aeruginosa; identical to SEQ ID NO: 1351
  CDS (1)..(1095)

SEQ ID NO: 47874 - protein, 364 aa, Pseudomonas aeruginosa; identical to SEQ ID NO: 1352

SEQ ID NO: 47875 - DNA, 1110 bp, Caulobacter crescentus; identical to SEQ ID NO: 1353
  CDS (1)..(1110)

SEQ ID NO: 47876 - protein, 369 aa, Caulobacter crescentus; identical to SEQ ID NO: 1354

SEQ ID NO: 47877 - DNA, 1032 bp, Streptococcus pneumoniae; identical to SEQ ID NO: 1355
  CDS (1)..(1032)

SEQ ID NO: 47878 - protein, 343 aa, Streptococcus pneumoniae; identical to SEQ ID NO: 1356

SEQ ID NO: 47879 - DNA, 1047 bp, Buchnera aphidicola; identical to SEQ ID NO: 1357
  CDS (1)..(1047)

SEQ ID NO: 47880 - protein, 348 aa, Buchnera aphidicola; identical to SEQ ID NO: 1358

SEQ ID NO: 47881 - DNA, 1089 bp, Haemophilus influenzae; identical to SEQ ID NO: 1359
  CDS (1)..(1089)

SEQ ID NO: 47882 - protein, 362 aa, Haemophilus influenzae; identical to SEQ ID NO: 1360

SEQ ID NO: 47883 - DNA, 1502 bp, Candida albicans; identical to SEQ ID NO: 1361
  CDS (336)..(1442)

SEQ ID NO: 47884 - protein, 368 aa, Candida albicans; identical to SEQ ID NO: 1362

SEQ ID NO: 47885 - DNA, 1113 bp, Saccharomyces cerevisiae; identical to SEQ ID NO: 1363
  CDS (1)..(1113)

SEQ ID NO: 47886 - protein, 370 aa, Saccharomyces cerevisiae; identical to SEQ ID NO: 1364

SEQ ID NO: 47887 - DNA, 2048 bp, Saccharomyces cerevisiae; identical to SEQ ID NO: 1365
  CDS (619)..(1731)

SEQ ID NO: 47888 - protein, 370 aa, Saccharomyces cerevisiae; identical to SEQ ID NO: 1366

SEQ ID NO: 47889 - DNA, 1107 bp, Schizosaccharomyces pombe; identical to SEQ ID NO: 1367
  CDS (1)..(1107)

SEQ ID NO: 47890 - protein, 368 aa, Schizosaccharomyces pombe; identical to SEQ ID NO: 1368

SEQ ID NO: 47891 - DNA, 1089 bp, Amycolatopsis orientalis; identical to SEQ ID NO: 1369
  CDS (1)..(1089)

SEQ ID NO: 47892 - protein, 362 aa, Amycolatopsis orientalis; identical to SEQ ID NO: 1370

SEQ ID NO: 47893 - DNA, 1119 bp, Schizosaccharomyces pombe; identical to SEQ ID NO: 1371
  CDS (1)..(1119)

SEQ ID NO: 47894 - protein, 372 aa, Schizosaccharomyces pombe; identical to SEQ ID NO: 1372

SEQ ID NO: 47895 - DNA, 1248 bp, Corynebacterium glutamicum; identical to SEQ ID NO: 1373
  CDS (101)..(1228)

SEQ ID NO: 47896 - protein, 375 aa, Corynebacterium glutamicum; identical to SEQ ID NO: 1374

SEQ ID NO: 47897 - DNA, 1083 bp, Methylophilus methylotrophus; identical to SEQ ID NO: 1375
  CDS (1)..(1083)

SEQ ID NO: 47898 - protein, 360 aa, Methylophilus methylotrophus; identical to SEQ ID NO: 1376

SEQ ID NO: 47899 - DNA, 1107 bp, Debaryomyces hansenii; identical to SEQ ID NO: 1377
  CDS (1)..(1107)

SEQ ID NO: 47900 - protein, 368 aa, Debaryomyces hansenii; identical to SEQ ID NO: 1378

SEQ ID NO: 47901 - DNA, 1074 bp, Yarrowia lipolytica; identical to SEQ ID NO: 1379
  CDS (1)..(1074)

SEQ ID NO: 47902 - protein, 357 aa, Yarrowia lipolytica; identical to SEQ ID NO: 1380

SEQ ID NO: 47903 - DNA, 1089 bp, Yarrowia lipolytica; identical to SEQ ID NO: 1381
  CDS (1)..(1089)

SEQ ID NO: 47904 - protein, 362 aa, Yarrowia lipolytica; identical to SEQ ID NO: 1382

SEQ ID NO: 47905 - DNA, 1119 bp, Kluyveromyces lactis; identical to SEQ ID NO: 1383
  CDS (1)..(1119)

SEQ ID NO: 47906 - protein, 372 aa, Kluyveromyces lactis; identical to SEQ ID NO: 1384

SEQ ID NO: 47907 - DNA, 1095 bp, Kluyveromyces lactis; identical to SEQ ID NO: 1385
  CDS (1)..(1095)

SEQ ID NO: 47908 - protein, 364 aa, Kluyveromyces lactis; identical to SEQ ID NO: 1386

SEQ ID NO: 47909 - DNA, 1074 bp, Erwinia carotovora subsp; identical to SEQ ID NO: 1387
  CDS (1)..(1074)

SEQ ID NO: 47910 - protein, 357 aa, Erwinia carotovora subsp; identical to SEQ ID NO: 1388

SEQ ID NO: 47911 - DNA, 1047 bp, Erwinia carotovora subsp; identical to SEQ ID NO: 1389
  CDS (1)..(1047)

SEQ ID NO: 47912 - protein, 348 aa, Erwinia carotovora subsp; identical to SEQ ID NO: 1390

SEQ ID NO: 47913 - DNA, 1056 bp, Erwinia carotovora subsp; identical to SEQ ID NO: 1391
  CDS (1)..(1056)

SEQ ID NO: 47914 - protein, 351 aa, Erwinia carotovora subsp; identical to SEQ ID NO: 1392

SEQ ID NO: 47915 - DNA, 1113 bp, Acinetobacter sp; identical to SEQ ID NO: 1393
  CDS (1)..(1113)

SEQ ID NO: 47916 - protein, 370 aa, Acinetobacter sp; identical to SEQ ID NO: 1394

SEQ ID NO: 47917 - DNA, 1056 bp, Acinetobacter sp; identical to SEQ ID NO: 1395
  CDS (1)..(1056)

SEQ ID NO: 47918 - protein, 351 aa, Acinetobacter sp; identical to SEQ ID NO: 1396

SEQ ID NO: 47919 - DNA, 1119 bp, Candida glabrata; identical to SEQ ID NO: 1397
  CDS (1)..(1119)

SEQ ID NO: 47920 - protein, 372 aa, Candida glabrata; identical to SEQ ID NO: 1398

SEQ ID NO: 47921 - DNA, 1071 bp, Candida glabrata; identical to SEQ ID NO: 1399
  CDS (1)..(1071)

SEQ ID NO: 47922 - protein, 356 aa, Candida glabrata; identical to SEQ ID NO: 1400

SEQ ID NO: 47923 - DNA, 1083 bp, Photobacterium profundum; identical to SEQ ID NO: 1401
  CDS (1)..(1083)

SEQ ID NO: 47924 - protein, 360 aa, Photobacterium profundum; identical to SEQ ID NO: 1402

SEQ ID NO: 47925 - DNA, 1053 bp, Photobacterium profundum; identical to SEQ ID NO: 1403
  CDS (1)..(1053)

SEQ ID NO: 47926 - protein, 350 aa, Photobacterium profundum; identical to SEQ ID NO: 1404

SEQ ID NO: 47927 - DNA, 1113 bp, Photobacterium profundum; identical to SEQ ID NO: 1405
  CDS (1)..(1113)

SEQ ID NO: 47928 - protein, 370 aa, Photobacterium profundum; identical to SEQ ID NO: 1406

SEQ ID NO: 47929 - DNA, 1056 bp, Photobacterium profundum; identical to SEQ ID NO: 1407
  CDS (1)..(1056)

SEQ ID NO: 47930 - protein, 351 aa, Photobacterium profundum; identical to SEQ ID NO: 1408

SEQ ID NO: 47931 - DNA, 1092 bp, Parachlamydia sp; identical to SEQ ID NO: 1409
  CDS (1)..(1092)

SEQ ID NO: 47932 - protein, 363 aa, Parachlamydia sp; identical to SEQ ID NO: 1410

SEQ ID NO: 47933 - DNA, 1095 bp, Rhodopseudomonas palustris; identical to SEQ ID NO: 1411
  CDS (1)..(1095)

SEQ ID NO: 47934 - protein, 364 aa, Rhodopseudomonas palustris; identical to SEQ ID NO: 1412

SEQ ID NO: 47935 - DNA, 1100 bp, Amycolatopsis methanolica; identical to SEQ ID NO: 1413
  CDS (1)..(1086)

SEQ ID NO: 47936 - protein, 361 aa, Amycolatopsis methanolica; identical to SEQ ID NO: 1414

SEQ ID NO: 47937 - DNA, 1071 bp, Treponema denticola; identical to SEQ ID NO: 1415
  CDS (1)..(1071)

SEQ ID NO: 47938 - protein, 356 aa, Treponema denticola; identical to SEQ ID NO: 1416

SEQ ID NO: 47939 - DNA, 1068 bp, Geobacter sulfurreducens; identical to SEQ ID NO: 1417
  CDS (1)..(1068)

SEQ ID NO: 47940 - protein, 355 aa, Geobacter sulfurreducens; identical to SEQ ID NO: 1418

SEQ ID NO: 47941 - DNA, 1095 bp, Ashbya gossypii; identical to SEQ ID NO: 1419
  CDS (1)..(1095)

SEQ ID NO: 47942 - protein, 364 aa, Ashbya gossypii; identical to SEQ ID NO: 1420

SEQ ID NO: 47943 - DNA, 1122 bp, Ashbya gossypii; identical to SEQ ID NO: 1421
  CDS (1)..(1122)

SEQ ID NO: 47944 - protein, 373 aa, Ashbya gossypii; identical to SEQ ID NO: 1422

SEQ ID NO: 47945 - DNA, 1098 bp, Amycolatopsis balhimycina; identical to SEQ ID NO: 1423
  CDS (1)..(1098)

SEQ ID NO: 47946 - protein, 365 aa, Amycolatopsis balhimycina; identical to SEQ ID NO: 1424

SEQ ID NO: 47947 - DNA, 1071 bp, Vibrio vulnificus; identical to SEQ ID NO: 1425
  CDS (1)..(1071)

SEQ ID NO: 47948 - protein, 356 aa, Vibrio vulnificus; identical to SEQ ID NO: 1426

SEQ ID NO: 47949 - DNA, 1047 bp, Photorhabdus luminescens; identical to SEQ ID NO: 1427
  CDS (1)..(1047)

SEQ ID NO: 47950 - protein, 348 aa, Photorhabdus luminescens; identical to SEQ ID NO: 1428

SEQ ID NO: 47951 - DNA, 1053 bp, Photorhabdus luminescens; identical to SEQ ID NO: 1429
  CDS (1)..(1053)

SEQ ID NO: 47952 - protein, 350 aa, Photorhabdus luminescens; identical to SEQ ID NO: 1430

SEQ ID NO: 47953 - DNA, 1095 bp, Photorhabdus luminescens; identical to SEQ ID NO: 1431
  CDS (1)..(1095)

SEQ ID NO: 47954 - protein, 364 aa, Photorhabdus luminescens; identical to SEQ ID NO: 1432

SEQ ID NO: 47955 - DNA, 1119 bp, Gloeobacter violaceus; identical to SEQ ID NO: 1433
  CDS (1)..(1119)

SEQ ID NO: 47956 - protein, 372 aa, Gloeobacter violaceus; identical to SEQ ID NO: 1434

SEQ ID NO: 47957 - DNA, 1107 bp, Chromobacterium violaceum; identical to SEQ ID NO: 1435
  CDS (1)..(1107)

SEQ ID NO: 47958 - protein, 368 aa, Chromobacterium violaceum; identical to SEQ ID NO: 1436

SEQ ID NO: 47959 - DNA, 1059 bp, Chromobacterium violaceum; identical to SEQ ID NO: 1437
  CDS (1)..(1059)

SEQ ID NO: 47960 - protein, 352 aa, Chromobacterium violaceum; identical to SEQ ID NO: 1438

SEQ ID NO: 47961 - DNA, 1140 bp, Neurospora crassa; identical to SEQ ID NO: 1439
  CDS (1)..(1140)

SEQ ID NO: 47962 - protein, 379 aa, Neurospora crassa; identical to SEQ ID NO: 1440

SEQ ID NO: 47963 - DNA, 1092 bp, Neurospora crassa; identical to SEQ ID NO: 1441
  CDS (1)..(1092)

SEQ ID NO: 47964 - protein, 363 aa, Neurospora crassa; identical to SEQ ID NO: 1442

SEQ ID NO: 47965 - DNA, 1068 bp, Synechococcus sp; identical to SEQ ID NO: 1443
  CDS (1)..(1068)

SEQ ID NO: 47966 - protein, 355 aa, Synechococcus sp; identical to SEQ ID NO: 1444

SEQ ID NO: 47967 - DNA, 1053 bp, Rhodopirellula baltica; identical to SEQ ID NO: 1445
  CDS (1)..(1053)

SEQ ID NO: 47968 - protein, 350 aa, Rhodopirellula baltica; identical to SEQ ID NO: 1446

SEQ ID NO: 47969 - DNA, 1068 bp, Prochlorococcus marinus subsp; identical to SEQ ID NO: 1447
  CDS (1)..(1068)

SEQ ID NO: 47970 - protein, 355 aa, Prochlorococcus marinus subsp; identical to SEQ ID NO: 1448

SEQ ID NO: 47971 - DNA, 1083 bp, Prochlorococcus marinus; identical to SEQ ID NO: 1449
  CDS (1)..(1083)

SEQ ID NO: 47972 - protein, 360 aa, Prochlorococcus marinus; identical to SEQ ID NO: 1450

SEQ ID NO: 47973 - DNA, 1074 bp, Prochlorococcus marinus; identical to SEQ ID NO: 1451
  CDS (1)..(1074)

SEQ ID NO: 47974 - protein, 357 aa, Prochlorococcus marinus; identical to SEQ ID NO: 1452

SEQ ID NO: 47975 - DNA, 1113 bp, Haemophilus ducreyi; identical to SEQ ID NO: 1453
  CDS (1)..(1113)

SEQ ID NO: 47976 - protein, 370 aa, Haemophilus ducreyi; identical to SEQ ID NO: 1454

SEQ ID NO: 47977 - DNA, 1080 bp, Haemophilus ducreyi; identical to SEQ ID NO: 1455
  CDS (1)..(1080)

SEQ ID NO: 47978 - protein, 359 aa, Haemophilus ducreyi; identical to SEQ ID NO: 1456

SEQ ID NO: 47979 - DNA, 1086 bp, Candidatus Blochmannia floridanus; identical to SEQ ID NO: 1457
  CDS (1)..(1086)

SEQ ID NO: 47980 - protein, 361 aa, Candidatus Blochmannia floridanus; identical to SEQ ID NO: 1458

SEQ ID NO: 47981 - DNA, 1074 bp, Bordetella pertussis; identical to SEQ ID NO: 1459
  CDS (1)..(1074)

SEQ ID NO: 47982 - protein, 357 aa, Bordetella pertussis; identical to SEQ ID NO: 1460

SEQ ID NO: 47983 - DNA, 1119 bp, Bordetella bronchiseptica; identical to SEQ ID NO: 1461
  CDS (1)..(1119)

SEQ ID NO: 47984 - protein, 372 aa, Bordetella bronchiseptica; identical to SEQ ID NO: 1462

SEQ ID NO: 47985 - DNA, 1179 bp, Nitrosomonas europaea; identical to SEQ ID NO: 1463
  CDS (1)..(1179)

SEQ ID NO: 47986 - protein, 392 aa, Nitrosomonas europaea; identical to SEQ ID NO: 1464

SEQ ID NO: 47987 - DNA, 1083 bp, Coxiella burnetii; identical to SEQ ID NO: 1465
  CDS (1)..(1083)

SEQ ID NO: 47988 - protein, 360 aa, Coxiella burnetii; identical to SEQ ID NO: 1466

SEQ ID NO: 47989 - DNA, 834 bp, Vibrio anguillarum; identical to SEQ ID NO: 1467
  CDS (1)..(834)

SEQ ID NO: 47990 - protein, 277 aa, Vibrio anguillarum; identical to SEQ ID NO: 1468

SEQ ID NO: 47991 - DNA, 1143 bp, Xylella fastidiosa; identical to SEQ ID NO: 1469
  CDS (1)..(1143)

SEQ ID NO: 47992 - protein, 380 aa, Xylella fastidiosa; identical to SEQ ID NO: 1470

SEQ ID NO: 47993 - DNA, 1053 bp, Vibrio parahaemolyticus; identical to SEQ ID NO: 1471
  CDS (1)..(1053)

SEQ ID NO: 47994 - protein, 350 aa, Vibrio parahaemolyticus; identical to SEQ ID NO: 1472

SEQ ID NO: 47995 - DNA, 1053 bp, Vibrio parahaemolyticus; identical to SEQ ID NO: 1473
  CDS (1)..(1053)

SEQ ID NO: 47996 - protein, 350 aa, Vibrio parahaemolyticus; identical to SEQ ID NO: 1474

SEQ ID NO: 47997 - DNA, 1074 bp, Vibrio parahaemolyticus; identical to SEQ ID NO: 1475
  CDS (1)..(1074)

SEQ ID NO: 47998 - protein, 357 aa, Vibrio parahaemolyticus; identical to SEQ ID NO: 1476

SEQ ID NO: 47999 - DNA, 1083 bp, Pseudomonas syringae; identical to SEQ ID NO: 1477
  CDS (1)..(1083)

SEQ ID NO: 48000 - protein, 360 aa, Pseudomonas syringae; identical to SEQ ID NO: 1478

SEQ ID NO: 48001 - DNA, 1077 bp, Pseudomonas syringae; identical to SEQ ID NO: 1479
  CDS (1)..(1077)

SEQ ID NO: 48002 - protein, 358 aa, Pseudomonas syringae; identical to SEQ ID NO: 1480

SEQ ID NO: 48003 - DNA, 1062 bp, Pseudomonas putida; identical to SEQ ID NO: 1481
  CDS (1)..(1062)

SEQ ID NO: 48004 - protein, 353 aa, Pseudomonas putida; identical to SEQ ID NO: 1482

SEQ ID NO: 48005 - DNA, 1113 bp, Pseudomonas putida; identical to SEQ ID NO: 1483
  CDS (1)..(1113)

SEQ ID NO: 48006 - protein, 370 aa, Pseudomonas putida; identical to SEQ ID NO: 1484

SEQ ID NO: 48007 - DNA, 1086 bp, Bradyrhizobium japonicum; identical to SEQ ID NO: 1485
  CDS (1)..(1086)

SEQ ID NO: 48008 - protein, 361 aa, Bradyrhizobium japonicum; identical to SEQ ID NO: 1486

SEQ ID NO: 48009 - DNA, 1053 bp, Yersinia pestis; identical to SEQ ID NO: 1487
  CDS (1)..(1053)

SEQ ID NO: 48010 - protein, 350 aa, Yersinia pestis; identical to SEQ ID NO: 1488

SEQ ID NO: 48011 - DNA, 1077 bp, Yersinia pestis; identical to SEQ ID NO: 1489
  CDS (1)..(1077)

SEQ ID NO: 48012 - protein, 358 aa, Yersinia pestis; identical to SEQ ID NO: 1490

SEQ ID NO: 48013 - DNA, 1038 bp, Wigglesworthia glossinidia brevipalpis; identical to SEQ ID NO: 1491
  CDS (1)..(1038)

SEQ ID NO: 48014 - protein, 345 aa, Wigglesworthia glossinidia brevipalpis; identical to SEQ ID NO: 1492

SEQ ID NO: 48015 - DNA, 1053 bp, Vibrio vulnificus; identical to SEQ ID NO: 1493
  CDS (1)..(1053)

SEQ ID NO: 48016 - protein, 350 aa, Vibrio vulnificus; identical to SEQ ID NO: 1494

SEQ ID NO: 48017 - DNA, 1053 bp, Vibrio vulnificus; identical to SEQ ID NO: 1495
  CDS (1)..(1053)

SEQ ID NO: 48018 - protein, 350 aa, Vibrio vulnificus; identical to SEQ ID NO: 1496

SEQ ID NO: 48019 - DNA, 1071 bp, Vibrio vulnificus; identical to SEQ ID NO: 1497
  CDS (1)..(1071)

SEQ ID NO: 48020 - protein, 356 aa, Vibrio vulnificus; identical to SEQ ID NO: 1498

SEQ ID NO: 48021 - DNA, 1062 bp, Synechococcus elongatus; identical to SEQ ID NO: 1499
  CDS (1)..(1062)

SEQ ID NO: 48022 - protein, 353 aa, Synechococcus elongatus; identical to SEQ ID NO: 1500

SEQ ID NO: 48023 - DNA, 1032 bp, Streptococcus mutans; identical to SEQ ID NO: 1501
  CDS (1)..(1032)

SEQ ID NO: 48024 - protein, 343 aa, Streptococcus mutans; identical to SEQ ID NO: 1502

SEQ ID NO: 48025 - DNA, 1035 bp, Streptococcus mutans; identical to SEQ ID NO: 1503
  CDS (1)..(1035)

SEQ ID NO: 48026 - protein, 344 aa, Streptococcus mutans; identical to SEQ ID NO: 1504

SEQ ID NO: 48027 - DNA, 1008 bp, Streptococcus agalactiae; identical to SEQ ID NO: 1505
  CDS (1)..(1008)

SEQ ID NO: 48028 - protein, 335 aa, Streptococcus agalactiae; identical to SEQ ID NO: 1506

SEQ ID NO: 48029 - DNA, 1065 bp, Shewanella oneidensis; identical to SEQ ID NO: 1507
  CDS (1)..(1065)

SEQ ID NO: 48030 - protein, 354 aa, Shewanella oneidensis; identical to SEQ ID NO: 1508

SEQ ID NO: 48031 - DNA, 1092 bp, Shewanella oneidensis; identical to SEQ ID NO: 1509
  CDS (1)..(1092)

SEQ ID NO: 48032 - protein, 363 aa, Shewanella oneidensis; identical to SEQ ID NO: 1510

SEQ ID NO: 48033 - DNA, 1059 bp, Shewanella oneidensis; identical to SEQ ID NO: 1511
  CDS (1)..(1059)

SEQ ID NO: 48034 - protein, 352 aa, Shewanella oneidensis; identical to SEQ ID NO: 1512

SEQ ID NO: 48035 - DNA, 1053 bp, Escherichia coli O6; identical to SEQ ID NO: 1513
  CDS (1)..(1053)

SEQ ID NO: 48036 - protein, 350 aa, Escherichia coli O6; identical to SEQ ID NO: 1514

SEQ ID NO: 48037 - DNA, 1170 bp, Corynebacterium efficiens; identical to SEQ ID NO: 1515
  CDS (1)..(1170)

SEQ ID NO: 48038 - protein, 389 aa, Corynebacterium efficiens; identical to SEQ ID NO: 1516

SEQ ID NO: 48039 - DNA, 1134 bp, Bifidobacterium longum; identical to SEQ ID NO: 1517
  CDS (1)..(1134)

SEQ ID NO: 48040 - protein, 377 aa, Bifidobacterium longum; identical to SEQ ID NO: 1518

SEQ ID NO: 48041 - DNA, 1233 bp, Bifidobacterium longum; identical to SEQ ID NO: 1519
  CDS (1)..(1233)

SEQ ID NO: 48042 - protein, 410 aa, Bifidobacterium longum; identical to SEQ ID NO: 1520

SEQ ID NO: 48043 - DNA, 1221 bp, Phytophthora infestans; identical to SEQ ID NO: 1521
  CDS (20)..(1153)

SEQ ID NO: 48044 - protein, 377 aa, Phytophthora infestans; identical to SEQ ID NO: 1522

SEQ ID NO: 48045 - DNA, 1062 bp, Chlorobium tepidum; identical to SEQ ID NO: 1523
  CDS (1)..(1062)

SEQ ID NO: 48046 - protein, 353 aa, Chlorobium tepidum; identical to SEQ ID NO: 1524

SEQ ID NO: 48047 - DNA, 1074 bp, Xanthomonas campestris; identical to SEQ ID NO: 1525
  CDS (1)..(1074)

SEQ ID NO: 48048 - protein, 357 aa, Xanthomonas campestris; identical to SEQ ID NO: 1526

SEQ ID NO: 48049 - DNA, 1074 bp, Xanthomonas axonopodis; identical to SEQ ID NO: 1527
  CDS (1)..(1074)

SEQ ID NO: 48050 - protein, 357 aa, Xanthomonas axonopodis; identical to SEQ ID NO: 1528

SEQ ID NO: 48051 - DNA, 1080 bp, Ralstonia solanacearum; identical to SEQ ID NO: 1529
  CDS (1)..(1080)

SEQ ID NO: 48052 - protein, 359 aa, Ralstonia solanacearum; identical to SEQ ID NO: 1530

SEQ ID NO: 48053 - DNA, 1179 bp, Ralstonia solanacearum; identical to SEQ ID NO: 1531
  CDS (1)..(1179)

SEQ ID NO: 48054 - protein, 392 aa, Ralstonia solanacearum; identical to SEQ ID NO: 1532

SEQ ID NO: 48055 - DNA, 1065 bp, Synechococcus sp; identical to SEQ ID NO: 1533
  CDS (1)..(1065)

SEQ ID NO: 48056 - protein, 354 aa, Synechococcus sp; identical to SEQ ID NO: 1534

SEQ ID NO: 48057 - DNA, 1035 bp, Escherichia coli; identical to SEQ ID NO: 1535
  CDS (1)..(1035)

SEQ ID NO: 48058 - protein, 344 aa, Escherichia coli; identical to SEQ ID NO: 1536

SEQ ID NO: 48059 - DNA, 1200 bp, Stigmatella aurantiaca; identical to SEQ ID NO: 1537
  CDS (62)..(1147)

SEQ ID NO: 48060 - protein, 361 aa, Stigmatella aurantiaca; identical to SEQ ID NO: 1538

SEQ ID NO: 48061 - DNA, 1092 bp, Rhizobium loti; identical to SEQ ID NO: 1539
  CDS (1)..(1092)

SEQ ID NO: 48062 - protein, 363 aa, Rhizobium loti; identical to SEQ ID NO: 1540

SEQ ID NO: 48063 - DNA, 1083 bp, Amycolatopsis mediterranei; identical to SEQ ID NO: 1541
  CDS (1)..(1083)

SEQ ID NO: 48064 - protein, 360 aa, Amycolatopsis mediterranei; identical to SEQ ID NO: 1542

SEQ ID NO: 48065 - DNA, 1053 bp, Pasteurella multocida; identical to SEQ ID NO: 1543
  CDS (1)..(1053)

SEQ ID NO: 48066 - protein, 350 aa, Pasteurella multocida; identical to SEQ ID NO: 1544

SEQ ID NO: 48067 - DNA, 1086 bp, Pasteurella multocida; identical to SEQ ID NO: 1545
  CDS (1)..(1086)

SEQ ID NO: 48068 - protein, 361 aa, Pasteurella multocida; identical to SEQ ID NO: 1546

SEQ ID NO: 48069 - DNA, 1125 bp, Emericella nidulans; identical to SEQ ID NO: 1547
  CDS (1)..(1125)

SEQ ID NO: 48070 - protein, 374 aa, Emericella nidulans; identical to SEQ ID NO: 1548

SEQ ID NO: 48071 - DNA, 1089 bp, Emericella nidulans; identical to SEQ ID NO: 1549
  CDS (1)..(1089)

SEQ ID NO: 48072 - protein, 362 aa, Emericella nidulans; identical to SEQ ID NO: 1550

SEQ ID NO: 48073 - DNA, 1239 bp, Vibrio cholerae; identical to SEQ ID NO: 1551
  CDS (114)..(1175)

SEQ ID NO: 48074 - protein, 353 aa, Vibrio cholerae; identical to SEQ ID NO: 1552

SEQ ID NO: 48075 - DNA, 2184 bp, Candida albicans; identical to SEQ ID NO: 1553
  CDS (461)..(1573)

SEQ ID NO: 48076 - protein, 370 aa, Candida albicans; identical to SEQ ID NO: 1554

SEQ ID NO: 48077 - DNA, 1047 bp, Buchnera aphidicola; identical to SEQ ID NO: 1555
  CDS (1)..(1047)

SEQ ID NO: 48078 - protein, 348 aa, Buchnera aphidicola; identical to SEQ ID NO: 1556

SEQ ID NO: 48079 - DNA, 1047 bp, Buchnera aphidicola; identical to SEQ ID NO: 1557
  CDS (1)..(1047)

SEQ ID NO: 48080 - protein, 348 aa, Buchnera aphidicola; identical to SEQ ID NO: 1558

SEQ ID NO: 48081 - DNA, 1047 bp, Erwinia herbicola; identical to SEQ ID NO: 1559
  CDS (1)..(1047)

SEQ ID NO: 48082 - protein, 348 aa, Erwinia herbicola; identical to SEQ ID NO: 1560

SEQ ID NO: 48083 - DNA, 1047 bp, Salmonella typhimurium; identical to SEQ ID NO: 1561
  CDS (1)..(1047)

SEQ ID NO: 48084 - protein, 348 aa, Salmonella typhimurium; identical to SEQ ID NO: 1562

SEQ ID NO: 48085 - DNA, 23 bp, Artificial sequence
  Primer sequence
atgaacagaactgacgaactccg

SEQ ID NO: 48086 - DNA, 24 bp, Artificial sequence
  Primer sequence
ttagaagcgggtatctaccgcaga

SEQ ID NO: 48087 - protein, 352 aa, Artificial sequence; identical to SEQ ID NO: 19007
  Consensus
  Variant (2)..(3): Xaa in position 2 to 3 is any amino acid
  Variant (5)..(11): Xaa in position 5 to 11 is any amino acid
  Variant (13)..(24): Xaa in position 13 to 24 is any amino acid
  Variant (26)..(30): Xaa in position 26 to 30 is any amino acid
  Variant (32)..(33): Xaa in position 32 to 33 is any amino acid
  Variant (35)..(35): Xaa in position 35 is any amino acid
  Variant (37)..(40): Xaa in position 37 to 40 is any amino acid
  Variant (42)..(43): Xaa in position 42 to 43 is any amino acid
  Variant (45)..(46): Xaa in position 45 to 46 is any amino acid
  Variant (51)..(51): Xaa in position 51 is any amino acid
  Variant (54)..(55): Xaa in position 54 to 55 is any amino acid
  Variant (58)..(59): Xaa in position 58 to 59 is any amino acid
  Variant (62)..(63): Xaa in position 62 to 63 is any amino acid
  Variant (65)..(76): Xaa in position 65 to 76 is any amino acid
  Variant (78)..(80): Xaa in position 78 to 80 is any amino acid
  Variant (83)..(83): Xaa in position 83 is any amino acid
  Variant (85)..(85): Xaa in position 85 is any amino acid
  Variant (91)..(93): Xaa in position 91 to 93 is any amino acid
  Variant (100)..(100): Xaa in position 100 is any amino acid
  Variant (103)..(112): Xaa in position 103 to 112 is any amino acid
  Variant (115)..(117): Xaa in position 115 to 117 is any amino acid
  Variant (119)..(119): Xaa in position 119 is any amino acid
  Variant (121)..(128): Xaa in position 121 to 128 is any amino acid
  Variant (130)..(130): Xaa in position 130 is any amino acid
  Variant (132)..(132): Xaa in position 132 is any amino acid
  Variant (134)..(134): Xaa in position 134 is any amino acid
  Variant (136)..(136): Xaa in position 136 is any amino acid
  Variant (139)..(142): Xaa in position 139 to 142 is any amino acid
  Variant (144)..(146): Xaa in position 144 to 146 is any amino acid
  Variant (148)..(152): Xaa in position 148 to 152 is any amino acid
  Variant (163)..(163): Xaa in position 163 is any amino acid
  Variant (166)..(167): Xaa in position 166 to 167 is any amino acid
  Variant (170)..(170): Xaa in position 170 is any amino acid
  Variant (173)..(173): Xaa in position 173 is any amino acid
  Variant (175)..(175): Xaa in position 175 is any amino acid
  Variant (180)..(180): Xaa in position 180 is any amino acid
  Variant (182)..(182): Xaa in position 182 is any amino acid
  Variant (184)..(187): Xaa in position 184 to 187 is any amino acid
  Variant (189)..(190): Xaa in position 189 to 190 is any amino acid
  Variant (192)..(194): Xaa in position 192 to 194 is any amino acid
  Variant (196)..(198): Xaa in position 196 to 198 is any amino acid
  Variant (200)..(200): Xaa in position 200 is any amino acid
  Variant (202)..(207): Xaa in position 202 to 207 is any amino acid
  Variant (209)..(214): Xaa in position 209 to 214 is any amino acid
  Variant (216)..(216): Xaa in position 216 is any amino acid
  Variant (219)..(221): Xaa in position 219 to 221 is any amino acid
  Variant (223)..(224): Xaa in position 223 to 224 is any amino acid
  Variant (229)..(237): Xaa in position 229 to 237 is any amino acid
  Variant (240)..(268): Xaa in position 240 to 268 is any amino acid
  Variant (270)..(270): Xaa in position 270 is any amino acid
  Variant (273)..(273): Xaa in position 273 is any amino acid
  Variant (276)..(276): Xaa in position 276 is any amino acid
  Variant (278)..(281): Xaa in position 278 to 281 is any amino acid
  Variant (283)..(284): Xaa in position 283 to 284 is any amino acid
  Variant (286)..(291): Xaa in position 286 to 291 is any amino acid
  Variant (293)..(295): Xaa in position 293 to 295 is any amino acid
  Variant (297)..(304): Xaa in position 297 to 304 is any amino acid
  Variant (306)..(306): Xaa in position 306 is any amino acid
  Variant (308)..(308): Xaa in position 308 is any amino acid
  Variant (311)..(314): Xaa in position 311 to 314 is any amino acid
  Variant (316)..(316): Xaa in position 316 is any amino acid
  Variant (318)..(333): Xaa in position 318 to 333 is any amino acid
  Variant (336)..(336): Xaa in position 336 is any amino acid
  Variant (338)..(338): Xaa in position 338 is any amino acid
  Variant (341)..(341): Xaa in position 341 is any amino acid
  Variant (343)..(344): Xaa in position 343 to 344 is any amino acid
  Variant (346)..(347): Xaa in position 346 to 347 is any amino acid
  Variant (349)..(351): Xaa in position 349 to 351 is any amino acid

SEQ ID NO: 48088 - protein, 24 aa, Artificial sequence
  Consensus
  Variant (2)..(2): Xaa in position 2 is any amino acid
  Variant (3)..(3): Xaa in position 3 is Leu, Val, Phe, Ile, Ala or Met
  Variant (4)..(4): Xaa in position 4 is Val, Ile, Leu or Ala
  Variant (5)..(5): Xaa in position 5 is Val or Ile
  Variant (6)..(6): Xaa in position 6 is Val, Ile, Cys or Thr
  Variant (11)..(11): Xaa in position 11 is Ile, Val, Ser or Leu
  Variant (12)..(12): Xaa in position 12 is His or Asp
  Variant (13)..(13): Xaa in position 13 is Asp or Asn
  Variant (14)..(15): Xaa in position 14 to 15 is any amino acid
  Variant (16)..(16): Xaa in position 16 is Ala, Ser, Gln or Thr
  Variant (17)..(17): Xaa in position 17 is Ala, Val or Gly
  Variant (18)..(18): Xaa in position 18 is any amino acid
  Variant (19)..(19): Xaa in position 19 is Glu, Asp, Ala or Gln
  Variant (21)..(21): Xaa in position 21 is Ala, Gly, Cys or Ser
  Variant (22)..(22): Xaa in position 22 is any amino acid
  Variant (23)..(23): Xaa in position 23 is Arg, Lys, Gln, His or Leu
  Variant (24)..(24): Xaa in position 24 is Leu, Ile or Phe
RXXXXXGPCSXXXXXXXXXYXXXX

SEQ ID NO: 48089 - protein, 42 aa, Artificial sequence; identical to SEQ ID NO: 2884
  Consensus
  Variant (1)..(1): Xaa in position 1 is Leu, Ile, Phe or Met
  Variant (2)..(2): Xaa in position 2 is any amino acid
  Variant (3)..(3): Xaa in position 3 is Ile, Val, Leu or Met
  Variant (4)..(4): Xaa in position 4 is Val, Ile or Leu
  Variant (7)..(7): Xaa in position 7 is Val, Ala or Thr
  Variant (9)..(9): Xaa in position 9 is Phe, Leu, Thr or Val
  Variant (10)..(10): Xaa in position 10 is Glu or Ala
  Variant (15)..(16): Xaa in position 15 to 16 is any amino acid
  Variant (17)..(17): Xaa in position 17 is any or no amino acid
  Variant (19)..(19): Xaa in position 19 is Trp or Tyr
  Variant (20)..(20): Xaa in position 20 is Lys or Arg
  Variant (22)..(22): Xaa in position 22 is Leu, Phe, Met or Tyr
  Variant (23)..(23): Xaa in position 23 is Ile, Val, Ala or Leu
  Variant (24)..(24): Xaa in position 24 is any amino acid
  Variant (25)..(25): Xaa in position 25 is Asp, Glu or Gln
  Variant (27)..(27): Xaa in position 27 is any amino acid
  Variant (28)..(28): Xaa in position 28 is Leu, Met, Ile, Val, Ala or Thr
  Variant (29)..(29): Xaa in position 29 is Asp, Asn or Ser
  Variant (30)..(33): Xaa in position 30 to 33 is any amino acid
  Variant (34)..(34): Xaa in position 34 is Ile, Val, Leu or Met
  Variant (35)..(36): Xaa in position 35 to 36 is any amino acid
  Variant (38)..(38): Xaa in position 38 is Leu, Ile, Met or Val
  Variant (39)..(40): Xaa in position 39 to 40 is any amino acid
  Variant (41)..(41): Xaa in position 41 is Ala, Ser, Gly, Val or Thr

SEQ ID NO: 48090 - protein, 65 aa, Artificial sequence; identical to SEQ ID NO: 2885
  Consensus
  Variant (2)..(2): Xaa in position 2 is any amino acid
  Variant (4)..(4): Xaa in position 4 is Asp, Tyr, Gln, Asn or Glu
  Variant (5)..(9): Xaa in position 5 to 9 is any amino acid
  Variant (10)..(10): Xaa in position 10 is Tyr, Phe or Leu
  Variant (11)..(12): Xaa in position 11 to 12 is any amino acid
  Variant (13)..(13): Xaa in position 13 is Asp or Glu
  Variant (14)..(15): Xaa in position 14 to 15 is any amino acid
  Variant (16)..(16): Xaa in position 16 is Ser, Ala, Thr or Cys
  Variant (17)..(17): Xaa in position 17 is Trp, Phe, Tyr, Leu or Val
  Variant (18)..(18): Xaa in position 18 is any amino acid
  Variant (19)..(19): Xaa in position 19 is Ala or Ser
  Variant (20)..(20): Xaa in position 20 is Ile or Val
  Variant (24)..(24): Xaa in position 24 is Thr, Ser or Asn
  Variant (25)..(25): Xaa in position 25 is Thr, Val, Ala, Ser or Ile
  Variant (26)..(26): Xaa in position 26 is Glu or Ala
  Variant (27)..(27): Xaa in position 27 is Ser, Asp or Asn
  Variant (29)..(29): Xaa in position 29 is any amino acid
  Variant (32)..(32): Xaa in position 32 is Glu, Gln, Phe or Met
  Variant (33)..(33): Xaa in position 33 is Leu, Met, Val, Ile or Phe
  Variant (34)..(34): Xaa in position 34 is Ala, Ser, Thr, Cys or Val
  Variant (36)..(36): Xaa in position 36 is Gly, Ala or Asn
  Variant (37)..(39): Xaa in position 37 to 39 is any amino acid
  Variant (40)..(40): Xaa in position 40 is Pro or Ala
  Variant (41)..(41): Xaa in position 41 is Val, Ile, Thr or Leu
  Variant (43)..(43): Xaa in position 43 is Phe, Met, Tyr or Ile
  Variant (46)..(46): Xaa in position 46 is any amino acid
  Variant (47)..(47): Xaa in position 47 is Thr, Ser or Arg
  Variant (48)..(48): Xaa in position 48 is any amino acid
  Variant (50)..(53): Xaa in position 50 to 53 is any amino acid
  Variant (54)..(54): Xaa in position 54 is Ala or Met
  Variant (55)..(55): Xaa in position 55 is any amino acid
  Variant (56)..(56): Xaa in position 56 is Asp, Asn or Glu
  Variant (57)..(57): Xaa in position 57 is Ala or Gly
  Variant (58)..(59): Xaa in position 58 to 59 is any amino acid
  Variant (60)..(60): Xaa in position 60 is Ala or Ser
  Variant (61)..(61): Xaa in position 61 is Ala, Ser, Val or Thr
  Variant (62)..(64): Xaa in position 62 to 64 is any amino acid
  Variant (65)..(65): Xaa in position 65 is His or Gln

SEQ ID NO: 48091 - protein, 71 aa, Artificial sequence; identical to SEQ ID NO: 2886
  Consensus
  Variant (1)..(1): Xaa in position 1 is Thr or Ser
  Variant (2)..(2): Xaa in position 2 is any amino acid
  Variant (5)..(7): Xaa in position 5 to 7 is any amino acid
  Variant (8)..(8): Xaa in position 8 is His or Phe
  Variant (9)..(9): Xaa in position 9 is Val, Ile, Leu or Ala
  Variant (10)..(10): Xaa in position 10 is Ile or Val
  Variant (11)..(11): Xaa in position 11 is Leu or Met
  Variant (14)..(14): Xaa in position 14 is Gly, Ser or Ala
  Variant (15)..(16): Xaa in position 15 to 16 is any amino acid
  Variant (17)..(22): Xaa in position 17 to 22 is any or no amino acid
  Variant (23)..(23): Xaa in position 23 is Pro, Thr or Ser
  Variant (25)..(25): Xaa in position 25 is Tyr, Phe or His
  Variant (26)..(29): Xaa in position 26 to 29 is any amino acid
  Variant (30)..(30): Xaa in position 30 is Val, Ile or Leu
  Variant (31)..(36): Xaa in position 31 to 36 is any amino acid
  Variant (37)..(37): Xaa in position 37 is Leu, Met, Ile, Tyr or His
  Variant (38)..(40): Xaa in position 38 to 40 is any amino acid
  Variant (41)..(51): Xaa in position 41 to 51 is any or no amino acid
  Variant (52)..(52): Xaa in position 52 is Leu, Ile or Val
  Variant (53)..(53): Xaa in position 53 is Met, Val, Ile or Leu
  Variant (54)..(54): Xaa in position 54 is Ile or Val
  Variant (56)..(56): Xaa in position 56 is Cys, Phe, Ala, Thr, Tyr or Val
  Variant (57)..(57): Xaa in position 57 is Ser, Asn or Ala
  Variant (59)..(59): Xaa in position 59 is Gly, Ala or Asp
  Variant (61)..(61): Xaa in position 61 is Ser or Cys
  Variant (62)..(62): Xaa in position 62 is any amino acid
  Variant (64)..(66): Xaa in position 64 to 66 is any amino acid
  Variant (67)..(67): Xaa in position 67 is Arg, Asn, Lys, Leu or Glu
  Variant (69)..(70): Xaa in position 69 to 70 is any amino acid
  Variant (71)..(71): Xaa in position 71 is Val or Ile

SEQ ID NO: 48092 - protein, 41 aa, Artificial sequence; identical to SEQ ID NO: 2887
  Consensus
  Variant (2)..(2): Xaa in position 2 is any amino acid
  Variant (4)..(4): Xaa in position 4 is Ile, Leu, Val, Ala or Met
  Variant (7)..(7): Xaa in position 7 is His, Asn, Phe or Tyr
  Variant (8)..(8): Xaa in position 8 is Leu or Ile
  Variant (9)..(10): Xaa in position 9 to 10 is any amino acid
  Variant (12)..(12): Xaa in position 12 is any amino acid
  Variant (14)..(19): Xaa in position 14 to 19 is any amino acid
  Variant (20)..(30): Xaa in position 20 to 30 is any or no amino acid
  Variant (32)..(32): Xaa in position 32 is any amino acid
  Variant (34)..(34): Xaa in position 34 is Ile or Val
  Variant (37)..(37): Xaa in position 37 is Ala, Pro, Gly, Lys, Ser or Glu
  Variant (39)..(39): Xaa in position 39 is Ile, Leu or Val
  Variant (40)..(40): Xaa in position 40 is any amino acid
  Variant (41)..(41): Xaa in position 41 is Trp, Ile, Leu or Phe

SEQ ID NO: 48093 - DNA, 1122 bp, Escherichia coli K12; identical to SEQ ID NO: 21814
  CDS (1)..(1122)

SEQ ID NO: 48094 - protein, 373 aa, Escherichia coli K12; identical to SEQ ID NO: 21815

SEQ ID NO: 48095 - DNA, 1122 bp, Yersinia pestis; identical to SEQ ID NO: 21816
  CDS (1)..(1122)

SEQ ID NO: 48096 - protein, 373 aa, Yersinia pestis; identical to SEQ ID NO: 21817

SEQ ID NO: 48097 - DNA, 1122 bp, Salmonella enterica subsp. enterica serovar Typhi; identical to SEQ ID NO: 21818
  CDS (1)..(1122)

SEQ ID NO: 48098 - protein, 373 aa, Salmonella enterica subsp. enterica serovar Typhi; identical to SEQ ID NO: 21819

SEQ ID NO: 48099 - DNA, 1128 bp, Vibrio cholerae; identical to SEQ ID NO: 21820
  CDS (1)..(1128)

SEQ ID NO: 48100 - protein, 375 aa, Vibrio cholerae; identical to SEQ ID NO: 21821

SEQ ID NO: 48101 - DNA, 1134 bp, Haemophilus influenzae; identical to SEQ ID NO: 21822
  CDS (1)..(1134)

SEQ ID NO: 48102 - protein, 377 aa, Haemophilus influenzae; identical to SEQ ID NO: 21823

SEQ ID NO: 48103 - DNA, 1122 bp, Erwinia herbicola; identical to SEQ ID NO: 21824
  CDS (1)..(1122)

SEQ ID NO: 48104 - protein, 373 aa, Erwinia herbicola; identical to SEQ ID NO: 21825

SEQ ID NO: 48105 - DNA, 1131 bp, Mannheimia succiniciproducens MBEL55E; identical to SEQ ID NO: 21826
  CDS (1)..(1131)

SEQ ID NO: 48106 - protein, 376 aa, Mannheimia succiniciproducens MBEL55E; identical to SEQ ID NO: 21827

SEQ ID NO: 48107 - DNA, 1122 bp, Erwinia carotovora; identical to SEQ ID NO: 21828
  CDS (1)..(1122)

SEQ ID NO: 48108 - protein, 373 aa, Erwinia carotovora; identical to SEQ ID NO: 21829

SEQ ID NO: 48109 - DNA, 1128 bp, Photobacterium profundum; identical to SEQ ID NO: 21830
  CDS (1)..(1128)

SEQ ID NO: 48110 - protein, 375 aa, Photobacterium profundum; identical to SEQ ID NO: 21831

SEQ ID NO: 48111 - DNA, 1128 bp, Vibrio vulnificus; identical to SEQ ID NO: 21832
  CDS (1)..(1128)

SEQ ID NO: 48112 - protein, 375 aa, Vibrio vulnificus; identical to SEQ ID NO: 21833

SEQ ID NO: 48113 - DNA, 1122 bp, Photorhabdus luminescens; identical to SEQ ID NO: 21834
  CDS (1)..(1122)

SEQ ID NO: 48114 - protein, 373 aa, Photorhabdus luminescens; identical to SEQ ID NO: 21835

SEQ ID NO: 48115 - DNA, 1134 bp, Candidatus Blochmannia floridanus; identical to SEQ ID NO: 21836
  CDS (1)..(1134)

SEQ ID NO: 48116 - protein, 377 aa, Candidatus Blochmannia floridanus; identical to SEQ ID NO: 21837

SEQ ID NO: 48117 - DNA, 1128 bp, Vibrio parahaemolyticus; identical to SEQ ID NO: 21838
  CDS (1)..(1128)

SEQ ID NO: 48118 - protein, 375 aa, Vibrio parahaemolyticus; identical to SEQ ID NO: 21839

SEQ ID NO: 48119 - DNA, 1140 bp, Shewanella oneidensis; identical to SEQ ID NO: 21840
  CDS (1)..(1140)

SEQ ID NO: 48120 - protein, 379 aa, Shewanella oneidensis; identical to SEQ ID NO: 21841

SEQ ID NO: 48121 - DNA, 1125 bp, Pasteurella multocida; identical to SEQ ID NO: 21842
  CDS (1)..(1125)

SEQ ID NO: 48122 - protein, 374 aa, Pasteurella multocida; identical to SEQ ID NO: 21843

SEQ ID NO: 48123 - DNA, 24 bp, Artificial sequence
  Primer sequence
atggttgctgaattgaccgcatta

SEQ ID NO: 48124 - DNA, 23 bp, Artificial sequence
  Primer sequence
ttactggcgattgtcattcgcct

SEQ ID NO: 48125 - protein, 370 aa, Artificial sequence; identical to SEQ ID NO: 21846
  Consensus
  Variant (2)..(4): Xaa in position 2 to 4 is any amino acid
  Variant (6)..(7): Xaa in position 6 to 7 is any amino acid
  Variant (10)..(11): Xaa in position 10 to 11 is any amino acid
  Variant (13)..(21): Xaa in position 13 to 21 is any amino acid
  Variant (24)..(24): Xaa in position 24 is any amino acid
  Variant (27)..(29): Xaa in position 27 to 29 is any amino acid
  Variant (31)..(32): Xaa in position 31 to 32 is any amino acid
  Variant (34)..(36): Xaa in position 34 to 36 is any amino acid
  Variant (39)..(39): Xaa in position 39 is any amino acid
  Variant (42)..(42): Xaa in position 42 is any amino acid
  Variant (44)..(44): Xaa in position 44 is any amino acid
  Variant (47)..(49): Xaa in position 47 to 49 is any amino acid
  Variant (51)..(52): Xaa in position 51 to 52 is any amino acid
  Variant (54)..(55): Xaa in position 54 to 55 is any amino acid
  Variant (58)..(60): Xaa in position 58 to 60 is any amino acid
  Variant (62)..(65): Xaa in position 62 to 65 is any amino acid
  Variant (67)..(68): Xaa in position 67 to 68 is any amino acid
  Variant (70)..(70): Xaa in position 70 is any amino acid
  Variant (74)..(74): Xaa in position 74 is any amino acid
  Variant (80)..(81): Xaa in position 80 to 81 is any amino acid
  Variant (83)..(85): Xaa in position 83 to 85 is any amino acid
  Variant (89)..(97): Xaa in position 89 to 97 is any amino acid
  Variant (99)..(100): Xaa in position 99 to 100 is any amino acid
  Variant (103)..(103): Xaa in position 103 is any amino acid
  Variant (105)..(106): Xaa in position 105 to 106 is any amino acid
  Variant (108)..(109): Xaa in position 108 to 109 is any amino acid
  Variant (111)..(116): Xaa in position 111 to 116 is any amino acid
  Variant (120)..(123): Xaa in position 120 to 123 is any amino acid
  Variant (125)..(127): Xaa in position 125 to 127 is any amino acid
  Variant (130)..(131): Xaa in position 130 to 131 is any amino acid
  Variant (133)..(145): Xaa in position 133 to 145 is any amino acid
  Variant (149)..(154): Xaa in position 149 to 154 is any amino acid
  Variant (156)..(161): Xaa in position 156 to 161 is any amino acid
  Variant (163)..(169): Xaa in position 163 to 169 is any amino acid
  Variant (172)..(172): Xaa in position 172 is any amino acid
  Variant (174)..(174): Xaa in position 174 is any amino acid
  Variant (176)..(182): Xaa in position 176 to 182 is any amino acid
  Variant (184)..(185): Xaa in position 184 to 185 is any amino acid
  Variant (187)..(187): Xaa in position 187 is any amino acid
  Variant (189)..(189): Xaa in position 189 is any amino acid
  Variant (191)..(191): Xaa in position 191 is any amino acid
  Variant (193)..(193): Xaa in position 193 is any amino acid
  Variant (198)..(199): Xaa in position 198 to 199 is any amino acid
  Variant (201)..(205): Xaa in position 201 to 205 is any amino acid
  Variant (207)..(208): Xaa in position 207 to 208 is any amino acid
  Variant (210)..(210): Xaa in position 210 is any amino acid
  Variant (212)..(214): Xaa in position 212 to 214 is any amino acid
  Variant (216)..(216): Xaa in position 216 is any amino acid
  Variant (219)..(222): Xaa in position 219 to 222 is any amino acid
  Variant (224)..(224): Xaa in position 224 is any amino acid
  Variant (226)..(228): Xaa in position 226 to 228 is any amino acid
  Variant (230)..(232): Xaa in position 230 to 232 is any amino acid
  Variant (236)..(244): Xaa in position 236 to 244 is any amino acid
  Variant (247)..(248): Xaa in position 247 to 248 is any amino acid
  Variant (250)..(252): Xaa in position 250 to 252 is any amino acid
  Variant (254)..(256): Xaa in position 254 to 256 is any amino acid
  Variant (259)..(260): Xaa in position 259 to 260 is any amino acid
  Variant (262)..(263): Xaa in position 262 to 263 is any amino acid
  Variant (265)..(266): Xaa in position 265 to 266 is any amino acid
  Variant (268)..(280): Xaa in position 268 to 280 is any amino acid
  Variant (284)..(286): Xaa in position 284 to 286 is any amino acid
  Variant (290)..(292): Xaa in position 290 to 292 is any amino acid
  Variant (297)..(297): Xaa in position 297 is any amino acid
  Variant (299)..(301): Xaa in position 299 to 301 is any amino acid
  Variant (304)..(304): Xaa in position 304 is any amino acid
  Variant (308)..(316): Xaa in position 308 to 316 is any amino acid
  Variant (318)..(338): Xaa in position 318 to 338 is any amino acid
  Variant (340)..(342): Xaa in position 340 to 342 is any amino acid
  Variant (344)..(348): Xaa in position 344 to 348 is any amino acid
  Variant (350)..(356): Xaa in position 350 to 356 is any amino acid
  Variant (358)..(360): Xaa in position 358 to 360 is any amino acid
  Variant (362)..(364): Xaa in position 362 to 364 is any amino acid
  Variant (366)..(369): Xaa in position 366 to 369 is any amino acid

SEQ ID NO: 48126 - protein, 370 aa, Artificial sequence; identical to SEQ ID NO: 21847
  Consensus
  Variant (2)..(3): Xaa in position 2 to 3 is any amino acid
  Variant (6)..(7): Xaa in position 6 to 7 is any amino acid
  Variant (10)..(10): Xaa in position 10 is any amino acid
  Variant (13)..(17): Xaa in position 13 to 17 is any amino acid
  Variant (21)..(21): Xaa in position 21 is any amino acid
  Variant (24)..(24): Xaa in position 24 is any amino acid
  Variant (27)..(28): Xaa in position 27 to 28 is any amino acid
  Variant (31)..(31): Xaa in position 31 is any amino acid
  Variant (34)..(36): Xaa in position 34 to 36 is any amino acid
  Variant (42)..(42): Xaa in position 42 is any amino acid
  Variant (44)..(44): Xaa in position 44 is any amino acid
  Variant (48)..(48): Xaa in position 48 is any amino acid
  Variant (51)..(52): Xaa in position 51 to 52 is any amino acid
  Variant (55)..(55): Xaa in position 55 is any amino acid
  Variant (58)..(60): Xaa in position 58 to 60 is any amino acid
  Variant (62)..(63): Xaa in position 62 to 63 is any amino acid
  Variant (65)..(65): Xaa in position 65 is any amino acid
  Variant (70)..(70): Xaa in position 70 is any amino acid
  Variant (74)..(74): Xaa in position 74 is any amino acid
  Variant (80)..(81): Xaa in position 80 to 81 is any amino acid
  Variant (83)..(85): Xaa in position 83 to 85 is any amino acid
  Variant (89)..(91): Xaa in position 89 to 91 is any amino acid
  Variant (93)..(97): Xaa in position 93 to 97 is any amino acid
  Variant (100)..(100): Xaa in position 100 is any amino acid
  Variant (103)..(103): Xaa in position 103 is any amino acid
  Variant (105)..(106): Xaa in position 105 to 106 is any amino acid
  Variant (108)..(108): Xaa in position 108 is any amino acid
  Variant (111)..(115): Xaa in position 111 to 115 is any amino acid
  Variant (120)..(120): Xaa in position 120 is any amino acid
  Variant (122)..(123): Xaa in position 122 to 123 is any amino acid
  Variant (125)..(127): Xaa in position 125 to 127 is any amino acid
  Variant (130)..(131): Xaa in position 130 to 131 is any amino acid
  Variant (133)..(135): Xaa in position 133 to 135 is any amino acid
  Variant (137)..(138): Xaa in position 137 to 138 is any amino acid
  Variant (141)..(141): Xaa in position 141 is any amino acid
  Variant (143)..(143): Xaa in position 143 is any amino acid
  Variant (145)..(145): Xaa in position 145 is any amino acid
  Variant (149)..(150): Xaa in position 149 to 150 is any amino acid
  Variant (152)..(154): Xaa in position 152 to 154 is any amino acid
  Variant (156)..(157): Xaa in position 156 to 157 is any amino acid
  Variant (159)..(161): Xaa in position 159 to 161 is any amino acid
  Variant (163)..(164): Xaa in position 163 to 164 is any amino acid
  Variant (169)..(169): Xaa in position 169 is any amino acid
  Variant (172)..(172): Xaa in position 172 is any amino acid
  Variant (174)..(174): Xaa in position 174 is any amino acid
  Variant (176)..(177): Xaa in position 176 to 177 is any amino acid
  Variant (180)..(180): Xaa in position 180 is any amino acid
  Variant (184)..(185): Xaa in position 184 to 185 is any amino acid
  Variant (187)..(187): Xaa in position 187 is any amino acid
  Variant (191)..(191): Xaa in position 191 is any amino acid
  Variant (201)..(205): Xaa in position 201 to 205 is any amino acid
  Variant (207)..(207): Xaa in position 207 is any amino acid
  Variant (212)..(212): Xaa in position 212 is any amino acid
  Variant (214)..(214): Xaa in position 214 is any amino acid
  Variant (219)..(222): Xaa in position 219 to 222 is any amino acid
  Variant (226)..(226): Xaa in position 226 is any amino acid
  Variant (228)..(228): Xaa in position 228 is any amino acid
  Variant (230)..(232): Xaa in position 230 to 232 is any amino acid
  Variant (236)..(241): Xaa in position 236 to 241 is any amino acid
  Variant (243)..(243): Xaa in position 243 is any amino acid
  Variant (247)..(248): Xaa in position 247 to 248 is any amino acid
  Variant (250)..(251): Xaa in position 250 to 251 is any amino acid
  Variant (259)..(260): Xaa in position 259 to 260 is any amino acid
  Variant (263)..(263): Xaa in position 263 is any amino acid
  Variant (265)..(265): Xaa in position 265 is any amino acid
  Variant (268)..(269): Xaa in position 268 to 269 is any amino acid
  Variant (271)..(273): Xaa in position 271 to 273 is any amino acid
  Variant (275)..(276): Xaa in position 275 to 276 is any amino acid
  Variant (279)..(279): Xaa in position 279 is any amino acid
  Variant (292)..(292): Xaa in position 292 is any amino acid
  Variant (300)..(301): Xaa in position 300 to 301 is any amino acid
  Variant (308)..(312): Xaa in position 308 to 312 is any amino acid
  Variant (314)..(316): Xaa in position 314 to 316 is any amino acid
  Variant (318)..(326): Xaa in position 318 to 326 is any amino acid
  Variant (328)..(334): Xaa in position 328 to 334 is any amino acid
  Variant (337)..(338): Xaa in position 337 to 338 is any amino acid
  Variant (340)..(342): Xaa in position 340 to 342 is any amino acid
  Variant (344)..(345): Xaa in position 344 to 345 is any amino acid
  Variant (347)..(348): Xaa in position 347 to 348 is any amino acid
  Variant (352)..(352): Xaa in position 352 is any amino acid
  Variant (354)..(356): Xaa in position 354 to 356 is any amino acid
  Variant (358)..(359): Xaa in position 358 to 359 is any amino acid
  Variant (362)..(363): Xaa in position 362 to 363 is any amino acid
  Variant (366)..(366): Xaa in position 366 is any amino acid

SEQ ID NO: 48127 - protein, 62 aa, Artificial sequence; identical to SEQ ID NO: 21848
  Consensus
  Variant (2)..(3): Xaa in position 2 to 3 is any amino acid
  Variant (4)..(4): Xaa in position 4 is Leu or Ile
  Variant (6)..(7): Xaa in position 6 to 7 is any amino acid
  Variant (10)..(10): Xaa in position 10 is any amino acid
  Variant (11)..(11): Xaa in position 11 is Val, Leu or Ile
  Variant (13)..(13): Xaa in position 13 is Lys, Gln or Arg
  Variant (14)..(14): Xaa in position 14 is any amino acid
  Variant (15)..(15): Xaa in position 15 is Leu or Met
  Variant (16)..(16): Xaa in position 16 is Leu, Val or Ile
  Variant (17)..(17): Xaa in position 17 is any amino acid
  Variant (18)..(18): Xaa in position 18 is Leu or Val
  Variant (19)..(19): Xaa in position 19 is Leu or Phe
  Variant (20)..(20): Xaa in position 20 is Ala, Ser or Arg
  Variant (21)..(21): Xaa in position 21 is Lys, Gln or Arg
  Variant (24)..(24): Xaa in position 24 is any amino acid
  Variant (27)..(27): Xaa in position 27 is any amino acid
  Variant (28)..(28): Xaa in position 28 is Gln, Glu or Lys
  Variant (29)..(29): Xaa in position 29 is Val or Ile
  Variant (31)..(31): Xaa in position 31 is any amino acid
  Variant (32)..(32): Xaa in position 32 is Val or Ile
  Variant (34)..(34): Xaa in position 34 is Ser or His
  Variant (35)..(36): Xaa in position 35 to 36 is any amino acid
  Variant (39)..(39): Xaa in position 39 is any amino acid
  Variant (42)..(42): Xaa in position 42 is Ala, Val or Asp
  Variant (44)..(44): Xaa in position 44 is Asp, Glu or Gln
  Variant (47)..(48): Xaa in position 47 to 48 is any amino acid
  Variant (49)..(49): Xaa in position 49 is Met or Ile
  Variant (51)..(52): Xaa in position 51 to 52 is any amino acid
  Variant (54)..(54): Xaa in position 54 is Arg or Lys
  Variant (55)..(55): Xaa in position 55 is any amino acid
  Variant (58)..(60): Xaa in position 58 to 60 is any amino acid
  Variant (62)..(62): Xaa in position 62 is Val or Ile

SEQ ID NO: 48128 - protein, 23 aa, Artificial sequence
  Consensus
  Variant (2)..(2): Xaa in position 2 is Ile, Val or Leu
  Variant (3)..(3): Xaa in position 3 is Glu or Arg
  Variant (5)..(5): Xaa in position 5 is Ile, Val or Leu
  Variant (9)..(9): Xaa in position 9 is any amino acid
  Variant (15)..(16): Xaa in position 15 to 16 is any amino acid
  Variant (18)..(18): Xaa in position 18 is Asn, Lys or His
  Variant (19)..(20): Xaa in position 19 to 20 is any amino acid
LXXDXLRRXMRESYXXEXXXGFK

SEQ ID NO: 48129 - protein, 52 aa, Artificial sequence; identical to SEQ ID NO: 21850
  Consensus
  Variant (1)..(1): Xaa in position 1 is Val, Ile or Leu
  Variant (3)..(3): Xaa in position 3 is Ile, Val or Leu
  Variant (4)..(4): Xaa in position 4 is Val, Ile or Leu
  Variant (7)..(7): Xaa in position 7 is any amino acid
  Variant (9)..(9): Xaa in position 9 is Gln, Lys or Arg
  Variant (10)..(10): Xaa in position 10 is Leu or Met
  Variant (12)..(12): Xaa in position 12 is any amino acid
  Variant (13)..(13): Xaa in position 13 is Leu or Phe
  Variant (15)..(15): Xaa in position 15 is any amino acid
  Variant (16)..(16): Xaa in position 16 is Arg, Lys or Gln
  Variant (17)..(17): Xaa in position 17 is any amino acid
  Variant (18)..(18): Xaa in position 18 is Leu or Phe
  Variant (19)..(19): Xaa in position 19 is any amino acid
  Variant (20)..(20): Xaa in position 20 is Leu or Ala
  Variant (24)..(24): Xaa in position 24 is any amino acid
  Variant (25)..(25): Xaa in position 25 is Val or Ile
  Variant (26)..(27): Xaa in position 26 to 27 is any amino acid
  Variant (29)..(29): Xaa in position 29 is Glu, Gly or Asp
  Variant (30)..(31): Xaa in position 30 to 31 is any amino acid
  Variant (34)..(35): Xaa in position 34 to 35 is any amino acid
  Variant (37)..(38): Xaa in position 37 to 38 is any amino acid
  Variant (39)..(39): Xaa in position 39 is Ile or Leu
  Variant (40)..(40): Xaa in position 40 is Leu, Val or Phe
  Variant (41)..(42): Xaa in position 41 to 42 is any amino acid
  Variant (43)..(43): Xaa in position 43 is Ala, Val or Thr
  Variant (44)..(44): Xaa in position 44 is Gly, Asp or Asn
  Variant (45)..(45): Xaa in position 45 is Met, Leu, Val or Ala
  Variant (46)..(46): Xaa in position 46 is Val, Ile or Leu
  Variant (47)..(47): Xaa in position 47 is Ile, Leu, Val or Phe
  Variant (48)..(48): Xaa in position 48 is Val, Ile or Leu
  Variant (49)..(49): Xaa in position 49 is Ser, Thr or Cys

SEQ ID NO: 48130 - protein, 34 aa, Artificial sequence; identical to SEQ ID NO: 21851
  Consensus
  Variant (1)..(1): Xaa in position 1 is Ile, Leu or Val
  Variant (2)..(2): Xaa in position 2 is Leu, Ile or Val
  Variant (3)..(3): Xaa in position 3 is any amino acid
  Variant (6)..(6): Xaa in position 6 is Thr, Ala or Ser
  Variant (8)..(8): Xaa in position 8 is Val, Ile or Leu
  Variant (10)..(11): Xaa in position 10 to 11 is any amino acid
  Variant (12)..(12): Xaa in position 12 is Pro or Ser
  Variant (13)..(13): Xaa in position 13 is Leu or Met
  Variant (14)..(15): Xaa in position 14 to 15 is any amino acid
  Variant (16)..(16): Xaa in position 16 is Met or Ile
  Variant (18)..(18): Xaa in position 18 is any amino acid
  Variant (19)..(19): Xaa in position 19 is Val, Ala or Ile
  Variant (21)..(21): Xaa in position 21 is any amino acid
  Variant (23)..(23): Xaa in position 23 is Pro or Ala
  Variant (25)..(25): Xaa in position 25 is Leu, Val or Ile
  Variant (27)..(27): Xaa in position 27 is Leu or Phe
  Variant (32)..(32): Xaa in position 32 is Gly or Ser
  Variant (33)..(33): Xaa in position 33 is Pro or Ala

SEQ ID NO: 48131 - protein, 30 aa, Artificial sequence; identical to SEQ ID NO: 21852
  Consensus
  Variant (2)..(2): Xaa in position 2 is Leu or Met
  Variant (3)..(3): Xaa in position 3 is Ala, Ile or Val
  Variant (5)..(5): Xaa in position 5 is Gln or Lys
  Variant (7)..(8): Xaa in position 7 to 8 is Val, Ile or Leu
  Variant (9)..(9): Xaa in position 9 is any amino acid
  Variant (11)..(11): Xaa in position 11 is Asp or His
  Variant (14)..(17): Xaa in position 14 to 17 is any amino acid
  Variant (19)..(19): Xaa in position 19 is Gln or Glu
  Variant (21)..(21): Xaa in position 21 is Leu or Phe
  Variant (22)..(22): Xaa in position 22 is Leu, Ile or Val
  Variant (23)..(23): Xaa in position 23 is Glu, Gln or Thr
  Variant (25)..(25): Xaa in position 25 is Ile, Phe or Leu
  Variant (26)..(26): Xaa in position 26 is any amino acid
  Variant (27)..(27): Xaa in position 27 is Ile, Val, Leu or Met

SEQ ID NO: 48132 - protein, 23 aa, Artificial sequence
  Consensus
  Variant (3)..(4): Xaa in position 3 to 4 is any amino acid
  Variant (6)..(6): Xaa in position 6 is any amino acid
  Variant (7)..(7): Xaa in position 7 is Phe, Leu or Tyr
  Variant (8)..(8): Xaa in position 8 is Ile or Val
  Variant (10)..(10): Xaa in position 10 is Ala or Ser
  Variant (11)..(11): Xaa in position 11 is Leu or Met
  Variant (12)..(12): Xaa in position 12 is Arg or Cys
  Variant (15)..(15): Xaa in position 15 is Ala, Thr or Ser
  Variant (16)..(16): Xaa in position 16 is Thr, Ser or Ile
  Variant (18)..(18): Xaa in position 18 is Ala or Val
  Variant (19)..(19): Xaa in position 19 is any amino acid
  Variant (21)..(21): Xaa in position 21 is any amino acid
  Variant (22)..(22): Xaa in position 22 is His or Asn
HDXXMXXXQXXXHFXXFXXGXXL

SEQ ID NO: 48133 - protein, 37 aa, Artificial sequence; identical to SEQ ID NO: 21854
  Consensus
  Variant (4)..(4): Xaa in position 4 is Ile, Met, Leu or Phe
  Variant (5)..(5): Xaa in position 5 is Tyr or Phe
  Variant (6)..(6): Xaa in position 6 is Arg, Gln or Cys
  Variant (10)..(10): Xaa in position 10 is Ala or Ile
  Variant (11)..(11): Xaa in position 11 is Met, Leu, Val or Ile
  Variant (12)..(12): Xaa in position 12 is Val, Ile or Leu
  Variant (17)..(17): Xaa in position 17 is Ala, Gly or Thr
  Variant (19)..(21): Xaa in position 19 to 21 is any amino acid
  Variant (24)..(24): Xaa in position 24 is Ala or Gly
  Variant (28)..(28): Xaa in position 28 is Met, Leu or Phe
  Variant (29)..(29): Xaa in position 29 is Ser, Asp or Ala
  Variant (30)..(32): Xaa in position 30 to 32 is any amino acid
  Variant (33)..(33): Xaa in position 33 is Asn or Ser
  Variant (34)..(34): Xaa in position 34 is Leu, Ile, Val or Gln
  Variant (35)..(35): Xaa in position 35 is any amino acid
  Variant (36)..(36): Xaa in position 36 is Leu, Met, Val or Ala

SEQ ID NO: 48134 - DNA, 2374 bp, Escherichia coli K12; identical to SEQ ID NO: 1805
  CDS (86)..(2281)

SEQ ID NO: 48135 - protein, 731 aa, Escherichia coli K12; identical to SEQ ID NO: 1806

SEQ ID NO: 48136 - DNA, 2961 bp, Hafnia alvei; identical to SEQ ID NO: 1807
  CDS (185)..(2404)

SEQ ID NO: 48137 - protein, 739 aa, Hafnia alvei; identical to SEQ ID NO: 1808

SEQ ID NO: 48138 - DNA, 4341 bp, Escherichia coli; identical to SEQ ID NO: 1809
  CDS (660)..(2858)

SEQ ID NO: 48139 - protein, 732 aa, Escherichia coli; identical to SEQ ID NO: 1810

SEQ ID NO: 48140 - DNA, 1850 bp, Bacillus subtilis; identical to SEQ ID NO: 1811
  CDS (312)..(1784)

SEQ ID NO: 48141 - protein, 490 aa, Bacillus subtilis; identical to SEQ ID NO: 1812

SEQ ID NO: 48142 - DNA, 3091 bp, Lactobacillus sp; identical to SEQ ID NO: 1813
  CDS (572)..(2767)

SEQ ID NO: 48143 - protein, 731 aa, Lactobacillus sp; identical to SEQ ID NO: 1814

SEQ ID NO: 48144 - DNA, 1449 bp, Bacillus halodurans; identical to SEQ ID NO: 1815
  CDS (1)..(1449)

SEQ ID NO: 48145 - protein, 482 aa, Bacillus halodurans; identical to SEQ ID NO: 1816

SEQ ID NO: 48146 - DNA, 2196 bp, Sinorhizobium meliloti; identical to SEQ ID NO: 1817
  CDS (1)..(2196)

SEQ ID NO: 48147 - protein, 731 aa, Sinorhizobium meliloti; identical to SEQ ID NO: 1818

SEQ ID NO: 48148 - DNA, 1380 bp, Listeria innocua; identical to SEQ ID NO: 1819
  CDS (1)..(1380)

SEQ ID NO: 48149 - protein, 459 aa, Listeria innocua; identical to SEQ ID NO: 1820

SEQ ID NO: 48150 - DNA, 2307 bp, Yersinia pestis; identical to SEQ ID NO: 1821
  CDS (1)..(2307)

SEQ ID NO: 48151 - protein, 768 aa, Yersinia pestis; identical to SEQ ID NO: 1822

SEQ ID NO: 48152 - DNA, 2145 bp, Salmonella enterica subsp. enterica serovar Typhi; identical to SEQ ID NO: 1823
  CDS (1)..(2145)

SEQ ID NO: 48153 - protein, 714 aa, Salmonella enterica subsp. enterica serovar Typhi; identical to SEQ ID NO: 1824

SEQ ID NO: 48154 - DNA, 1467 bp, Nostoc sp. PCC 7120; identical to SEQ ID NO: 1825
  CDS (1)..(1467)

SEQ ID NO: 48155 - protein, 488 aa, Nostoc sp. PCC 7120; identical to SEQ ID NO: 1826

SEQ ID NO: 48156 - DNA, 2163 bp, Yersinia pestis; identical to SEQ ID NO: 1827
  CDS (1)..(2163)

SEQ ID NO: 48157 - protein, 720 aa, Yersinia pestis; identical to SEQ ID NO: 1828

SEQ ID NO: 48158 - DNA, 2271 bp, Salmonella enterica subsp. enterica serovar Typhi; identical to SEQ ID NO: 1829
  CDS (1)..(2271)

SEQ ID NO: 48159 - protein, 756 aa, Salmonella enterica subsp. enterica serovar Typhi; identical to SEQ ID NO: 1830

SEQ ID NO: 48160 - DNA, 2148 bp, Escherichia coli; identical to SEQ ID NO: 1831
  CDS (1)..(2148)

SEQ ID NO: 48161 - protein, 715 aa, Escherichia coli; identical to SEQ ID NO: 1832

SEQ ID NO: 48162 - DNA, 2835 bp, Escherichia coli; identical to SEQ ID NO: 1833
  CDS (571)..(2712)

SEQ ID NO: 48163 - protein, 713 aa, Escherichia coli; identical to SEQ ID NO: 1834

SEQ ID NO: 48164 - DNA, 1446 bp, Clostridium acetobutylicum; identical to SEQ ID NO: 1835
  CDS (1)..(1446)

SEQ ID NO: 48165 - protein, 481 aa, Clostridium acetobutylicum; identical to SEQ ID NO: 1836

SEQ ID NO: 48166 - DNA, 1464 bp, Clostridium acetobutylicum; identical to SEQ ID NO: 1837
  CDS (1)..(1464)

SEQ ID NO: 48167 - protein, 487 aa, Clostridium acetobutylicum; identical to SEQ ID NO: 1838

SEQ ID NO: 48168 - DNA, 2256 bp, Pseudomonas aeruginosa; identical to SEQ ID NO: 1839
  CDS (1)..(2256)

SEQ ID NO: 48169 - protein, 751 aa, Pseudomonas aeruginosa; identical to SEQ ID NO: 1840

SEQ ID NO: 48170 - DNA, 2853 bp, Mycobacterium leprae; identical to SEQ ID NO: 1841
  CDS (1)..(2853)

SEQ ID NO: 48171 - protein, 950 aa, Mycobacterium leprae; identical to SEQ ID NO: 1842

SEQ ID NO: 48172 - DNA, 2202 bp, Vibrio cholerae; identical to SEQ ID NO: 1843
  CDS (1)..(2202)

SEQ ID NO: 48173 - protein, 733 aa, Vibrio cholerae; identical to SEQ ID NO: 1844

SEQ ID NO: 48174 - DNA, 2163 bp, Vibrio cholerae; identical to SEQ ID NO: 1845
  CDS (1)..(2163)

SEQ ID NO: 48175 - protein, 720 aa, Vibrio cholerae; identical to SEQ ID NO: 1846

SEQ ID NO: 48176 - DNA, 2163 bp, Haemophilus influenzae; identical to SEQ ID NO: 1847
  CDS (1)..(2163)

SEQ ID NO: 48177 - protein, 720 aa, Haemophilus influenzae; identical to SEQ ID NO: 1848

SEQ ID NO: 48178 - DNA, 2844 bp, Mycobacterium tuberculosis; identical to SEQ ID NO: 1849
  CDS (1)..(2844)

SEQ ID NO: 48179 - protein, 947 aa, Mycobacterium tuberculosis; identical to SEQ ID NO: 1850

SEQ ID NO: 48180 - DNA, 1476 bp, Streptococcus pneumoniae; identical to SEQ ID NO: 1851
  CDS (1)..(1476)

SEQ ID NO: 48181 - protein, 491 aa, Streptococcus pneumoniae; identical to SEQ ID NO: 1852

SEQ ID NO: 48182 - DNA, 1476 bp, Bacillus halodurans; identical to SEQ ID NO: 1853
  CDS (1)..(1476)

SEQ ID NO: 48183 - protein, 491 aa, Bacillus halodurans; identical to SEQ ID NO: 1854

SEQ ID NO: 48184 - DNA, 2349 bp, Sinorhizobium meliloti; identical to SEQ ID NO: 1855
  CDS (1)..(2349)

SEQ ID NO: 48185 - protein, 782 aa, Sinorhizobium meliloti; identical to SEQ ID NO: 1856

SEQ ID NO: 48186 - DNA, 1476 bp, Streptococcus pneumoniae; identical to SEQ ID NO: 1857
  CDS (1)..(1476)

SEQ ID NO: 48187 - protein, 491 aa, Streptococcus pneumoniae; identical to SEQ ID NO: 1858

SEQ ID NO: 48188 - DNA, 2271 bp, Escherichia coli; identical to SEQ ID NO: 1859
  CDS (1)..(2271)

SEQ ID NO: 48189 - protein, 756 aa, Escherichia coli; identical to SEQ ID NO: 1860

SEQ ID NO: 48190 - DNA, 1443 bp, Bacillus subtilis; identical to SEQ ID NO: 1861
  CDS (1)..(1443)

SEQ ID NO: 48191 - protein, 480 aa, Bacillus subtilis; identical to SEQ ID NO: 1862

SEQ ID NO: 48192 - DNA, 1452 bp, Synechocystis sp; identical to SEQ ID NO: 1863
  CDS (1)..(1452)

SEQ ID NO: 48193 - protein, 483 aa, Synechocystis sp; identical to SEQ ID NO: 1864

SEQ ID NO: 48194 - DNA, 2307 bp, Yersinia pseudotuberculosis IP 32953; identical to SEQ ID NO: 1865
  CDS (1)..(2307)

SEQ ID NO: 48195 - protein, 768 aa, Yersinia pseudotuberculosis IP 32953; identical to SEQ ID NO: 1866

SEQ ID NO: 48196 - DNA, 1467 bp, Symbiobacterium thermophilum; identical to SEQ ID NO: 1867
  CDS (1)..(1467)

SEQ ID NO: 48197 - protein, 488 aa, Symbiobacterium thermophilum; identical to SEQ ID NO: 1868

SEQ ID NO: 48198 - DNA, 1410 bp, Symbiobacterium thermophilum; identical to SEQ ID NO: 1869
  CDS (1)..(1410)

SEQ ID NO: 48199 - protein, 469 aa, Symbiobacterium thermophilum; identical to SEQ ID NO: 1870

SEQ ID NO: 48200 - DNA, 2154 bp, Erwinia carotovora; identical to SEQ ID NO: 1871
  CDS (1)..(2154)

SEQ ID NO: 48201 - protein, 717 aa, Erwinia carotovora; identical to SEQ ID NO: 1872

SEQ ID NO: 48202 - DNA, 2790 bp, Acinetobacter sp; identical to SEQ ID NO: 1873
  CDS (1)..(2790)

SEQ ID NO: 48203 - protein, 929 aa, Acinetobacter sp; identical to SEQ ID NO: 1874

SEQ ID NO: 48204 - DNA, 1482 bp, Bacillus thuringiensis; identical to SEQ ID NO: 1875
  CDS (1)..(1482)

SEQ ID NO: 48205 - protein, 493 aa, Bacillus thuringiensis; identical to SEQ ID NO: 1876

SEQ ID NO: 48206 - DNA, 1422 bp, Bacillus thuringiensis; identical to SEQ ID NO: 1877
  CDS (1)..(1422)

SEQ ID NO: 48207 - protein, 473 aa, Bacillus thuringiensis; identical to SEQ ID NO: 1878

SEQ ID NO: 48208 - DNA, 2358 bp, Rhodopseudomonas palustris; identical to SEQ ID NO: 1879
  CDS (1)..(2358)

SEQ ID NO: 48209 - protein, 785 aa, Rhodopseudomonas palustris; identical to SEQ ID NO: 1880

SEQ ID NO: 48210 - DNA, 2837 bp, Shigella boydii; identical to SEQ ID NO: 1881
  CDS (165)..(2435)

SEQ ID NO: 48211 - protein, 756 aa, Shigella boydii; identical to SEQ ID NO: 1882

SEQ ID NO: 48212 - DNA, 1380 bp, Listeria monocytogenes; identical to SEQ ID NO: 1883
  CDS (1)..(1380)

SEQ ID NO: 48213 - protein, 459 aa, Listeria monocytogenes; identical to SEQ ID NO: 1884

SEQ ID NO: 48214 - DNA, 1482 bp, Bacillus cereus; identical to SEQ ID NO: 1885
  CDS (1)..(1482)

SEQ ID NO: 48215 - protein, 493 aa, Bacillus cereus; identical to SEQ ID NO: 1886

SEQ ID NO: 48216 - DNA, 1422 bp, Bacillus cereus; identical to SEQ ID NO: 1887
  CDS (1)..(1422)

SEQ ID NO: 48217 - protein, 473 aa, Bacillus cereus; identical to SEQ ID NO: 1888

SEQ ID NO: 48218 - DNA, 1458 bp, Mycobacterium paratuberculosis; identical to SEQ ID NO: 1889
  CDS (1)..(1458)

SEQ ID NO: 48219 - protein, 485 aa, Mycobacterium paratuberculosis; identical to SEQ ID NO: 1890

SEQ ID NO: 48220 - DNA, 2853 bp, Mycobacterium paratuberculosis; identical to SEQ ID NO: 1891
  CDS (1)..(2853)

SEQ ID NO: 48221 - protein, 950 aa, Mycobacterium paratuberculosis; identical to SEQ ID NO: 1892

SEQ ID NO: 48222 - DNA, 2100 bp, Lactobacillus johnsonii; identical to SEQ ID NO: 1893
  CDS (1)..(2100)

SEQ ID NO: 48223 - protein, 699 aa, Lactobacillus johnsonii; identical to SEQ ID NO: 1894

SEQ ID NO: 48224 - DNA, 3625 bp, Vibrio parahaemolyticus; identical to SEQ ID NO: 1895
  CDS (1451)..(3625)

SEQ ID NO: 48225 - protein, 724 aa, Vibrio parahaemolyticus; identical to SEQ ID NO: 1896

SEQ ID NO: 48226 - DNA, 2142 bp, Shigella flexneri; identical to SEQ ID NO: 1897
  CDS (1)..(2142)

SEQ ID NO: 48227 - protein, 713 aa, Shigella flexneri; identical to SEQ ID NO: 1898

SEQ ID NO: 48228 - DNA, 2181 bp, Vibrio vulnificus; identical to SEQ ID NO: 1899
  CDS (1)..(2181)

SEQ ID NO: 48229 - protein, 726 aa, Vibrio vulnificus; identical to SEQ ID NO: 1900

SEQ ID NO: 48230 - DNA, 2307 bp, Photorhabdus luminescens; identical to SEQ ID NO: 1901
  CDS (1)..(2307)

SEQ ID NO: 48231 - protein, 768 aa, Photorhabdus luminescens; identical to SEQ ID NO: 1902

SEQ ID NO: 48232 - DNA, 1404 bp, Gloeobacter violaceus; identical to SEQ ID NO: 1903
  CDS (1)..(1404)

SEQ ID NO: 48233 - protein, 467 aa, Gloeobacter violaceus; identical to SEQ ID NO: 1904

SEQ ID NO: 48234 - DNA, 2259 bp, Chromobacterium violaceum; identical to SEQ ID NO: 1905
  CDS (1)..(2259)

SEQ ID NO: 48235 - protein, 752 aa, Chromobacterium violaceum; identical to SEQ ID NO: 1906

SEQ ID NO: 48236 - DNA, 1251 bp, Chromobacterium violaceum; identical to SEQ ID NO: 1907
  CDS (1)..(1251)

SEQ ID NO: 48237 - protein, 416 aa, Chromobacterium violaceum; identical to SEQ ID NO: 1908

SEQ ID NO: 48238 - DNA, 2352 bp, Fusobacterium nucleatum subsp; identical to SEQ ID NO: 1909
  CDS (1)..(2352)

SEQ ID NO: 48239 - protein, 783 aa, Fusobacterium nucleatum subsp; identical to SEQ ID NO: 1910

SEQ ID NO: 48240 - DNA, 2196 bp, Shigella flexneri; identical to SEQ ID NO: 1911
  CDS (1)..(2196)

SEQ ID NO: 48241 - protein, 731 aa, Shigella flexneri; identical to SEQ ID NO: 1912

SEQ ID NO: 48242 - DNA, 2271 bp, Bordetella pertussis; identical to SEQ ID NO: 1913
  CDS (1)..(2271)

SEQ ID NO: 48243 - protein, 756 aa, Bordetella pertussis; identical to SEQ ID NO: 1914

SEQ ID NO: 48244 - DNA, 2271 bp, Bordetella parapertussis; identical to SEQ ID NO: 1915
  CDS (1)..(2271)

SEQ ID NO: 48245 - protein, 756 aa, Bordetella parapertussis; identical to SEQ ID NO: 1916

SEQ ID NO: 48246 - DNA, 1422 bp, Bacillus cereus; identical to SEQ ID NO: 1917
  CDS (1)..(1422)

SEQ ID NO: 48247 - protein, 473 aa, Bacillus cereus; identical to SEQ ID NO: 1918

SEQ ID NO: 48248 - DNA, 1422 bp, Bacillus anthracis; identical to SEQ ID NO: 1919
  CDS (1)..(1422)

SEQ ID NO: 48249 - protein, 473 aa, Bacillus anthracis; identical to SEQ ID NO: 1920

SEQ ID NO: 48250 - DNA, 2271 bp, Shigella flexneri; identical to SEQ ID NO: 1921
  CDS (1)..(2271)

SEQ ID NO: 48251 - protein, 756 aa, Shigella flexneri; identical to SEQ ID NO: 1922

SEQ ID NO: 48252 - DNA, 2136 bp, Shigella flexneri; identical to SEQ ID NO: 1923
  CDS (1)..(2136)

SEQ ID NO: 48253 - protein, 711 aa, Shigella flexneri; identical to SEQ ID NO: 1924

SEQ ID NO: 48254 - DNA, 2127 bp, Escherichia coli; identical to SEQ ID NO: 1925
  CDS (1)..(2127)

SEQ ID NO: 48255 - protein, 708 aa, Escherichia coli; identical to SEQ ID NO: 1926

SEQ ID NO: 48256 - DNA, 1563 bp, Oryza sativa; identical to SEQ ID NO: 1927
  CDS (1)..(1563)

SEQ ID NO: 48257 - protein, 520 aa, Oryza sativa; identical to SEQ ID NO: 1928

SEQ ID NO: 48258 - DNA, 2181 bp, Vibrio parahaemolyticus; identical to SEQ ID NO: 1929
  CDS (1)..(2181)

SEQ ID NO: 48259 - protein, 726 aa, Vibrio parahaemolyticus; identical to SEQ ID NO: 1930

SEQ ID NO: 48260 - DNA, 4026 bp, Vibrio parahaemolyticus; identical to SEQ ID NO: 1931
  CDS (1779)..(3914)

SEQ ID NO: 48261 - protein, 711 aa, Vibrio parahaemolyticus; identical to SEQ ID NO: 1932

SEQ ID NO: 48262 - DNA, 1461 bp, Clostridium tetani; identical to SEQ ID NO: 1933
  CDS (1)..(1461)

SEQ ID NO: 48263 - protein, 486 aa, Clostridium tetani; identical to SEQ ID NO: 1934

SEQ ID NO: 48264 - DNA, 1416 bp, Clostridium tetani; identical to SEQ ID NO: 1935
  CDS (1)..(1416)

SEQ ID NO: 48265 - protein, 471 aa, Clostridium tetani; identical to SEQ ID NO: 1936

SEQ ID NO: 48266 - DNA, 2766 bp, Bradyrhizobium japonicum; identical to SEQ ID NO: 1937
  CDS (1)..(2766)

SEQ ID NO: 48267 - protein, 921 aa, Bradyrhizobium japonicum; identical to SEQ ID NO: 1938

SEQ ID NO: 48268 - DNA, 2517 bp, Bradyrhizobium japonicum; identical to SEQ ID NO: 1939
  CDS (1)..(2517)

SEQ ID NO: 48269 - protein, 838 aa, Bradyrhizobium japonicum; identical to SEQ ID NO: 1940

SEQ ID NO: 48270 - DNA, 2181 bp, Vibrio vulnificus; identical to SEQ ID NO: 1941
  CDS (1)..(2181)

SEQ ID NO: 48271 - protein, 726 aa, Vibrio vulnificus; identical to SEQ ID NO: 1942

SEQ ID NO: 48272 - DNA, 2109 bp, Vibrio vulnificus; identical to SEQ ID NO: 1943
  CDS (1)..(2109)

SEQ ID NO: 48273 - protein, 702 aa, Vibrio vulnificus; identical to SEQ ID NO: 1944

SEQ ID NO: 48274 - DNA, 2163 bp, Shewanella oneidensis; identical to SEQ ID NO: 1945
  CDS (1)..(2163)

SEQ ID NO: 48275 - protein, 720 aa, Shewanella oneidensis; identical to SEQ ID NO: 1946

SEQ ID NO: 48276 - DNA, 1419 bp, Oceanobacillus iheyensis; identical to SEQ ID NO: 1947
  CDS (1)..(1419)

SEQ ID NO: 48277 - protein, 472 aa, Oceanobacillus iheyensis; identical to SEQ ID NO: 1948

SEQ ID NO: 48278 - DNA, 2154 bp, Escherichia coli O6; identical to SEQ ID NO: 1949
  CDS (1)..(2154)

SEQ ID NO: 48279 - protein, 717 aa, Escherichia coli O6; identical to SEQ ID NO: 1950

SEQ ID NO: 48280 - DNA, 2271 bp, Escherichia coli O6; identical to SEQ ID NO: 1951
  CDS (1)..(2271)

SEQ ID NO: 48281 - protein, 756 aa, Escherichia coli O6; identical to SEQ ID NO: 1952

SEQ ID NO: 48282 - DNA, 2370 bp, Escherichia coli O6; identical to SEQ ID NO: 1953
  CDS (1)..(2370)

SEQ ID NO: 48283 - protein, 789 aa, Escherichia coli O6; identical to SEQ ID NO: 1954

SEQ ID NO: 48284 - DNA, 2136 bp, Escherichia coli O6; identical to SEQ ID NO: 1955
  CDS (1)..(2136)

SEQ ID NO: 48285 - protein, 711 aa, Escherichia coli O6; identical to SEQ ID NO: 1956

SEQ ID NO: 48286 - DNA, 2208 bp, Escherichia coli O6; identical to SEQ ID NO: 1957
  CDS (1)..(2208)

SEQ ID NO: 48287 - protein, 735 aa, Escherichia coli O6; identical to SEQ ID NO: 1958

SEQ ID NO: 48288 - DNA, 2142 bp, Escherichia coli O6; identical to SEQ ID NO: 1959
  CDS (1)..(2142)

SEQ ID NO: 48289 - protein, 713 aa, Escherichia coli O6; identical to SEQ ID NO: 1960

SEQ ID NO: 48290 - DNA, 1488 bp, Thermoanaerobacter tengcongensis; identical to SEQ ID NO: 1961
  CDS (1)..(1488)

SEQ ID NO: 48291 - protein, 495 aa, Thermoanaerobacter tengcongensis; identical to SEQ ID NO: 1962

SEQ ID NO: 48292 - DNA, 1419 bp, Thermoanaerobacter tengcongensis; identical to SEQ ID NO: 1963
  CDS (1)..(1419)

SEQ ID NO: 48293 - protein, 472 aa, Thermoanaerobacter tengcongensis; identical to SEQ ID NO: 1964

SEQ ID NO: 48294 - DNA, 2352 bp, Fusobacterium nucleatum; identical to SEQ ID NO: 1965
  CDS (1)..(2352)

SEQ ID NO: 48295 - protein, 783 aa, Fusobacterium nucleatum; identical to SEQ ID NO: 1966

SEQ ID NO: 48296 - DNA, 1431 bp, Clostridium perfringens; identical to SEQ ID NO: 1967
  CDS (1)..(1431)

SEQ ID NO: 48297 - protein, 476 aa, Clostridium perfringens; identical to SEQ ID NO: 1968

SEQ ID NO: 48298 - DNA, 1455 bp, Clostridium perfringens; identical to SEQ ID NO: 1969
  CDS (1)..(1455)

SEQ ID NO: 48299 - protein, 484 aa, Clostridium perfringens; identical to SEQ ID NO: 1970

SEQ ID NO: 48300 - DNA, 2280 bp, Ralstonia solanacearum; identical to SEQ ID NO: 1971
  CDS (1)..(2280)

SEQ ID NO: 48301 - protein, 759 aa, Ralstonia solanacearum; identical to SEQ ID NO: 1972

SEQ ID NO: 48302 - DNA, 2271 bp, Salmonella typhimurium; identical to SEQ ID NO: 1973
  CDS (1)..(2271)

SEQ ID NO: 48303 - protein, 756 aa, Salmonella typhimurium; identical to SEQ ID NO: 1974

SEQ ID NO: 48304 - DNA, 2136 bp, Salmonella typhimurium; identical to SEQ ID NO: 1975
  CDS (1)..(2136)

SEQ ID NO: 48305 - protein, 711 aa, Salmonella typhimurium; identical to SEQ ID NO: 1976

SEQ ID NO: 48306 - DNA, 2199 bp, Salmonella typhimurium; identical to SEQ ID NO: 1977
  CDS (1)..(2199)

SEQ ID NO: 48307 - protein, 732 aa, Salmonella typhimurium; identical to SEQ ID NO: 1978

SEQ ID NO: 48308 - DNA, 2142 bp, Salmonella typhimurium; identical to SEQ ID NO: 1979
  CDS (1)..(2142)

SEQ ID NO: 48309 - protein, 713 aa, Salmonella typhimurium; identical to SEQ ID NO: 1980

SEQ ID NO: 48310 - DNA, 2136 bp, Vibrio vulnificus; identical to SEQ ID NO: 1981
  CDS (1)..(2136)

SEQ ID NO: 48311 - protein, 711 aa, Vibrio vulnificus; identical to SEQ ID NO: 1982

SEQ ID NO: 48312 - DNA, 2163 bp, Pasteurella multocida; identical to SEQ ID NO: 1983
  CDS (1)..(2163)

SEQ ID NO: 48313 - protein, 720 aa, Pasteurella multocida; identical to SEQ ID NO: 1984

SEQ ID NO: 48314 - DNA, 2139 bp, Moritella japonica; identical to SEQ ID NO: 1985
  CDS (1)..(2139)

SEQ ID NO: 48315 - protein, 712 aa, Moritella japonica; identical to SEQ ID NO: 1986

SEQ ID NO: 48316 - DNA, 1479 bp, Streptomyces coelicolor; identical to SEQ ID NO: 1987
  CDS (1)..(1479)

SEQ ID NO: 48317 - protein, 492 aa, Streptomyces coelicolor; identical to SEQ ID NO: 1988

SEQ ID NO: 48318 - DNA, 2130 bp, Eikenella corrodens; identical to SEQ ID NO: 1989
  CDS (1)..(2130)

SEQ ID NO: 48319 - protein, 709 aa, Eikenella corrodens; identical to SEQ ID NO: 1990

SEQ ID NO: 48320 - DNA, 2271 bp, Escherichia coli; identical to SEQ ID NO: 1859
  CDS (4)..(2271)

SEQ ID NO: 48321 - protein, 755 aa, Escherichia coli; identical to SEQ ID NO: 1992

SEQ ID NO: 48322 - DNA, 2196 bp, Lactobacillus sp; identical to SEQ ID NO: 1993
  CDS (1)..(2196)

SEQ ID NO: 48323 - protein, 731 aa, Lactobacillus sp; identical to SEQ ID NO: 1814

SEQ ID NO: 48324 - DNA, 1482 bp, Bacillus anthracis; identical to SEQ ID NO: 1995
  CDS (1)..(1482)

SEQ ID NO: 48325 - protein, 493 aa, Bacillus anthracis; identical to SEQ ID NO: 1996

SEQ ID NO: 48326 - DNA, 1383 bp, Bacillus cereus; identical to SEQ ID NO: 1997
  CDS (1)..(1383)

SEQ ID NO: 48327 - protein, 460 aa, Bacillus cereus; identical to SEQ ID NO: 1998

SEQ ID NO: 48328 - DNA, 20 bp, Artificial sequence
  Primer sequence
atggggcagggttttccacc

SEQ ID NO: 48329 - DNA, 25 bp, Artificial sequence
  Primer sequence
ttacttcaacacataaccgtacaac

SEQ ID NO: 48330 - protein, 642 aa, Artificial sequence; identical to SEQ ID NO: 2902
  Consensus
  Variant (2)..(5): Xaa in position 2 to 5 is any amino acid
  Variant (7)..(58): Xaa in position 7 to 58 is any amino acid
  Variant (60)..(61): Xaa in position 60 to 61 is any amino acid
  Variant (63)..(66): Xaa in position 63 to 66 is any amino acid
  Variant (68)..(71): Xaa in position 68 to 71 is any amino acid
  Variant (73)..(76): Xaa in position 73 to 76 is any amino acid
  Variant (78)..(90): Xaa in position 78 to 90 is any amino acid
  Variant (92)..(92): Xaa in position 92 is any amino acid
  Variant (94)..(113): Xaa in position 94 to 113 is any amino acid
  Variant (116)..(116): Xaa in position 116 is any amino acid
  Variant (120)..(131): Xaa in position 120 to 131 is any amino acid
  Variant (133)..(188): Xaa in position 133 to 188 is any amino acid
  Variant (191)..(191): Xaa in position 191 is any amino acid
  Variant (193)..(215): Xaa in position 193 to 215 is any amino acid
  Variant (217)..(217): Xaa in position 217 is any amino acid
  Variant (219)..(224): Xaa in position 219 to 224 is any amino acid
  Variant (226)..(290): Xaa in position 226 to 290 is any amino acid
  Variant (292)..(292): Xaa in position 292 is any amino acid
  Variant (295)..(300): Xaa in position 295 to 300 is any amino acid
  Variant (302)..(302): Xaa in position 302 is any amino acid
  Variant (304)..(305): Xaa in position 304 to 305 is any amino acid
  Variant (307)..(333): Xaa in position 307 to 333 is any amino acid
  Variant (337)..(337): Xaa in position 337 is any amino acid
  Variant (339)..(341): Xaa in position 339 to 341 is any amino acid
  Variant (343)..(355): Xaa in position 343 to 355 is any amino acid
  Variant (357)..(370): Xaa in position 357 to 370 is any amino acid
  Variant (372)..(457): Xaa in position 372 to 457 is any amino acid
  Variant (460)..(460): Xaa in position 460 is any amino acid
  Variant (462)..(494): Xaa in position 462 to 494 is any amino acid
  Variant (496)..(497): Xaa in position 496 to 497 is any amino acid
  Variant (499)..(505): Xaa in position 499 to 505 is any amino acid
  Variant (507)..(520): Xaa in position 507 to 520 is any amino acid
  Variant (522)..(524): Xaa in position 522 to 524 is any amino acid
  Variant (526)..(620): Xaa in position 526 to 620 is any amino acid
  Variant (622)..(624): Xaa in position 622 to 624 is any amino acid
  Variant (626)..(630): Xaa in position 626 to 630 is any amino acid
  Variant (635)..(640): Xaa in position 635 to 640 is any amino acid

SEQ ID NO: 48331 - protein, 101 aa, Artificial sequence; identical to SEQ ID NO: 1322
  Consensus
  Variant (2)..(23): Xaa in position 2 to 23 is any amino acid
  Variant (24)..(30): Xaa in position 24 to 30 is any or no amino acid
  Variant (32)..(32): Xaa in position 32 is any amino acid
  Variant (37)..(39): Xaa in position 37 to 39 is any amino acid
  Variant (41)..(55): Xaa in position 41 to 55 is any amino acid
  Variant (56)..(57): Xaa in position 56 to 57 is any or no amino acid
  Variant (59)..(62): Xaa in position 59 to 62 is any amino acid
  Variant (64)..(64): Xaa in position 64 is any amino acid
  Variant (67)..(70): Xaa in position 67 to 70 is any amino acid
  Variant (72)..(72): Xaa in position 72 is any amino acid
  Variant (75)..(77): Xaa in position 75 to 77 is any amino acid
  Variant (79)..(85): Xaa in position 79 to 85 is any amino acid
  Variant (87)..(90): Xaa in position 87 to 90 is any amino acid
  Variant (92)..(93): Xaa in position 92 to 93 is any amino acid
  Variant (97)..(97): Xaa in position 97 is any amino acid
  Variant (100)..(100): Xaa in position 100 is any amino acid

SEQ ID NO: 48332 - protein, 76 aa, Artificial sequence; identical to SEQ ID NO: 2897
  Consensus
  Variant (1)..(1): Xaa in position 1 is Leu, Met or Val
  Variant (2)..(2): Xaa in position 2 is Gly or Asp
  Variant (3)..(3): Xaa in position 3 is Asp, Ser, Asn, Gln or Gly
  Variant (4)..(4): Xaa in position 4 is Leu or Arg
  Variant (5)..(6): Xaa in position 5 to 6 is any amino acid
  Variant (7)..(7): Xaa in position 7 is His or Pro
  Variant (8)..(8): Xaa in position 8 is any amino acid
  Variant (9)..(9): Xaa in position 9 is Gly, Ser, Glu or Asp
  Variant (10)..(13): Xaa in position 10 to 13 is any amino acid
  Variant (14)..(14): Xaa in position 14 is Ala or Ser
  Variant (15)..(15): Xaa in position 15 is Gln, Glu or Met
  Variant (16)..(18): Xaa in position 16 to 18 is any amino acid
  Variant (19)..(19): Xaa in position 19 is Ala or Ser
  Variant (20)..(21): Xaa in position 20 to 21 is any amino acid
  Variant (22)..(22): Xaa in position 22 is Phe, Tyr, Trp or Val
  Variant (23)..(23): Xaa in position 23 is any amino acid
  Variant (24)..(24): Xaa in position 24 is Ala, Ser or Val
  Variant (25)..(27): Xaa in position 25 to 27 is any amino acid
  Variant (28)..(28): Xaa in position 28 is Tyr, Phe or Trp
  Variant (29)..(30): Xaa in position 29 to 30 is any amino acid
  Variant (31)..(31): Xaa in position 31 is Val, Thr, Leu or Ile
  Variant (32)..(32): Xaa in position 32 is any amino acid
  Variant (34)..(34): Xaa in position 34 is Thr or Ser
  Variant (35)..(35): Xaa in position 35 is Ser or Thr
  Variant (36)..(36): Xaa in position 36 is any amino acid
  Variant (37)..(37): Xaa in position 37 is Ser, Ala or Gly
  Variant (38)..(38): Xaa in position 38 is Asn, Ile, Val or Ser
  Variant (39)..(51): Xaa in position 39 to 51 is any amino acid
  Variant (52)..(52): Xaa in position 52 is Val, Ile, Leu or Ala
  Variant (53)..(53): Xaa in position 53 is Leu, Ile, Val or Met
  Variant (54)..(55): Xaa in position 54 to 55 is any amino acid
  Variant (57)..(57): Xaa in position 57 is Asn or Asp
  Variant (58)..(58): Xaa in position 58 is any amino acid
  Variant (60)..(60): Xaa in position 60 is Lys, Gln or Arg
  Variant (61)..(61): Xaa in position 61 is Ser or Ala
  Variant (62)..(65): Xaa in position 62 to 65 is any amino acid
  Variant (66)..(66): Xaa in position 66 is any or no amino acid
  Variant (67)..(67): Xaa in position 67 is Leu, Ile, Met or Val
  Variant (68)..(73): Xaa in position 68 to 73 is any amino acid
  Variant (74)..(74): Xaa in position 74 is Pro or Ala
  Variant (75)..(75): Xaa in position 75 is any amino acid
  Variant (76)..(76): Xaa in position 76 is Tyr, Phe or Trp

SEQ ID NO: 48333 - protein, 39 aa, Artificial sequence; identical to SEQ ID NO: 2898
  Consensus
  Variant (1)..(1): Xaa in position 1 is Val, Ile, Leu, Phe or Thr
  Variant (2)..(2): Xaa in position 2 is Ile, Val, Leu, Phe or Ala
  Variant (3)..(5): Xaa in position 3 to 5 is any amino acid
  Variant (6)..(6): Xaa in position 6 is Thr, Asn or Ser
  Variant (7)..(7): Xaa in position 7 is Tyr, Phe or Pro
  Variant (8)..(8): Xaa in position 8 is Asp, Tyr, Phe or His
  Variant (10)..(12): Xaa in position 10 to 12 is any amino acid
  Variant (13)..(13): Xaa in position 13 is Asn, Asp or Ser
  Variant (14)..(25): Xaa in position 14 to 25 is any amino acid
  Variant (26)..(29): Xaa in position 26 to 29 is any or no amino acid
  Variant (30)..(30): Xaa in position 30 is Ile, Val, Leu or Phe
  Variant (31)..(31): Xaa in position 31 is any amino acid
  Variant (32)..(32): Xaa in position 32 is Phe, Val, Trp or Ile
  Variant (34)..(34): Xaa in position 34 is Glu, Ser or Cys
  Variant (36)..(36): Xaa in position 36 is Trp or His
  Variant (37)..(37): Xaa in position 37 is any amino acid
  Variant (38)..(38): Xaa in position 38 is Ala, Gly, Pro or Val
  Variant (39)..(39): Xaa in position 39 is Tyr, His or Phe

SEQ ID NO: 48334 - protein, 84 aa, Artificial sequence; identical to SEQ ID NO: 2899
  Consensus
  Variant (1)..(1): Xaa in position 1 is Ser or Leu
  Variant (2)..(2): Xaa in position 2 is any amino acid
  Variant (5)..(7): Xaa in position 5 to 7 is any amino acid
  Variant (8)..(8): Xaa in position 8 is Ala, Gly or Ser
  Variant (9)..(9): Xaa in position 9 is Leu, Phe, Met or Ile
  Variant (10)..(10): Xaa in position 10 is Ser, Thr, Arg or Glu
  Variant (11)..(11): Xaa in position 11 is Gln or Met
  Variant (12)..(12): Xaa in position 12 is any amino acid
  Variant (13)..(13): Xaa in position 13 is Ser or Ala
  Variant (14)..(14): Xaa in position 14 is any amino acid
  Variant (15)..(15): Xaa in position 15 is Ile, Leu, Met, Val or Phe
  Variant (16)..(16): Xaa in position 16 is His, Asn, Leu or Ile
  Variant (17)..(25): Xaa in position 17 to 25 is any amino acid
  Variant (26)..(33): Xaa in position 26 to 33 is any or no amino acid
  Variant (34)..(34): Xaa in position 34 is Phe, Val, Leu, Met or Ile
  Variant (35)..(42): Xaa in position 35 to 42 is any amino acid
  Variant (43)..(43): Xaa in position 43 is Ser or Thr
  Variant (44)..(44): Xaa in position 44 is Thr or Ser
  Variant (46)..(47): Xaa in position 46 to 47 is any amino acid
  Variant (48)..(48): Xaa in position 48 is Tyr, Gln or Val
  Variant (49)..(49): Xaa in position 49 is any amino acid
  Variant (50)..(50): Xaa in position 50 is Leu, Ile, Phe or Met
  Variant (51)..(51): Xaa in position 51 is any amino acid
  Variant (52)..(52): Xaa in position 52 is Ala or Ser
  Variant (53)..(53): Xaa in position 53 is Ser, Ala or Thr
  Variant (54)..(54): Xaa in position 54 is any amino acid
  Variant (55)..(55): Xaa in position 55 is Asp or Glu
  Variant (56)..(63): Xaa in position 56 to 63 is any amino acid
  Variant (64)..(65): Xaa in position 64 to 65 is any or no amino acid
  Variant (66)..(66): Xaa in position 66 is Gly, Ala, Lys or Asn
  Variant (67)..(73): Xaa in position 67 to 73 is any amino acid
  Variant (74)..(74): Xaa in position 74 is Ile, Val, Leu, Tyr or Phe
  Variant (75)..(80): Xaa in position 75 to 80 is any amino acid
  Variant (81)..(81): Xaa in position 81 is Arg or Lys
  Variant (82)..(83): Xaa in position 82 to 83 is any amino acid
  Variant (84)..(84): Xaa in position 84 is Ile, Leu, Val, Met, Phe, Ala or Thr

SEQ ID NO: 48335 - protein, 31 aa, Artificial sequence; identical to SEQ ID NO: 2900
  Consensus
  Variant (1)..(1): Xaa in position 1 is Val, Ile, Leu, Cys or Arg
  Variant (2)..(5): Xaa in position 2 to 5 is any amino acid
  Variant (6)..(9): Xaa in position 6 to 9 is any or no amino acid
  Variant (10)..(10): Xaa in position 10 is Gly, Thr, Asp or Asn
  Variant (11)..(11): Xaa in position 11 is any amino acid
  Variant (12)..(12): Xaa in position 12 is Ile, Val or Thr
  Variant (13)..(13): Xaa in position 13 is any amino acid
  Variant (14)..(14): Xaa in position 14 is Ala, Gly, Thr or Leu
  Variant (15)..(16): Xaa in position 15 to 16 is any amino acid
  Variant (17)..(17): Xaa in position 17 is Val, Ile, Ala, Leu or Phe
  Variant (18)..(19): Xaa in position 18 to 19 is any amino acid
  Variant (24)..(24): Xaa in position 24 is Ile, Val or Phe
  Variant (25)..(26): Xaa in position 25 to 26 is any amino acid
  Variant (27)..(27): Xaa in position 27 is Val, Leu, Ile, Phe or Met
  Variant (28)..(29): Xaa in position 28 to 29 is any amino acid
  Variant (31)..(31): Xaa in position 31 is Glu or Gln

SEQ ID NO: 48336 - DNA, 609 bp, Escherichia coli
  CDS (1)..(609)
atgcgattgttgcgtttttgttgcgtattagatcacttaatttgctttacatctcccgtaaacacttttctgcgatacaatgcctttacgttatgtaacggagagttcggcatgtcacaccccgcgttaacgcaactgcgtgcgctgcgctattgtaaagagatccctgccctggatccgcaactgctcgactggctgttgctggaggattccatgacaaaacgttttgaacagcagggaaaaacggtaagcgtgacgatgatccgcgaagggtttgtcgagcagaatgaaatccccgaagaactgccgctgctgccgaaagagtctcgttactggttacgtgaaattttgttatgtgccgatggtgaaccgtggcttgccggtcgtaccgtcgttcctgtgtcaacgttaagcgggccggagctggcgttacaaaaattgggtaaaacgccgttaggacgctatctgttcacatcatcgacattaacccgggactttattgagataggccgtgatgccgggctgtgggggcgacgttcccgcctgcgattaagcggtaaaccgctgttgctaacagaactgtttttaccggcgtcaccgttgtactaa

SEQ ID NO: 48337 - protein, 202 aa, Escherichia coli
MRLLRFCCVLDHLICFTSPVNTFLRYNAFTLCNGEFGMSHPALTQLRALRYCKEIPALDPQLLDWLLLEDSMTKRFEQQGKTVSVTMIREGFVEQNEIPEELPLLPKESRYWLREILLCADGEPWLAGRTVVPVSTLSGPELALQKLGKTPLGRYLFTSSTLTRDFIEIGRDAGLWGRRSRLRLSGKPLLLTELFLPASPLY

SEQ ID NO: 48338 - DNA, 552 bp, Vibrio cholerae O1 biovar eltor str. N16961
  CDS (1)..(552): transl_table=11
ttgaataatagtatgaatcaattaacttcgctctatttagccgcactgaatcgcgtcacttggcaacagcctgatgacattgaatttccagcccctttagctcagcaatggctactcgaacaaggctctctttcgcgccgaatggcgacgcagtgtgagcatctgaccgtagatttattaagtaaccaaatcatgctggcggacaccctgagctatgatgaaactcaactgctcgcctctgaagagtatcttctacgccaagtgattatttatggcgaccaacaaccttgggtatttggccatactttgatccctcgctcatccatgcacaatcagccgtttgatttcacccaacaagggaaaattccactaggtctcaccgtatttagtgcggataatgttaagcgagatgcactgcaagttggctgggtagagacagaactcggacgactattagcccgtcgctctcgcttatggatgaacaacaaacccatgttagtgacggagctgtttctcgccacatccccgatttactctaaggagagagtgtaa

SEQ ID NO: 48339 - protein, 183 aa, Vibrio cholerae O1 biovar eltor str. N16961
MNNSMNQLTSLYLAALNRVTWQQPDDIEFPAPLAQQWLLEQGSLSRRMATQCEHLTVDLLSNQIMLADTLSYDETQLLASEEYLLRQVIIYGDQQPWVFGHTLIPRSSMHNQPFDFTQQGKIPLGLTVFSADNVKRDALQVGWVETELGRLLARRSRLWMNNKPMLVTELFLATSPIYSKERV

SEQ ID NO: 48340 - DNA, 513 bp, Pasteurella multocida subsp. multocida str. Pm70
  CDS (1)..(513): transl_table=11
atgtctaattattcccaattgttacaaaatgccacttggcagccttcaacggatatgcaattacctctgtcgatttcttcttggctagagctatccacatctttaactacacagctaaaacaagcttttggcgaagtgaatgtatgtgtcttagccgagtcatggataacgacgcttaacgagaatgaacgtcaattttttccaaaacaagcatgtccgtgttggtgtcgagaagtgatcttaaaaagccaagatataccattaatttttgcgcgtactttaattccggcttctttattgacgcagcatagtgaattacaacaattgggcaatcgtgcgttaggtgagtggctgtttatgcaatctgatcgtataaggcaaaaattagaattaacgcatgataaaaacaccgcactttatgcccgccgtgccttaatgagtattggcgctgagaatatgatggttgctgaattatttctaacaccacaaatttttacgagagtagtcaaatga

SEQ ID NO: 48341 - protein, 170 aa, Pasteurella multocida subsp. multocida str. Pm70
MSNYSQLLQNATWQPSTDMQLPLSISSWLELSTSLTTQLKQAFGEVNVCVLAESWITTLNENERQFFPKQACPCWCREVILKSQDIPLIFARTLIPASLLTQHSELQQLGNRALGEWLFMQSDRIRQKLELTHDKNTALYARRALMSIGAENMMVAELFLTPQIFTRVVK

SEQ ID NO: 48342 - DNA, 537 bp, Pseudomonas aeruginosa PAO1
  CDS (1)..(537): transl_table=11
atgcccagcaatgcgctctggcttcgcgccgaccaactgtccagcgtctcccccgccgtcctcgactggctgttcgacgaggggtcgctgacccggcgcctgaccgccctggccgacggcgcgttccgcgtcgaacccctgctggaaggctggcagaccctgcgcgacgacgaatgccaggggctcgacgtccctaccggcagtagcggctgggtccgcgaggtctacctgcatggccacgaccgtccctgggtgttcgcccgcagcgtggcggcgcgcagcgccctggaaggctcgggcttcgacctggcgctgctcggcacccgctcgctgggcgagttgctgttcagcgacagcgccttcgagcgcgggcccatcgaagtctgccgctatccggcggccggtctgcccgccgaggtccgcgccgagggtctctggggccgtcgctcacggttttcccgcggcgcgctcggggtgctggtggcggaggtgtacctaccgcgcctgtgggaccaggcgggaatcgccgacgtataa

SEQ ID NO: 48343 - protein, 178 aa, Pseudomonas aeruginosa PAO1
MPSNALWLRADQLSSVSPAVLDWLFDEGSLTRRLTALADGAFRVEPLLEGWQTLRDDECQGLDVPTGSSGWVREVYLHGHDRPWVFARSVAARSALEGSGFDLALLGTRSLGELLFSDSAFERGPIEVCRYPAAGLPAEVRAEGLWGRRSRFSRGALGVLVAEVYLPRLWDQAGIADV

SEQ ID NO: 48344 - DNA, 498 bp, Escherichia coli O157:H7
  CDS (1)..(498): transl_table=11
atgtcacaccccgcgttaacgcaactgcgtgcgctgcgctattgtaaagagatccctgccctggagccgcaactgctcgactggctgttgctggaagattccatgacaaaacgttttgaacagcagggaaaaacggtgagcgtgacgatgatccgcgaagggtttgtcgagcagaatgaaatccccgaagaactgccgctgctgccgaaagagtctcgttactggttacgtgaaattttgttatgtgccgatggtgaaccgtggcttgccggtcgtaccgtcgttcctgtgtcaacgttaagcgggccggagctggcgttacaaaaattgggtaaaacgccgttaggacgctatctgttcacatcatcgacattaacccgggactttattgagataggccgtgatgccggactgtgggggcgacgttcccgcttgcgattaagcggtaaaccgctgttgctaacagaactgtttttaccgacgtcaccgttgtactaa

SEQ ID NO: 48345 - protein, 165 aa, Escherichia coli O157:H7
MSHPALTQLRALRYCKEIPALEPQLLDWLLLEDSMTKRFEQQGKTVSVTMIREGFVEQNEIPEELPLLPKESRYWLREILLCADGEPWLAGRTVVPVSTLSGPELALQKLGKTPLGRYLFTSSTLTRDFIEIGRDAGLWGRRSRLRLSGKPLLLTELFLPTSPLY

SEQ ID NO: 48346 - DNA, 525 bp, Yersinia pestis CO92
  CDS (1)..(525): transl_table=11
atgtttatcggcgatgcatcaattttaaaacctatccaatggtgtgctaccgagcaccctgaacttcctgcagacatcgcagactggctgatggagctgggttcgatgactcgacgctttgagcagcattgccagcgtgttcatgtcgaaccgcaacgtgaatgctttattacgcgtgatgcgctaggggaagaggctgaacatttgcccgttagtcaacgctattggttacgggaaattgtcttgtttggtgacaatgtgccttggttactggggcgcacggttatcccggaggagacactgtctggtccggatagggcgctggtggatttaggtacattaccgctagggcgttacttattcagtggtgatgccctaacccgggactatattcacgtcgggcggcaggataatctatgggccaggcggtctttgctacgcctttcaggcaatccactgttattgactgaggtttttttaccggcatcgccgctttatacccattgtgactctatacccaagtga

SEQ ID NO: 48347 - protein, 174 aa, Yersinia pestis CO92
MFIGDASILKPIQWCATEHPELPADIADWLMELGSMTRRFEQHCQRVHVEPQRECFITRDALGEEAEHLPVSQRYWLREIVLFGDNVPWLLGRTVIPEETLSGPDRALVDLGTLPLGRYLFSGDALTRDYIHVGRQDNLWARRSLLRLSGNPLLLTEVFLPASPLYTHCDSIPK

SEQ ID NO: 48348 - DNA, 498 bp, Salmonella typhimurium LT2
  CDS (1)..(498): transl_table=11
atgtcacaccctgcgttaacgcaactgcgtgcgctgcgctattttgatgcgattcctgcgcttgaaccccatttgctggactggctgttgctggaagattctatgactaaacgttttgagcagcagggaaagcgggtaagcgtgacgctgattcgggaagcgtttgtcggccaaagtgaggtcgaggaagcatcaggtttactgccatccgagtcccgctactggttacgtgagatactgctttgcgctgacggcgagccctggcttgccggacgtaccgtggtaccggaatccacgctgtgcggacctgaacaggtcttacaacatctgggtaaaaccccgcttggacgttatctatttacatcatcgacactgacccgcgattttattgaaattggacgcgatgcaacgctgtgggggcgccgctctcgactgcggttgagcggaaaaccgctgttgcttaccgagctttttttacctgcatcgccgctgtactga

SEQ ID NO: 48349 - protein, 165 aa, Salmonella typhimurium LT2
MSHPALTQLRALRYFDAIPALEPHLLDWLLLEDSMTKRFEQQGKRVSVTLIREAFVGQSEVEEASGLLPSESRYWLREILLCADGEPWLAGRTVVPESTLCGPEQVLQHLGKTPLGRYLFTSSTLTRDFIEIGRDATLWGRRSRLRLSGKPLLLTELFLPASPLY

SEQ ID NO: 48350 - DNA, 531 bp, Ralstonia solanacearum GMI1000
  CDS (1)..(531): transl_table=11
atggccgtgtatggccagcattgggcgcgctgggcggtcggcgtgaattcactgacggcacggctgcgtgcggcatcgtcttcgtttcgtgtcgaactgctcggccaggggcgagccctgccgctgcgcgacgagtggcggtgcctgggcttgccccgcgccgccgagacgctggcgcgcgaggtgctgctgatctgcgacgaggcgccggtggtctacgcgcatacgatcgtgcatccgcgcagcgtggcggcggactggccgttcctgagggcgctcggcactcagccgctcgggcatgcgctgttcgccgacccgcgcgttgcccggggggccttcgaattcgccctgctggatggccggcatccgctggtcaaacgggcccacgcagcgctgggcggcacgccgccgggcgccatggcgcggctgccggcgcgccgttcagtgttccgccgcggcgttagcgcgatgctggtgacggaagtgttcttgccggcactggcggtgttcgacccgccgcccatgatgtga

SEQ ID NO: 48351 - protein, 176 aa, Ralstonia solanacearum GMI1000
MAVYGQHWARWAVGVNSLTARLRAASSSFRVELLGQGRALPLRDEWRCLGLPRAAETLAREVLLICDEAPVVYAHTIVHPRSVAADWPFLRALGTQPLGHALFADPRVARGAFEFALLDGRHPLVKRAHAALGGTPPGAMARLPARRSVFRRGVSAMLVTEVFLPALAVFDPPPMM

SEQ ID NO: 48352 - DNA, 567 bp, Yersinia pestis KIM
  CDS (1)..(567): transl_table=11
ttgcgggggtggctgttttatcctcggcagggagcgtttcgcatgtttatcggcgatgcatcaattttaaaacctatccaatggtgtgctaccgagcaccctgaacttcctgcagacatcgcagactggctgatggagctgggttcgatgactcgacgctttgagcagcattgccagcgtgttcatgtcgaaccgcaacgtgaatgctttattacgcgtgatgcgctaggggaagaggctgaacatttgcccgttagtcaacgctattggttacgggaaattgtcttgtttggtgacaatgtgccttggttactggggcgcacggttatcccggaggagacactgtctggtccggatagggcgctggtggatttaggtacattaccgctagggcgttacttattcagtggtgatgccctaacccgggactatattcacgtcgggcggcaggataatctatgggccaggcggtctttgctacgcctttcaggcaatccactgttattgactgaggtttttttaccggcatcgccgctttatacccattgtgactctatacccaagtga

SEQ ID NO: 48353 - protein, 188 aa, Yersinia pestis KIM
MRGWLFYPRQGAFRMFIGDASILKPIQWCATEHPELPADIADWLMELGSMTRRFEQHCQRVHVEPQRECFITRDALGEEAEHLPVSQRYWLREIVLFGDNVPWLLGRTVIPEETLSGPDRALVDLGTLPLGRYLFSGDALTRDYIHVGRQDNLWARRSLLRLSGNPLLLTEVFLPASPLYTHCDSIPK

SEQ ID NO: 48354 - DNA, 498 bp, Shigella flexneri 2a str. 301
  CDS (1)..(498): transl_table=11
atgtcacaccccgcgttaacgcaactgcgtgcgctgcgctattttaaagagatccctgccctggatccgcaactgctcgactggctgttgctggaggattccatgacaaaacgttttgaacagcagggaaaaacggtgagtgtgacgatgatccgcgaggggtttgtcgagcagaatgaaatccccgaagaactgccgctgctgccgaaagagtctcgttactggttacgtgaaattttgttatgtgccgatggtgaaccgtggcttgccggtcgtaccgtcgttcctgtatcaacattaagcgggccggaactagcgttacaaaaattgggtaaaacgccgttaggacgctatctgttcacatcatcgacactaacccgggattttatcgagataggccgtgatgccggactgtgggggcgacgttcccgcctgcgattaagcggtaaaccgctgttgctaacagaactgtttttaccggcgtcaccgttgtactaa

SEQ ID NO: 48355 - protein, 165 aa, Shigella flexneri 2a str. 301
MSHPALTQLRALRYFKEIPALDPQLLDWLLLEDSMTKRFEQQGKTVSVTMIREGFVEQNEIPEELPLLPKESRYWLREILLCADGEPWLAGRTVVPVSTLSGPELALQKLGKTPLGRYLFTSSTLTRDFIEIGRDAGLWGRRSRLRLSGKPLLLTELFLPASPLY

SEQ ID NO: 48356 - DNA, 570 bp, Shewanella oneidensis MR-1
  CDS (1)..(570): transl_table=11
atgaatgtgaccagcttaagctttccctatggcgaatcaattcaatggttttgtgccgacaacaccaaaaatcttcccgcttctccccttaaggaatggttactcgcccctggtagtctgacacaaaagctcaaaggctgctgtaatgagtttgaagtcagaatccttggtgaaggtcaatgcccgccgctcgacggcgaatatcccaatcaaagtgccgtttgggtgcgcgaagtcttactctgcctcgacgatgtgccttgggtatttgccagaaccttgatccctcagtctttgttatcgacacgccaagctgattttttaggcctaggaacacgaccactgggcgaattattatttagccaagatagttttgtgccgggacgcattgaaattgcccgctttgccaccaatagccgccttgcccacctagcgcaaagtttagcgcagaatgtagagcatgagctttgggggcgacgtcgatatttccaccacaacgaggaggaaatgtttgtcagtgaaatgttcctccctgccgccgaacaggcaatcgctaggctctgcccctaa

SEQ ID NO: 48357 - protein, 189 aa, Shewanella oneidensis MR-1
MNVTSLSFPYGESIQWFCADNTKNLPASPLKEWLLAPGSLTQKLKGCCNEFEVRILGEGQCPPLDGEYPNQSAVWVREVLLCLDDVPWVFARTLIPQSLLSTRQADFLGLGTRPLGELLFSQDSFVPGRIEIARFATNSRLAHLAQSLAQNVEHELWGRRRYFHHNEEEMFVSEMFLPAAEQAIARLCP

SEQ ID NO: 48358 - DNA, 558 bp, Pseudomonas putida KT2440
  CDS (1)..(558): transl_table=11
gtgtcgtacgaatccccgcaagcagccgctgtcgcgtggctgccgtattcacagctggcgaccgacatcgaccagcccacccttgactggctgttcgacgagggctcgctgacccgccgcctgacccgtctgtccattgatcacttttccgtcaccccgttgttcgagggctggcagccgctgcgcgatgacgaatgccaggcgctgggcatcgctgccggcgccgaaggctgggtgcgcgaagtgtatctgcgcggccatggccaaccttgggtattcgcccgcagcgtggccagccgcagcgccctggaacgtggtggcctggacctggaaaccttgggcagccgctcgctgggcgagctgctgttctgcgaccaggcgttcatccgtcatccactcgaagtgtgcacttatccacaggcctggctgccgtccgaagctgcacatgcggcgctttggggccgccgctcgcgcttcgagcgcaacggcctggacctgctggtggcagaagtgttcctgccggcattgtggcaagcggccaaggaggaaaaccgctga

SEQ ID NO: 48359 - protein, 185 aa, Pseudomonas putida KT2440
MSYESPQAAAVAWLPYSQLATDIDQPTLDWLFDEGSLTRRLTRLSIDHFSVTPLFEGWQPLRDDECQALGIAAGAEGWVREVYLRGHGQPWVFARSVASRSALERGGLDLETLGSRSLGELLFCDQAFIRHPLEVCTYPQAWLPSEAAHAALWGRRSRFERNGLDLLVAEVFLPALWQAAKEENR

SEQ ID NO: 48360 - DNA, 498 bp, Escherichia coli CFT073
  CDS (1)..(498): transl_table=11
atgtcacaccccgcgttaacgcaactgcgtgcgctgcgctattttacagagatccctgccctggagccgcaactgctcgactggctgttgctggaagattccatgacaaaacgttttgaacagcagggaaaaacggtgagcgtgacgatgatccgcgaagggtttgtcgagcagaatgaaatccccgaagaactgccactgctgccgaaagagtctcgttactggttacgtgaaattttgttatgtgccgatggtgaaccgtggcttgccggtcgtaccgtcgttcctgtgtcaacgttaagcgggccggagctggcgttacaaaaattaggtaaaacgccgttaggacgctatctgttcacatcatcgacattaacccgggactttattgagataggccgtgatgccggactgtgggggcgacgttcccgcctgcgattaagcggtaaaccgctgttgctaacagaactgtttttaccggcgtcaccgttgtactaa

SEQ ID NO: 48361 - protein, 165 aa, Escherichia coli CFT073
MSHPALTQLRALRYFTEIPALEPQLLDWLLLEDSMTKRFEQQGKTVSVTMIREGFVEQNEIPEELPLLPKESRYWLREILLCADGEPWLAGRTVVPVSTLSGPELALQKLGKTPLGRYLFTSSTLTRDFIEIGRDAGLWGRRSRLRLSGKPLLLTELFLPASPLY

SEQ ID NO: 48362 - DNA, 540 bp, Vibrio vulnificus CMCP6
  CDS (1)..(540): transl_table=11
atgaatcagccaaactcgctctatcttgctttgttaatagaagcaaaatggcaaaatcctgaagattttcacttttctagtgactttgctaagcactggttactggagcaaggctccttgtctcgccgtttggcgcgtcattgccaacatctgaccgttgagttgatgcgcaatgaaaaaagtggtatgggccaattaacaaggcaagagactcagggattgtcgcctgagatttgcttgatccgagaggtagtactatccggtgatcaaactccgtgggtgttggggagaacgttgatccctgaaaccaccttagctgatcagccctacgacttagccacgctgggtgatattcctttggggctcaccgtgtttagtgcagagcaagttgagcgtgacgcattgcaagtggcttggatcgaaacgccgcaagggcgtttactcgccagacgttctcgtttatggatgaaccacaaaccgatgttagtggcagaactgtttttacctgatgcaccgatttactccagggagagtgtgtaa

SEQ ID NO: 48363 - protein, 179 aa, Vibrio vulnificus CMCP6
MNQPNSLYLALLIEAKWQNPEDFHFSSDFAKHWLLEQGSLSRRLARHCQHLTVELMRNEKSGMGQLTRQETQGLSPEICLIREVVLSGDQTPWVLGRTLIPETTLADQPYDLATLGDIPLGLTVFSAEQVERDALQVAWIETPQGRLLARRSRLWMNHKPMLVAELFLPDAPIYSRESV

SEQ ID NO: 48364 - DNA, 561 bp, Pseudomonas syringae pv. tomato str. DC3000
  CDS (1)..(561): transl_table=11
gtgacccagcattcccccgcattcgttacccctgactggcttgagcgcgagcaactgactgacacgcccacacctgtatttttcggctggctattcaatcagcaatcccttacacgccgactggaccgcctgtctgacggcggcttcgatatcgttcccctgtctgaaggctggcaagcgttgcgcgacgacgaatgcgccgctttgggcttgccagcagccagcgaaggctgggtgcgcgaggtgtacttgcgcggtaacggcgaaaactgggtgttcgcccgtagcgtcgccgcacgggacgcgctgcaacacggcggtttgcacatggacgaactgggtacccgctcgctgggcgcattgctgttcagcgacccggcgttcgaccgcggcaccctccaggtgtgtcattacccgcaaagctggctgcctgatgccgatgcagtttccgggctgtgggcacgccgctcacaattcagtcgcggtgcgttgagcgtgctggttgccgaagtttttctgcccgccctgtggaatgcgattcataacaaggaccacgcctga

SEQ ID NO: 48365 - protein, 186 aa, Pseudomonas syringae pv. tomato str. DC3000
MTQHSPAFVTPDWLEREQLTDTPTPVFFGWLFNQQSLTRRLDRLSDGGFDIVPLSEGWQALRDDECAALGLPAASEGWVREVYLRGNGENWVFARSVAARDALQHGGLHMDELGTRSLGALLFSDPAFDRGTLQVCHYPQSWLPDADAVSGLWARRSQFSRGALSVLVAEVFLPALWNAIHNKDHA

SEQ ID NO: 48366 - DNA, 552 bp, Vibrio parahaemolyticus RIMD 2210633
  CDS (1)..(552): transl_table=11
ttgaatactagtatgaatcagccaacatcactctatcttgcttctttattggaagtagagtggcaaaagcccgaagaatttgaatttccaaacgaatttgccaagcattggctggaagaacaagggtctttgtcacgtcgtttaaagcagcactgtcaggaattgacagtagaactgctgcaaaatcatatcgtcacagcgaagacactgaaatcggatgaaagtcagttactgtctgagcaagattgcctcctaagagaggtcgtcctgtgtggagacgactgcccttgggttgttggtcgtactttgatcccacgtactacgttggtcgatcagcaatacgacttagcgcagcaaggcgatatcccactagggctcaccgtctttagcgccgataatgtcgagcgcgactcgctccaaatgggttgggttcacttgcctcaaggccgttttctcgcacgacgctcaaggttgtggatgaatcacaaacctatgttagtcgctgagttattcttatcgaattcacctatttacgccaaggagagagtgtaa

SEQ ID NO: 48367 - protein, 183 aa, Vibrio parahaemolyticus RIMD 2210633
MNTSMNQPTSLYLASLLEVEWQKPEEFEFPNEFAKHWLEEQGSLSRRLKQHCQELTVELLQNHIVTAKTLKSDESQLLSEQDCLLREVVLCGDDCPWVVGRTLIPRTTLVDQQYDLAQQGDIPLGLTVFSADNVERDSLQMGWVHLPQGRFLARRSRLWMNHKPMLVAELFLSNSPIYAKERV

SEQ ID NO: 48368 - DNA, 498 bp, Salmonella enterica subsp. enterica serovar Typhi Ty2
  CDS (1)..(498): transl_table=11
atgtcacaccctgcgttaacgcaactgcgtgcgctgcgctattttgatgcgattcctgcgcttgaaccccatttgctggactggctgttgctggaagattctgtgactaaacgttttgagcagcagggaaagcgggtaagcgtgacgctgattcgggaagcgtttgtcggccaaagtgaggtcgaggaagcatcaggtttactgccatccgagtcccgctactggttacgtgagatactgctttgcgctgacggcgagccctggcttgccggacgtaccgtggtaccggaatccacgctgtgcggacctgaacaggtcttacaacatctgggtaaaaccccgcttggacgttatctatttacatcatcgacactgacccgcgattttattgaaattggacgcgatgcaacgctgtgggggcgccgctctcgactgcggttgagcggaaaaccgctgttgcttaccgagctttttttacctgcatcgccgctgtactga

SEQ ID NO: 48369 - protein, 165 aa, Salmonella enterica subsp. enterica serovar Typhi Ty2
MSHPALTQLRALRYFDAIPALEPHLLDWLLLEDSVTKRFEQQGKRVSVTLIREAFVGQSEVEEASGLLPSESRYWLREILLCADGEPWLAGRTVVPESTLCGPEQVLQHLGKTPLGRYLFTSSTLTRDFIEIGRDATLWGRRSRLRLSGKPLLLTELFLPASPLY

SEQ ID NO: 48370 - DNA, 558 bp, Coxiella burnetii RSA 493
  CDS (1)..(558): transl_table=11
atgaagaagcaacttttttgggccccacaaaatgaaatcccttccactttgtggacagctaatgaacggagctggttgacgcatcccggctctctgacgcagcgtttacgcaagacaactgatgggcaaattcagcaccatctgcttcgggaagttttcgatgcaccggttgacgaagagacccaactcctgggtatatctcagccagaattagccttgatccgtgaaattgaatggcgatatttcgaaagcttgtgggtggcgggccgtgtagtaatcccaaagaaaaccctggaaagagagggctccccacttaaccatatcggggaacgctctttaggcgatatcttatttgcaaatgccaaatttactcgcggcgatttggagtttaggcaaattactgccgatcacccttattatttttatgttaaagagattgcgaatggcagttgtatatgggctcgacgttctttgttttatttcgaaagagatcccttattggtgagcgaaattttttcccccgcgctatttttagagagctctgtgtcgaatgattaa

SEQ ID NO: 48371 - protein, 185 aa, Coxiella burnetii RSA 493
MKKQLFWAPQNEIPSTLWTANERSWLTHPGSLTQRLRKTTDGQIQHHLLREVFDAPVDEETQLLGISQPELALIREIEWRYFESLWVAGRVVIPKKTLEREGSPLNHIGERSLGDILFANAKFTRGDLEFRQITADHPYYFYVKEIANGSCIWARRSLFYFERDPLLVSEIFSPALFLESSVSND

SEQ ID NO: 48372 - DNA, 537 bp, Nitrosomonas europaea ATCC 19718
  CDS (1)..(537): transl_table=11
atgaaggttaacccgcctctggcgtggcatcctgcacctgtttccgctcccgtcgaccttcactggtggctgactcaccggggttctctcacccgcctgattcaggatcgctgtgaacattttcgtgtcgaacctatttttcaggcactggcaacggcgtgtatcgatgagctggaagtcatgaacctgcgcagacagacccgggcactggtaagggaggtttatttgcgctgtaacgaaacaccggttgtatttgctcattcgatcgtcagaaaagaacatttacgaggtgcatggcgcggcctgagccgcctgggcaatcagtcactgggcaccatgctgtttaccaacccactgatacagcgcactcctcttgctttcaagaaactgaaaccgcaccacccgctgttcgaacgtgcctgcaaacgactgcagaaccgcccggccgatctctgggcaaggcgctcgttattcatcctgcaacatcagccgatactcgtcaccgaggtatttctgcccgcaatccgcagactctga

SEQ ID NO: 48373 - protein, 178 aa, Nitrosomonas europaea ATCC 19718
MKVNPPLAWHPAPVSAPVDLHWWLTHRGSLTRLIQDRCEHFRVEPIFQALATACIDELEVMNLRRQTRALVREVYLRCNETPVVFAHSIVRKEHLRGAWRGLSRLGNQSLGTMLFTNPLIQRTPLAFKKLKPHHPLFERACKRLQNRPADLWARRSLFILQHQPILVTEVFLPAIRRL

SEQ ID NO: 48374 - DNA, 573 bp, Bordetella bronchiseptica RB50
  CDS (1)..(573): transl_table=11
atgaccacccccattccccttgcgcgcggctggctgcccgccgcgccctcgacgctggatcccttgcgcaagtattggctgttccgtcccggcgcgctcaccgccggcctgcgccagctgggccacgtacgcctgcgcgtgctggcagagtacccgaccggcgcgccccgcgacgaggccgacggcatgcgcatcgccgcgcaaagcccggtctgggtgcgcgaagtgctgatgtcgatcgacggcgtggacagcgtcgtggcgcgcagcctcacgccgctgcgcgcctcgcatggcgtctggcagggcatgcggcgcctgctgacgcgcccgctggccgacatgctgtaccacgatcccggcatccatcgttcggtcttcgtatgccgccggctggccgccggcgtgcccttccatgccaccgccatcgcgcgcgcgccggccggcggcccggagccggcgctgtgggcgcgccgctccgccttctggcgcgccggccagccgctgctggtggccgagtgcttcctgcccgccttctggtcgctggcgcgcgcgcctgtcgcgccgcgctga

SEQ ID NO: 48375 - protein, 190 aa, Bordetella bronchiseptica RB50
MTTPIPLARGWLPAAPSTLDPLRKYWLFRPGALTAGLRQLGHVRLRVLAEYPTGAPRDEADGMRIAAQSPVWVREVLMSIDGVDSVVARSLTPLRASHGVWQGMRRLLTRPLADMLYHDPGIHRSVFVCRRLAAGVPFHATAIARAPAGGPEPALWARRSAFWRAGQPLLVAECFLPAFWSLARAPVAPR

SEQ ID NO: 48376 - DNA, 519 bp, Photorhabdus luminescens subsp. laumondii TTO1
  CDS (1)..(519): transl_table=11
atggaaaagcgtatgtcaactgactcaatattaacaacggtgcctattcagtggctttcggtggattcacccgttttgcctgatgaggttttagactggttgatggaattgggctcaatgacccgccgttttgagcaatactgcaacagtgttcgtatcataccattcagagaatgttttattaccgaagaacaactttctgatgaaaatgagcgtttgctaacgggtcaacgatattggctgcgtgagatcgtactgtgcggtgataatatcccttggctattggggcggacgttaatccctgaaacaacattaaccggtcctgatgaaagtttggttgatttaggaacagtcccactggggcgatatctttttagtggtaataaattgacgcgggactatattcatgtagggcagcaggggaaccgttgggcaagacgatcattgctgaggttatcaggcaagccattattattaaccgaagtctttttacctgaatcaccggtgtataaaaggtaa

SEQ ID NO: 48377 - protein, 172 aa, Photorhabdus luminescens subsp. laumondii TTO1
MEKRMSTDSILTTVPIQWLSVDSPVLPDEVLDWLMELGSMTRRFEQYCNSVRIIPFRECFITEEQLSDENERLLTGQRYWLREIVLCGDNIPWLLGRTLIPETTLTGPDESLVDLGTVPLGRYLFSGNKLTRDYIHVGQQGNRWARRSLLRLSGKPLLLTEVFLPESPVYKR

SEQ ID NO: 48378 - DNA, 552 bp, Vibrio vulnificus YJ016
  CDS (1)..(552): transl_table=11
ttgaatactagtatgaatcagccaaactcgctctatcttgctttgttaatagaagcaaaatggcaaaatcctgaagattttcacttttctagtgactttgctaagcactggttactggagcaaggctccttgtctcgccgtttggcgcgtcattgccaacatctgaccgttgagttgatgcgcaatgaaaaaagtggtgtgggccaattaacaatgcaagagactcaggggttatcccctgagatttgcttgatccgagaggtggtgctatccggtgatcaaacaccgtgggtgctgggaagaacgttgatccctgaaaccaccttagctgatcagccctacgacttagccacgctgggtgatattcctctgggtctcaccgtgtttagtgcagagcaagttgagcgtgacgcattgcaagtggcttggattgaaacaccgcaagggcgtttactcgccagacgttctcgtttatggatgaaccacaaaccgatgttagtggcagaactgtttttacctgatgcaccgatttactccagggagagtgtgtaa

SEQ ID NO: 48379 - protein, 183 aa, Vibrio vulnificus YJ016
MNTSMNQPNSLYLALLIEAKWQNPEDFHFSSDFAKHWLLEQGSLSRRLARHCQHLTVELMRNEKSGVGQLTMQETQGLSPEICLIREVVLSGDQTPWVLGRTLIPETTLADQPYDLATLGDIPLGLTVFSAEQVERDALQVAWIETPQGRLLARRSRLWMNHKPMLVAELFLPDAPIYSRESV

SEQ ID NO: 48380 - DNA, 519 bp, Bartonella quintana str. Toulouse
  CDS (1)..(519): transl_table=11
atgatatctgatcttaggagttctatcttgccacctttgaaatggctatccgatcaagatcctccagtaccagctggcgttagcgattggctaatggagttgggatccatgacacgtcgatttgaaaatcactgcacttgcatacgtattgaaccacaacgtgaatgtttcattacacgtgataacctgaaagaagaagctgcgcatttgcccaatagcacatgttactggctacgcgaagtcatactgatgggagacaaccaaccttggcttcttggacgcacagtgataccgcaagaaaccctatttgaacataatgaagcactgataaacttagggactgtaccactgggacggtatttatttagcagtggcaacctaactcgcgattacatttatattggccggcaaggtgcgctgtgggcacgccgctcccgtttgcgactagcgggcaaaccattgttattaaccgaactgtttttagcagcttcaccgctgtacacaacaaattccatataa

SEQ ID NO: 48381 - protein, 172 aa, Bartonella quintana str. Toulouse
MISDLRSSILPPLKWLSDQDPPVPAGVSDWLMELGSMTRRFENHCTCIRIEPQRECFITRDNLKEEAAHLPNSTCYWLREVILMGDNQPWLLGRTVIPQETLFEHNEALINLGTVPLGRYLFSSGNLTRDYIYIGRQGALWARRSRLRLAGKPLLLTELFLAASPLYTTNSI

SEQ ID NO: 48382 - DNA, 516 bp, Bartonella henselae str. Houston-1
  CDS (1)..(516): transl_table=11
atgtctgatcctaaagattctatcttgccacctctgaaatggctatcagatcaagatcctccagtaccaactcacatcaaagattggctcatggaattaggatctatgacacgtcgatttgaaaaccactgcacttacatacatatcaaaccacaacgtgaatgttttattacgcgtgataaacttaaagaagaagctgcgcatctgcccaagagcacacgttattggttacgcgaagtcatactaatgggagacaaccaaccttggctccttgggcgcacagtgataccgcaagaaaccctattcgaacacaatgaagcactgataaacttaggggatgtaccactgggacgctatttattcagtattgataaattgacccgcgattacatccatatcggaagaaaagatacgctgtgggcacgccgctcccgtttacgattaacaggcaagccattattattaaccgaattgtttttagcagcttcacctctttacacaacaaatcccatataa

SEQ ID NO: 48383 - protein, 171 aa, Bartonella henselae str. Houston-1
MSDPKDSILPPLKWLSDQDPPVPTHIKDWLMELGSMTRRFENHCTYIHIKPQRECFITRDKLKEEAAHLPKSTRYWLREVILMGDNQPWLLGRTVIPQETLFEHNEALINLGDVPLGRYLFSIDKLTRDYIHIGRKDTLWARRSRLRLTGKPLLLTELFLAASPLYTTNPI

SEQ ID NO: 48384 - DNA, 504 bp, Acinetobacter sp. ADP1
  CDS (1)..(504): transl_table=11
atgcagaaaattcaatcaaatcaaatacaggaacaagatttgacgcctgaattaaaaaaatggttgtatgcatctggatcattgactcagcaattgactgatttggcggatggcttatttacagttgaaccgattcaggaaaagtatcagcgtatgagttttatggatagccgctggatgcgtatgccagcgtatcatgtggcctgggtgagagaaagtttgttatatgggtgtgagcaacagccatgggtaaaagcaaagagtattttccctgttttaagtctgcaaaaaaaggcccgtatctttaaacacattggtaaaaaacccattggccgatttctgtttcagcgcacgactccgttgtgtgaacggcgtgtgatacgtttagaagaaggctggaccagacaaagttgttatacgtggcatgggtgtaaatttatcgtgcaggaaacttttctagcttcgtttgagcaatatattcaacatcattctcactctatatag

SEQ ID NO: 48385 - protein, 167 aa, Acinetobacter sp. ADP1
MQKIQSNQIQEQDLTPELKKWLYASGSLTQQLTDLADGLFTVEPIQEKYQRMSFMDSRWMRMPAYHVAWVRESLLYGCEQQPWVKAKSIFPVLSLQKKARIFKHIGKKPIGRFLFQRTTPLCERRVIRLEEGWTRQSCYTWHGCKFIVQETFLASFEQYIQHHSHSI

SEQ ID NO: 48386 - DNA, 534 bp, Erwinia carotovora subsp. atroseptica SCRI1043
  CDS (1)..(534): transl_table=11
atgtctgacgatgcgtcaacgcttctgcgcaccatatcctggtttactgaacccccttcggtattgcctgagcacattggtgactggctgatggaaaccagttccatgacgcagcggcttgaaaaatactgtgcccaactgagggtcacgctttgtcgtgagggtttcattacgccgcagatgctgggcgaagagcgggatcaactaccggctgacgaacgttactggctgcgtgaagttgtgctgtatggtgacgatcgcccctggcttttcggccgaacgattgtcccgcaacagacgctcgagggttctggcgcggctttgacgaaaataggcaatcagccgttaggtcgctatctgtttgagcaaaaatcgctgacgcgtgattatattcataccggatgctgcgaaggcttatgggcgcggcgttcccgcctgtgtctttcgggtcatccgttactgttgactgagcttttcttaccggaatcaccggtttattacacacctggtgatgaaggttggcaggtaatttga

SEQ ID NO: 48387 - protein, 177 aa, Erwinia carotovora subsp. atroseptica SCRI1043
MSDDASTLLRTISWFTEPPSVLPEHIGDWLMETSSMTQRLEKYCAQLRVTLCREGFITPQMLGEERDQLPADERYWLREVVLYGDDRPWLFGRTIVPQQTLEGSGAALTKIGNQPLGRYLFEQKSLTRDYIHTGCCEGLWARRSRLCLSGHPLLLTELFLPESPVYYTPGDEGWQVI

SEQ ID NO: 48388 - DNA, 594 bp, Burkholderia mallei ATCC 23344
  CDS (1)..(594): transl_table=11
atgcgtttcgacgccgccgatgcgcactggcgcgagacgccgcgccccggcgcgtcgagcgcgcagaaggactggctcacgcgcggcggctcgctcaccgcgcacctcgcgcggctcggccgcgtgacggtgcgcgtgacgcgcgagacggtcgcggcgccgtgggccgacgagcaccgcgcgctttcctgcgcgtcgcgcgcgccggtgtgggtgcgcgaggtcgtgctcgcggtcgacggcgcgccgttcgtcgccgcgcacagcatcgcgccgctcgccgcgagcaagggcgtgtggcaggcgatgcggcggctgcgcacgcgcccgctcgccgagctgctctatagcgatccggaagtgacgcgctcggcgctcgtgagccggcgcgtgctcgccgggcatccgttgttctcgctcgcatcgctcgcgctcgcgcgcgcgtatgcgacggagcacgcgttcgccgcccgccgctcggtgttcgagcggcgcggcacgccgctgatggtgaccgaatgcatgctgcccgcgctgtggcggcatctcgacgcacacggcgagcgccgcgcgcgcggcctcgagcagacgtga

SEQ ID NO: 48389 - protein, 197 aa, Burkholderia mallei ATCC 23344
MRFDAADAHWRETPRPGASSAQKDWLTRGGSLTAHLARLGRVTVRVTRETVAAPWADEHRALSCASRAPVWVREVVLAVDGAPFVAAHSIAPLAASKGVWQAMRRLRTRPLAELLYSDPEVTRSALVSRRVLAGHPLFSLASLALARAYATEHAFAARRSVFERRGTPLMVTECMLPALWRHLDAHGERRARGLEQT

SEQ ID NO: 48390 - DNA, 489 bp, Methylococcus capsulatus str. Bath
  CDS (1)..(489): transl_table=11
atggaatcctgggtgttcgaaaggggctcgctgacccggcgtctgaaagccgcttgcggcgccgacttcaatgtccgggtgatccgccagggtttcgcccatcccttcccggacgaggccttgctgctgaaactcagatccggccgtcgcgcgctggtgcgcgaagtcgaactccgatcccgcgaacggcgtttggtccttgcccgcagcgtccttccggcgcaaaccctgaagggtgcgggacgccggctggcgcacctgggcaatcgcccgctgggcgaaatcctgttcgcgtcacggcgtccgcggcgtcatgggttcgaggcggccctggccgaggaccgccattggcggccggcggttcgcgccggatcaggttcggccgggcccgtctggggtcgtcgctcgctctattcgatcgctggcaggcccttgctggtcgccgagttcttccttcccgccgtgctttccgtcccggagtccgcatga

SEQ ID NO: 48391 - protein, 162 aa, Methylococcus capsulatus str. Bath
MESWVFERGSLTRRLKAACGADFNVRVIRQGFAHPFPDEALLLKLRSGRRALVREVELRSRERRLVLARSVLPAQTLKGAGRRLAHLGNRPLGEILFASRRPRRHGFEAALAEDRHWRPAVRAGSGSAGPVWGRRSLYSIAGRPLLVAEFFLPAVLSVPESA

SEQ ID NO: 48392 - DNA, 543 bp, Photobacterium profundum SS9
  CDS (1)..(543): transl_table=11
atgtcgaaattcaagcagttgtataaaccattattggataatgcgcagtgggaaacacccctttcactcgcgatagaaggcacagcgtttgggcattggttgcttgaacctaattcattgtcacgccgacttcagcgtcattgcgatgaatttaccgtgtcgctaattgagcagaagaaaatcgatagtacgatgttatcggctgatgaacgtgagttgatcggtgatgttgattgtctattgcgtaaagttgttttgatgggagacggacaaccgtgggtatttgctcgtactttaattccgctatccacccttactgggcaagagagtgatcttgaacaattgggtgagatgccattaggctttcgggtatttaccgatcgtagtgcgcgtcgtgatgcattggaagttgcgaatacaggaacacaagcacagccactatgggctcgccgttcacgtttatggataaataacaaaccgctgctggtggctgaattatttttggcacaagccccggtgtattcaaaggagaaacaatgttag

SEQ ID NO: 48393 - protein, 180 aa, Photobacterium profundum SS9
MSKFKQLYKPLLDNAQWETPLSLAIEGTAFGHWLLEPNSLSRRLQRHCDEFTVSLIEQKKIDSTMLSADERELIGDVDCLLRKVVLMGDGQPWVFARTLIPLSTLTGQESDLEQLGEMPLGFRVFTDRSARRDALEVANTGTQAQPLWARRSRLWINNKPLLVAELFLAQAPVYSKEKQC

SEQ ID NO: 48394 - DNA, 582 bp, Idiomarina loihiensis L2TR
  CDS (1)..(582): transl_table=11
atgacaacagagttttatgccaccccggcttttccagttagcaaagcgctacaatggacaccgcctgaacaacttgaattaaccccaacacaagccgactggctgctatacgagggttcacttacagaacgcctgaagcagataggtcagcagttctccgttaagttactcggtcagcagttacttgcccctaacacggaagaaaagcaaaggttaaaaggtaaagaccaagccgttatccgtgaagttctactatactgtaatgaaaagccttgggtttttgcgcgcagtctattttctcccagcgccgaaaacgccaatacactgaatttacaacaactggggaatcagtcattgggcgagtctttatttgcccgtagcgatttatactgcggagacatagaagtggcaaaagttgctctggaacacccggttgctcggcttaatcagcagtggtttgggataaaccagaggctgctcagcagacgccgaatattttcaacgggcggtgagcaactgttagtcagtgaagtatttctgcagccctcgccactgtactcttcgccgaataacaggagttag

SEQ ID NO: 48395 - protein, 193 aa, Idiomarina loihiensis L2TR
MTTEFYATPAFPVSKALQWTPPEQLELTPTQADWLLYEGSLTERLKQIGQQFSVKLLGQQLLAPNTEEKQRLKGKDQAVIREVLLYCNEKPWVFARSLFSPSAENANTLNLQQLGNQSLGESLFARSDLYCGDIEVAKVALEHPVARLNQQWFGINQRLLSRRRIFSTGGEQLLVSEVFLQPSPLYSSPNNRS

SEQ ID NO: 48396 - DNA, 558 bp, Azoarcus sp. EbN1
  CDS (1)..(558): transl_table=11
atgcgcatccgacctcactccgaaacctggctcaaacgcccgccgcgcccccgggtgcccgcgcggctgcgcccctggctcaccgatccgggttcgctgacggcgcgcatccgcagtcgctgcagcctgttttcggtcaacgtgctcgcgcagcgcctcgccgtcccgcaccctgacgaagccgcgctgctcgggctgcgccgcggcgaactcgcgtggctgcgcgaagtgctgctcgtcgccgacggcgtcccggtggtgttcgcgcgcagcatcctgccgcggcacgacgtgcgtggagcatggatcctgttccagggactcggctcccgtccgctcggcgccgcgttgttcgccgacccgcgcatcggccgcaagccgttggcctgcgcctgtctcgaccgccgggacgcgcgctatcatcgcgcttcggctgccgccgcgccgcgtcgcctgccgctcgcgctgtgggcgcgccggtcgctgttcggcctgcgcggccgcacgctgctggtcagcgaagtgtttctgcccacgattctggagttgccgacatga

SEQ ID NO: 48397 - protein, 185 aa, Azoarcus sp. EbN1
MRIRPHSETWLKRPPRPRVPARLRPWLTDPGSLTARIRSRCSLFSVNVLAQRLAVPHPDEAALLGLRRGELAWLREVLLVADGVPVVFARSILPRHDVRGAWILFQGLGSRPLGAALFADPRIGRKPLACACLDRRDARYHRASAAAAPRRLPLALWARRSLFGLRGRTLLVSEVFLPTILELPT

SEQ ID NO: 48398 - DNA, 543 bp, Vibrio fischeri ES114
  CDS (1)..(543): transl_table=11
atgtcagatatcaattcttggtgtgcttctgtactaaaaagagtgcagtggcaagaggccgatacatttgagtgtagtaatgacctgcagcgttattggttgctaggattagattcactatcacgtcgtttagagcagcattgcaatgtgttatcggtatcggtattggataatacccatgtgaatccagataaattaaccgtagaagaggaagctcttcttagcggagaagtgtgtttgcgtcgaaaagtcatcttaaaaggtgatcagcaatcgtgggtttatggtagaacattaattccgttatcatcattgcaagatcagccgcatgatttaactcgtcaaggtcatacacctttaggtattactgtatttagtgctcaaagtgcacatagagataaattacaagtaggaacaataatgacagaaagaggagagttgtttgctcgtcgttctcgattatggatgaataataaacctatgctagttgcagagttatttttaccagaagcacccatttattcaaaggaagtggaatcatga

SEQ ID NO: 48399 - protein, 180 aa, Vibrio fischeri ES114
MSDINSWCASVLKRVQWQEADTFECSNDLQRYWLLGLDSLSRRLEQHCNVLSVSVLDNTHVNPDKLTVEEEALLSGEVCLRRKVILKGDQQSWVYGRTLIPLSSLQDQPHDLTRQGHTPLGITVFSAQSAHRDKLQVGTIMTERGELFARRSRLWMNNKPMLVAELFLPEAPIYSKEVES

SEQ ID NO: 48400 - DNA, 498 bp, Salmonella enterica subsp. enterica serovar Choleraesuis str
  CDS (1)..(498): transl_table=11
atgtcacaccctgcgttaacgcgactgcgtgcgctgcgctattttgatgcgattcctgcgcttgaaccccatttgctggactggctgttgctggaagattctatgactaaacgttttgagcagcagggaaagcgggtaagcgtgacgctgattcgggaagcgtttgtcggccaaagtgaggtcgaggaagcatcaggtttactgccatcagaatcccgctactggttacgtgagatactgctttgcgctgacggcgagccctggcttgccggacgtaccgtggtaccggaatccacgctgtgcggacctgaacaggtcttacaacatctgggtaaaaccccgcttggacgttatctatttacatcatcgacactgacccgcgattttattgaaattggacgcgatgcaacgctgtgggggcgccgctctcgactgcggttgagcggaaaaccgctgttgcttaccgagctttttttacctgcatcgccgctgtactga

SEQ ID NO: 48401 - protein, 165 aa, Salmonella enterica subsp. enterica serovar Choleraesuis str
MSHPALTRLRALRYFDAIPALEPHLLDWLLLEDSMTKRFEQQGKRVSVTLIREAFVGQSEVEEASGLLPSESRYWLREILLCADGEPWLAGRTVVPESTLCGPEQVLQHLGKTPLGRYLFTSSTLTRDFIEIGRDATLWGRRSRLRLSGKPLLLTELFLPASPLY

SEQ ID NO: 48402 - DNA, 561 bp, Pseudomonas syringae pv. syringae B728a
  CDS (1)..(561): transl_table=11
gtgacccagcaatcccccgcattcattggccctgcctggcttgagcgcgagcaattgatcgacgcaccggacccggtaatgctcgactggttgttcaatcaggactccctcactcgtcggttggaccgtttgtctgacggtcgtttcagcgtatttccgcagtttgaaggctggcagcccttgcgccctgacgagtgcctggcgctgggcctgccagaggctggcgaaggctgggtgcgcgaggtgtacctgcgtggtaacggcaacaactgggtgttcgcgcgcagtgtcgccgcccgcagcgccctgcaggatggtggcctggatatggacgagctgggcactcgctcgctgggtgagttgctgttcagcgacccggcgttcgtgcgcggcacgcttgaagtgtgtcattaccccgaggcctggctgccggctgccgatgcagcgcgcggactgtgggcacggcgctcgcgctttgatcgcgatgccttgagcgtgctggtcgccgaagttttcctgcctgccctgtgcactgcgattcatgacaaggaccacgtctga

SEQ ID NO: 48403 - protein, 186 aa, Pseudomonas syringae pv. syringae B728a
MTQQSPAFIGPAWLEREQLIDAPDPVMLDWLFNQDSLTRRLDRLSDGRFSVFPQFEGWQPLRPDECLALGLPEAGEGWVREVYLRGNGNNWVFARSVAARSALQDGGLDMDELGTRSLGELLFSDPAFVRGTLEVCHYPEAWLPAADAARGLWARRSRFDRDALSVLVAEVFLPALCTAIHDKDHV

SEQ ID NO: 48404 - DNA, 504 bp, Haemophilus somnus 129PT
  CDS (1)..(504)
ttgaatatttctttatttcgacaaattctctcctctacaaaatggcagaatgatatttttactttatccccgcaaaaacaagattggctattacatcaaggttcattaacccgaaaattacagcaatattgtcagcaactgaaagttgaaattgtggcggaaaaatgggtttctgacatgtcttttggatttaccggacatcatgagccaatttggttgcgtgaagtgatattaaaaggtgatgagcaagcttggatttttgcacaaactcgtttgccgcaatctacgattgagaatgttgcacctgacattatcaatgtaggttcaacgcctattggcttatggcttttccctcaacaaccaaaaagaaaaacacttgaatggatatatgataccgcaacaggattatatgctcgtcgttcagtattgcttttaaatcaatatccaatcgaaattaaagaattgtttttgcaagattttaaattttttcaatcaaaggtctaa

SEQ ID NO: 48405 - protein, 167 aa, Haemophilus somnus 129PT
MNISLFRQILSSTKWQNDIFTLSPQKQDWLLHQGSLTRKLQQYCQQLKVEIVAEKWVSDMSFGFTGHHEPIWLREVILKGDEQAWIFAQTRLPQSTIENVAPDIINVGSTPIGLWLFPQQPKRKTLEWIYDTATGLYARRSVLLLNQYPIEIKELFLQDFKFFQSKV

SEQ ID NO: 48406 - DNA, 507 bp, Pseudomonas syringae pv. syringae B728a
  CDS (1)..(507)
ttgatcgacgcaccggacccggtaatgctcgactggttgttcaatcaggactccctcactcgtcggttggaccgtttgtctgacggtcgtttcagcgtatttccgcagtttgaaggctggcagcccttgcgccctgacgagtgcctggcgctgggcctgccagaggctggcgaaggctgggtgcgcgaggtgtacctgcgtggtaacggcaacaactgggtgttcgcgcgcagtgtcgccgcccgcagcgccctgcaggatggtggcctggatatggacgagctgggcactcgctcgctgggtgagttgctgttcagcgacccggcgttcgtgcgcggcacgcttgaagtgtgtcattaccccgaggcctggctgccggctgccgatgcagcgcgcggactgtgggcacggcgctcgcgctttgatcgcgatgccttgagcgtgctggtcgccgaagttttcctgcctgccctgtgcactgcgattcatgacaaggaccacgtctga

SEQ ID NO: 48407 - protein, 168 aa, Pseudomonas syringae pv. syringae B728a
MIDAPDPVMLDWLFNQDSLTRRLDRLSDGRFSVFPQFEGWQPLRPDECLALGLPEAGEGWVREVYLRGNGNNWVFARSVAARSALQDGGLDMDELGTRSLGELLFSDPAFVRGTLEVCHYPEAWLPAADAARGLWARRSRFDRDALSVLVAEVFLPALCTAIHDKDHV

SEQ ID NO: 48408 - DNA, 483 bp, Actinobacillus pleuropneumoniae serovar 1 str. 4074
  CDS (1)..(483)
atgtttatgttacgacaatatcgccgaatcttagcgcaaaatcattggtgttcggaacaagaaccgcttagtaaagctcaacaagaatggcttctacatcaaggatcgctaacgcaaaaattattacaagttagccggcaattcaacgttgaaattacccaacaaaaatgggttacaaaggcatctgaaaactattctaagtattggttacgggaagtattattaaaagaagaagatcagccttggatttttgcccaaactttagtaccgcaagcaacgatagataatgtagcgcaggatctaccgatacttggcgatcaagctatcggcttatggcttttccctcagacaccgaaacggatttcgcttgaatggcaatgtgatgtgcatagcggaatgtatatgcgcagagcctgttatttattaaaaggctatccgttagaaatctccgaattgttcttggcggattttccttatttataa

SEQ ID NO: 48409 - protein, 160 aa, Actinobacillus pleuropneumoniae serovar 1 str. 4074
MFMLRQYRRILAQNHWCSEQEPLSKAQQEWLLHQGSLTQKLLQVSRQFNVEITQQKWVTKASENYSKYWLREVLLKEEDQPWIFAQTLVPQATIDNVAQDLPILGDQAIGLWLFPQTPKRISLEWQCDVHSGMYMRRACYLLKGYPLEISELFLADFPYL

SEQ ID NO: 48410 - DNA, 537 bp, Pseudomonas aeruginosa UCBPP-PA14
  CDS (1)..(537)
atgcccagcaatgcgctctggcttcgcgccgaccaactgtccagcgtctcccccaccgtcctcgactggctgttcgacgaagggtcgctgacccggcgcctgaccgccctggccgacggcgcgttccgcgtcgaacccctgctggaaggctggcagaccctgcgcgacgacgaatgccaggggctcgacgtccctcccggcagtagcggctgggtccgcgaggtctacctgcatggccacgaccgtccctgggtgttcgcccgcagcgtggcggcgcgcagcgccctggaaggctcgggcttcgacctggcgctgctcggcacccgctcgctgggcgagttgctgttcagcgacagcgccttcgagcgcgggcccatcgaagtctgccgctatccggcggccggtctgcccgccgaggtccgcgccgagggtctctggggccgtcgctcacggttttcccgcggcgcgctcggggtgctggtggcggaggtgttcctaccgagcctgtgggaccaggcgggaatcgccgacgtataa

SEQ ID NO: 48411 - protein, 178 aa, Pseudomonas aeruginosa UCBPP-PA14
MPSNALWLRADQLSSVSPTVLDWLFDEGSLTRRLTALADGAFRVEPLLEGWQTLRDDECQGLDVPPGSSGWVREVYLHGHDRPWVFARSVAARSALEGSGFDLALLGTRSLGELLFSDSAFERGPIEVCRYPAAGLPAEVRAEGLWGRRSRFSRGALGVLVAEVFLPSLWDQAGIADV

SEQ ID NO: 48412 - DNA, 507 bp, Psychrobacter sp. 273-4
  CDS (1)..(507)
atgacctctcatctttgctgctctaattattcatcaccgttacctgagctgctggtttgtctacatactgaaggctcgctaacggcgttgttagaggtaaaagcagggcagccgttacgtgtcgaacgcagctttgagggttatcgtttattatccttggcgcaaaaaaagcaattaggtatgcaaggcgcggcgctgagccgtccgcggctagcatgggtgcgcgaggtacaattatatggcaatgacgagctaccatgggtacaggcgcaaagcctgtttccgttatccagtctacagggcagtgccagacgtctacagcagttaaaaagtaccccaattggctacgtgttgtttaagcgcagccgcaccttgcccaatcagcgctttatcaaacatacggtagatggctggcaacggcagacgctttataattggtacggtcgtcctttactcattagtgagacctttttgccacagttctgtgaaaaacagttggacatttaa

SEQ ID NO: 48413 - protein, 168 aa, Psychrobacter sp. 273-4
MTSHLCCSNYSSPLPELLVCLHTEGSLTALLEVKAGQPLRVERSFEGYRLLSLAQKKQLGMQGAALSRPRLAWVREVQLYGNDELPWVQAQSLFPLSSLQGSARRLQQLKSTPIGYVLFKRSRTLPNQRFIKHTVDGWQRQTLYNWYGRPLLISETFLPQFCEKQLDI

SEQ ID NO: 48414 - DNA, 597 bp, Burkholderia cepacia R18194
  CDS (1)..(597)
atgcgattcgacggcggtcaggccggctggcgcgagacgccgcggcctggctgcacgctcgatcagcgcgactggctgacgcgtggcggatcgctgaccgcgcacctcgcgcggctcggccgcgtgaacgtgcgcgtgacgcgcgaggccgtcgactgcccgtggttcgacgagccggacgcggtcgccagtgcaccgcgcgcgccgatgtgggtgcgcgaggtgatcctgtcggtcgacggcacgccgtacgtcgccgcgcacagcatcgcgccgctcgcggccagcaagggcgtgtggcaggccatgcggcggctgcgcacgcggccgctggcggagctgctgtacagcgatccgcaggtcgagcgttcggcgctcgtcagccggcgcgtgatcgccggccatccgctgtatgcgctggcgacccatgcgcttggcggggcgcgagcgccgcattcgttcgccgcgcgacgctcggtgttccagcgccacggcaagccgttgatggtcactgagtgcatgctgccggcgctgtggcgccatctcgacgcgcacggcgacgggccgcgctcgggcgggccgggcggaggcgcgtga

SEQ ID NO: 48415 - protein, 198 aa, Burkholderia cepacia R18194
MRFDGGQAGWRETPRPGCTLDQRDWLTRGGSLTAHLARLGRVNVRVTREAVDCPWFDEPDAVASAPRAPMWVREVILSVDGTPYVAAHSIAPLAASKGVWQAMRRLRTRPLAELLYSDPQVERSALVSRRVIAGHPLYALATHALGGARAPHSFAARRSVFQRHGKPLMVTECMLPALWRHLDAHGDGPRSGGPGGGA

SEQ ID NO: 48416 - DNA, 552 bp, Pseudomonas fluorescens PfO-1
  CDS (1)..(552)
atgcaacacacaaacgctccgctgtggcgcccgcaaagcgaactgacacccctgcccgacacatccacgctcgactggctgttcgacgaaggctccctgacccgccggctgacgcacctgtccgatgacggcttcagcgtgacgccgctgttcgaaggctggcagaccctgcgcgacgacgaatgcgccgcgctggacctggccgaaggcagcgagggctgggtgcgcgaggtgtatctgcgtgggcatggccaggcctgggtgttcgcccgcagcgtggcgtcgcgcagtgccttgcagggcgacggcttgcacatggatgagttgggcagccgctcgctgggcgaactgctgttctgcgatcacgcgtttcagcgccgcgccattgaagtctgccattacccggaacactggttgcccgaaggttcccgggctgccggcctgtggggacggcgttcgcgtttcgaccgtggcgcattgagcgtactggtggcggagattttcctgcctacgctgtgggaagccgtccgcgcccgtccggagaactgctga

SEQ ID NO: 48417 - protein, 183 aa, Pseudomonas fluorescens PfO-1
MQHTNAPLWRPQSELTPLPDTSTLDWLFDEGSLTRRLTHLSDDGFSVTPLFEGWQTLRDDECAALDLAEGSEGWVREVYLRGHGQAWVFARSVASRSALQGDGLHMDELGSRSLGELLFCDHAFQRRAIEVCHYPEHWLPEGSRAAGLWGRRSRFDRGALSVLVAEIFLPTLWEAVRARPENC

SEQ ID NO: 48418 - DNA, 558 bp, Pseudomonas fluorescens PfO-1
  CDS (1)..(558)
atggatacaagtcattactggtcatcgcgaccgctgtcggaattgaccggctccgagcatcactggctgtttttgcccggggcactgaccccacgtctgaaagccatgggcgattattcaatcgaagtcgtcgagcagtcccatggcccgctcaatcctgaagaagcgcaagcgctgaacgtgtcgccaaacaccattggttgggtgcgcgaagtggtgatgaagctcgacggcgaggcctgcgtcaccgcgcgcagcctgaccagcgtgccggcgctgaatggcgactgggcggatctgaacggctacggccgtcgaccgctggccgagattctctacacctcggagcagaccctgcgcgaaccattccaatgtgccttgctgccgcccggtgcgccgttggccgcgctgtcctatcgctacgcgccgcaagccgaacgtctgttggcccggcgttcgcgtttcacccgcaatggttcggcgctgctggtcagcgagtgctttctgccagcgttctgggctcgggtcgagtacgctcaggcgctcaagtcggcctga

SEQ ID NO: 48419 - protein, 185 aa, Pseudomonas fluorescens PfO-1
MDTSHYWSSRPLSELTGSEHHWLFLPGALTPRLKAMGDYSIEVVEQSHGPLNPEEAQALNVSPNTIGWVREVVMKLDGEACVTARSLTSVPALNGDWADLNGYGRRPLAEILYTSEQTLREPFQCALLPPGAPLAALSYRYAPQAERLLARRSRFTRNGSALLVSECFLPAFWARVEYAQALKSA

SEQ ID NO: 48420 - DNA, 684 bp, Burkholderia fungorum LB400
  CDS (1)..(684)
atgtctatccgtttcgttgccgccgacgcccactggcgcgtcgcgcccttgcccggcctgagcgccgcgcagaaagactggctgacccgtggtggttcactgaccgcgcatctgcgcgcgctcggcgcggtcgcggttcgcgtgacgcgcgaaggcgtcgcgctgccgtggcccgacgagcatgccgcgctcggcctcgcgccgcgtgcgccggtctgggtgcgcgaagtcgtcctcgcggtcgaaggcgtgccgttcgtcgcggcgcatagcgtcgcgccgctcgccgcgagtgccggcgtgtggcaggccatgcggcgcttgcgcacgcggccgctggctgaactgctgtatagcgacagcagcgtggcgcgttcgtcgctggtgagccgcaggctgaccgctcggcatccgctctatcgcctcgcggcgtgcgcgatcgagagcctgccgccgcatgcgctggtcgcgcgccgctcggtgttcgagcgccacggcgcgcccttgatggtgaccgaatgcatgttgccggcgctatgggcgcatctggccacggtgtccggggctggcggatcaggcgactggtccgcgcatccgcgcgtgcgcgaacacggccgtccgctcgaacacaccgcctcgcgcgcgcatcccgccacgcgtgcgtccgacgagcagcgccgctga

SEQ ID NO: 48421 - protein, 227 aa, Burkholderia fungorum LB400
MSIRFVAADAHWRVAPLPGLSAAQKDWLTRGGSLTAHLRALGAVAVRVTREGVALPWPDEHAALGLAPRAPVWVREVVLAVEGVPFVAAHSVAPLAASAGVWQAMRRLRTRPLAELLYSDSSVARSSLVSRRLTARHPLYRLAACAIESLPPHALVARRSVFERHGAPLMVTECMLPALWAHLATVSGAGGSGDWSAHPRVREHGRPLEHTASRAHPATRASDEQRR

SEQ ID NO: 48422 - DNA, 564 bp, Thiobacillus denitrificans ATCC 25259
  CDS (1)..(564)
atgatcgccacgcgcgacgacgtttgccggcaggccggtctgcagtatggctggctgccccatgccttccaggcgccgcggacgctgcgcggctggctgtccgatcgcggttcgctcacccagcgcctgcggtcccgttaccgtgatttccgcgtgcttccggtgctgcgcggcgtcgcggcgccttttcccgacgaaagcggcgcgctcggcctcgcgcgcgatgcaagcgcctacgtgcgcgacgtcctgctcctcggcgatggcaaggcccgcgttttcgcgcacagcgtgctgccgcgcgcggccttgcgcggcggatggaacggcatcgcccggctcggcacgagaccgctcggcgaagcactgtttcgcaccccccgtgtccgccgtctggccatgacgatgcgccgggtcgacgcgcggcacccgctttattgcgccgcgcgccgccatgccgaggtcgccgagcgcgcactgtgggcgcggcgctcggtattttgcctggacggccacccactgctggtcagtgaagtctttttgcccgccctattaacgccatga

SEQ ID NO: 48423 - protein, 187 aa, Thiobacillus denitrificans ATCC 25259
MIATRDDVCRQAGLQYGWLPHAFQAPRTLRGWLSDRGSLTQRLRSRYRDFRVLPVLRGVAAPFPDESGALGLARDASAYVRDVLLLGDGKARVFAHSVLPRAALRGGWNGIARLGTRPLGEALFRTPRVRRLAMTMRRVDARHPLYCAARRHAEVAERALWARRSVFCLDGHPLLVSEVFLPALLTP

SEQ ID NO: 48424 - DNA, 531 bp, Dechloromonas aromatica RCB
  CDS (1)..(531)
atgaaacgcagcaaatggcggactcgcttcgccggcgcttattgcgaccccattctccgctcctggctgactgagccggattcactgacggctcgttgtcagcgggcgagttcggcttttcgcgtgcgcctgttgcgctacggcaagggtcaggcactggccgatgaagcggttgagggcaaggccggccggcattcggcctgggtgcgcgaggtggtgctcgaatgcgatggcgtgccggtgatctttgctcacacgactttgtcgacggcccggagaggccggatgacccgctggatggccggtctgggcagtcgttcgctgggttccctgctttttgcctatccagggttcaagcgagggggtatcgagtttctccggcttgatcggtgtcacccgctgtatcggcgtgccgcggccttgggggcagggcgcaagtccctgtgggcgcgccgctcactgcaccggctcggcgggcagcaggtgctggtgacggaagtctttctgccggccatcacgctgctgaagtga

SEQ ID NO: 48425 - protein, 176 aa, Dechloromonas aromatica RCB
MKRSKWRTRFAGAYCDPILRSWLTEPDSLTARCQRASSAFRVRLLRYGKGQALADEAVEGKAGRHSAWVREVVLECDGVPVIFAHTTLSTARRGRMTRWMAGLGSRSLGSLLFAYPGFKRGGIEFLRLDRCHPLYRRAAALGAGRKSLWARRSLHRLGGQQVLVTEVFLPAITLLK

SEQ ID NO: 48426 - DNA, 552 bp, Azotobacter vinelandii AvOP
  CDS (1)..(552): transl_table=11
gtgaccgctgctcccgctttccaatggctcggcgccgaccaactgcatcccgcccccccggccgtcctggccgactggctgttcgacagcggctcgctgacccgccggctgaccgccctttccgccggccgtttcgccgtgacgccgctggccgaaggctggcaggtgctgcgcgacgacgaatgcaccgccctcgacgtggtgccgggcagcaccggctgggtacgcgaggtctacctgctcggcgccgagcggccctgggtgttcgcccgcagcgtggcggcccgcgaggctctggcgggtttctccggcgtactcgccgaactcggccggcggcccctcggcgaactgctgttcagcgacccagccttcgcccgcggcccgctgcaggccacgcactatccgccggactggctgccggccgggatacgctgccccggactctggggacggcgctcccgtttccaccgggaaaccctgagcgtgctggtggcggaagtcttcctgccggagctctggcgctaccagggaatcgacccggacaccctataa

SEQ ID NO: 48427 - protein, 183 aa, Azotobacter vinelandii AvOP
MTAAPAFQWLGADQLHPAPPAVLADWLFDSGSLTRRLTALSAGRFAVTPLAEGWQVLRDDECTALDVVPGSTGWVREVYLLGAERPWVFARSVAAREALAGFSGVLAELGRRPLGELLFSDPAFARGPLQATHYPPDWLPAGIRCPGLWGRRSRFHRETLSVLVAEVFLPELWRYQGIDPDTL

SEQ ID NO: 48428 - DNA, 597 bp, Burkholderia vietnamiensis G4
  CDS (1)..(597): transl_table=11
atgcgattcgacggcgcacgctcgggctggcgcgcaacgccccggcccggctgcacgctcgagcagcgcgattggctcacgcgcggcggttcgctgaccgcgcatctcgcgcggctcggcagcgtgagcgtgcgcgtgacgcgcgaggccgtcgattgcccgtggttcgacgagcctgccgcggtcggacgcgcgccgcgcgcgccgatgtgggtgcgcgaggtgatcctgtcggtggacggcgtgccgtacgtcgccgcgcacagcatcgcgccgctcgcggccagcaagggcgtatggcaggcgatgcggcggctgcgcacgcgcccgctcgccgaattgctgtacagcgacccgcaggtcgcgcgctcggcgctcgtgagccggcgcgtgatcgccggccatccgctgtatgcgctcgcgagccatgcgctgcagcgcgagcgcgcaccgcatgcattcgccgcgcggcgctcggtattccagcggcacggcgagccgctgatggtcacggaatgcatgctgccggcgttgtggcgccatctcgccgcgcacggcgacggcccgcgctcgctcgggccgcgggcagacgcgtga

SEQ ID NO: 48429 - protein, 198 aa, Burkholderia vietnamiensis G4
MRFDGARSGWRATPRPGCTLEQRDWLTRGGSLTAHLARLGSVSVRVTREAVDCPWFDEPAAVGRAPRAPMWVREVILSVDGVPYVAAHSIAPLAASKGVWQAMRRLRTRPLAELLYSDPQVARSALVSRRVIAGHPLYALASHALQRERAPHAFAARRSVFQRHGEPLMVTECMLPALWRHLAAHGDGPRSLGPRADA

SEQ ID NO: 48430 - DNA, 603 bp, Burkholderia mallei 10229
  CDS (1)..(603)
atggcgcggatgcgtttcgacgccgccgatgcgcactggcgcgagacgccgcgccccggcgcgtcgagcgcgcagaaggactggctcacgcgcggcggctcgctcaccgcgcacctcgcgcggctcggccgcgtgacggtgcgcgtgacgcgcgagacggtcgcggcgccgtgggccgacgagcaccgcgcgctttcctgcgcgtcgcgcgcgccggtgtgggtgcgcgaggtcgtgctcgcggtcgacggcgcgccgttcgtcgccgcgcacagcatcgcgccgctcgccgcgagcaagggcgtgtggcaggcgatgcggcggctgcgcacgcgcccgctcgccgagctgctctatagcgatccggaagtgacgcgctcggcgctcgtgagccggcgcgtgctcgccgggcatccgttgttctcgctcgcatcgctcgcgctcgcgcgcgcgtatgcgacggagcacgcgttcgccgcccgccgctcggtgttcgagcggcgcggcacgccgctgatggtgaccgaatgcatgctgcccgcgctgtggcggcatctcgacgcacacggcgagcgccgcgcgcgcggcctcgagcagacgtga

SEQ ID NO: 48431 - protein, 200 aa, Burkholderia mallei 10229
MARMRFDAADAHWRETPRPGASSAQKDWLTRGGSLTAHLARLGRVTVRVTRETVAAPWADEHRALSCASRAPVWVREVVLAVDGAPFVAAHSIAPLAASKGVWQAMRRLRTRPLAELLYSDPEVTRSALVSRRVLAGHPLFSLASLALARAYATEHAFAARRSVFERRGTPLMVTECMLPALWRHLDAHGERRARGLEQT

SEQ ID NO: 48432 - DNA, 597 bp, Burkholderia cenocepacia AU 1054
  CDS (1)..(597): transl_table=11
atgcgattcgacggcgcgcaggccggctggcgcgagacgccgcggcctggctgcacgctcgaccagcgcgactggctgacgcgcggcggatcgctgaccgcgcacctcgcgcggctcggccgcgtgaacgtgcgggtgacgcgcgaggccgtcgaccgcccgtggttcgacgagccggacgcgctcgccagttcgccgcgcgcgccgatgtgggtgcgcgaggtgatcctgtcggtcgacggcatgccgtacgtcgccgcgcacagcatcgcgccgctcgcggccagcaagggcgtgtggcaggcgatgcggcggctgcgcacgcgaccgctcgcggagctgctgtacagcgatccgcaggtcgagcgctcggcgctcgtgagccggcgcgtgatcgccggccatccgctgtatgcgctcgcgagccatgcattgctgggcgcgcgggcgccgcatgcgttcgtcgcgcggcgctcggtgttccagcgtcacggcaagccgctgatggtcaccgagtgcatgctgccggcgctgtggcgccacctcgatgcgcacggcgacgggccgcggtccgtcgggtcgcacggaggcgcgtga

SEQ ID NO: 48433 - protein, 198 aa, Burkholderia cenocepacia AU 1054
MRFDGAQAGWRETPRPGCTLDQRDWLTRGGSLTAHLARLGRVNVRVTREAVDRPWFDEPDALASSPRAPMWVREVILSVDGMPYVAAHSIAPLAASKGVWQAMRRLRTRPLAELLYSDPQVERSALVSRRVIAGHPLYALASHALLGARAPHAFVARRSVFQRHGKPLMVTECMLPALWRHLDAHGDGPRSVGSHGGA

SEQ ID NO: 48434 - DNA, 603 bp, Burkholderia pseudomallei 1655
  CDS (1)..(603)
atggcgcggatgcgtttcgacgccgccgatgcgcactggcgcgagacgccgcgccccggcgcgtcgagcgcgcagaaggactggctcacgcgcggcggctcgctcaccgcgcacctcgcgcggctcggccgcgtgacggtgcgcgtgacgcgcgagacggtcgcggcgccgtgggccgacgagcatcgcgcgctttcctgcgcgtcgcgcgcgccggtgtgggtgcgcgaggtcgtgctcgcggtcgacggcgcgccgttcgtcgccgcgcacagcatcgcgccgctcgccgcgagcaagggcgtgtggcaggcgatgcggcggctgcgcacgcgcccgctcgccgagctgctctatagcgatccggaagtgacgcgctcggcgctcgtgagccggcgcgtgctcgccgggcatccgttgttctcgctcgcatcgctcgcgctcgcgcgcgcgcatgcgacggagcacgcgttcgccgcccgccgctcggtgttcgagcggcgcggcacgccgctgatggtgaccgaatgcatgctgcccgcgctgtggcggcatctcgacgcacacggcgagcgccgcgcgcgcggcctcgagcagacgtga

SEQ ID NO: 48435 - protein, 200 aa, Burkholderia pseudomallei 1655
MARMRFDAADAHWRETPRPGASSAQKDWLTRGGSLTAHLARLGRVTVRVTRETVAAPWADEHRALSCASRAPVWVREVVLAVDGAPFVAAHSIAPLAASKGVWQAMRRLRTRPLAELLYSDPEVTRSALVSRRVLAGHPLFSLASLALARAHATEHAFAARRSVFERRGTPLMVTECMLPALWRHLDAHGERRARGLEQT

SEQ ID NO: 48436 - DNA, 552 bp, Chromohalobacter salexigens DSM 3043
  CDS (1)..(552): transl_table=11
atgtctcctgaccgcttcccaggctggccgcactggctgcccatcgccgcgcagcgtcctcgaatgagccccgactggtggccctgggtggcctctcgcgattcactgaccgcgcgcttgcgcatcgccagcccccgtccattctcggtgcgtctgctcacccagggcgtgaccaggccacgcctcgacgaagcccaggcactggggctgccgcaccgcacgcacgtctggcaccgggaagtcctgttgcggctgggcaatgcctcctgggttgcggcccgttccgtggcaccgctggagggactgtccggcgcacggctatgcacgctgggagagcgttcgctgggcagttggctatttcggcaacctaacctcgagcgcggccccatcgaagcgatccgtgcgccggccatgacggggctggacgcctggcgaggcgacgccggcccctgggggcggcgctcgctcctgcgcgtgggcagaaccaggattctcgtccaggaattctttctcgccgcgatggccgctgacctctcgctgccatcgcgctaa

SEQ ID NO: 48437 - protein, 183 aa, Chromohalobacter salexigens DSM 3043
MSPDRFPGWPHWLPIAAQRPRMSPDWWPWVASRDSLTARLRIASPRPFSVRLLTQGVTRPRLDEAQALGLPHRTHVWHREVLLRLGNASWVAARSVAPLEGLSGARLCTLGERSLGSWLFRQPNLERGPIEAIRAPAMTGLDAWRGDAGPWGRRSLLRVGRTRILVQEFFLAAMAADLSLPSR

SEQ ID NO: 48438 - DNA, 537 bp, Methylobacillus flagellatus KT
  CDS (1)..(537): transl_table=11
atgcgtgaccgttggctcaagcgggccgtaggtgctcgacattaccgtccctggctcaccgagcgtggttcattgaccaggcgcttgcagcaacatagcaggcagtttgcagtgcagcccttgcatctggcgaggaaaaagccgcctcttgccgaagcgcagctattgcaggtgttacctcggcagcataccttgcagcgggatgtcatattgcgttgtgacggcgaggcggtagtgtttgcccatagcttattgccccagcaagccatgcgaggcacctggcgtggccttggccgcctggggtctcattcgctcggcagcgccttgtttgctgatccgcgcatgtgccgcggcgcattgcagtacaagaaactttcaccgcagcattttctctatcgcctggctgtggcgcatattcctgcgatgcgcggcccgatatgggcgaggcgctcggtattcaggctgggaaggaaggcagtgctggtgagcgagttgttcctgcctagcgtgttgaaacttcccttgatcaataaatag

SEQ ID NO: 48439 - protein, 178 aa, Methylobacillus flagellatus KT
MRDRWLKRAVGARHYRPWLTERGSLTRRLQQHSRQFAVQPLHLARKKPPLAEAQLLQVLPRQHTLQRDVILRCDGEAVVFAHSLLPQQAMRGTWRGLGRLGSHSLGSALFADPRMCRGALQYKKLSPQHFLYRLAVAHIPAMRGPIWARRSVFRLGRKAVLVSELFLPSVLKLPLINK

SEQ ID NO: 48440 - DNA, 564 bp, Shewanella baltica OS155
  CDS (1)..(564): transl_table=11
atgaatgtgactagcttaagcttcccctatggtgaatctattcagtggttttgtgccgaaagcgccaacaaactcccaaaatcgcccttgaaagaatggttacttgccactggcagcctaactcaaaaactcaaaacttgctgcactcaatttgaagtcaaagtccttggcgaaggactgcatgcgcccttagatggcgaatatccccagcaaggctcagtatggatccgcgaagtgttactttgcctcgactcaatcccttgggtatttgccagaaccttgatccccgaaaagttaatggccgaacgccaagccgatttccttggtctgggcacccgccccttaggtgaactgctgtttagccaagatcattttatcccaggcagaattgaagtcgccagttttgagacctgtagccgcctcgctcatttagccgaaagtttagatcagagtgtcgaacatgaactctggggacgccgccgctattttcatcacggtgaacacgaaatgatcgtcagtgaaatctttctgcctgcggccgagcaagctatccgtaagttatga

SEQ ID NO: 48441 - protein, 187 aa, Shewanella baltica OS155
MNVTSLSFPYGESIQWFCAESANKLPKSPLKEWLLATGSLTQKLKTCCTQFEVKVLGEGLHAPLDGEYPQQGSVWIREVLLCLDSIPWVFARTLIPEKLMAERQADFLGLGTRPLGELLFSQDHFIPGRIEVASFETCSRLAHLAESLDQSVEHELWGRRRYFHHGEHEMIVSEIFLPAAEQAIRKL

SEQ ID NO: 48442 - DNA, 564 bp, Shewanella amazonensis SB2B
  CDS (1)..(564): transl_table=11
atgagtgtgaccagtctcagttttccttacggtgaatccatttgttggtattcgccggatgagctggacaggttgcccgacggtgcccttgccgattggctacttgccagtggcagcctgacggccaggttaagagcccactgcagccagtttgaggtccgggtactcggtgaagccatgctgccaggcctgcccggcgaaccccaattaccccatacctgggtgcgggaagtcttgcttatcctcgacggtactccctgggtgttcgcacgcactctggtgccagaagccctgctgacccgctgcggagatgaattaaccgcactgggagacagaccccttggcgaactcctcttttccagcaacctcttcacaccgggccgaatcgaaatcgctggctttcattcctgcggcaccctggctcgcctcgccgagagcctgggacaaaatgtccatggtcgcctttggggccgtcgtcgctacttcgagcgggagggggacgagctgattgtcagcgaaatatttctccctgctgccatggattatatcctcggacctcaataa

SEQ ID NO: 48443 - protein, 187 aa, Shewanella amazonensis SB2B
MSVTSLSFPYGESICWYSPDELDRLPDGALADWLLASGSLTARLRAHCSQFEVRVLGEAMLPGLPGEPQLPHTWVREVLLILDGTPWVFARTLVPEALLTRCGDELTALGDRPLGELLFSSNLFTPGRIEIAGFHSCGTLARLAESLGQNVHGRLWGRRRYFEREGDELIVSEIFLPAAMDYILGPQ

SEQ ID NO: 48444 - DNA, 615 bp, Shewanella frigidimarina NCIMB 400
  CDS (1)..(615): transl_table=11
atgaacgtgaccagtattagctttccttatggtgaatcaattcattggttttcgccacaaaagatcgattcattgcctcatagccaacttaaagagtggctattagcaaccggaagtttgacccaacgcctcaagacacactgcaaacactttgaagtaaaagtgttaggcgagcatttacttgagcctctggcggatgaatttcctgctcaaactaaccccgtttggatccgcgaagtattattgtgtcttgacggtaccccgtgggtatttgcccgcacactgatcccacaaacgattttaggctctcaaacccctaactatcaaaatgctgatgataaacagattcgtgagcaacagaatgattttactcgccttggcactcggcctttaggtgaattactgtttagtagcccagacattactcccggcaatattgaagtcgctcagtttgaaacctgtggccgtttagctgccctagccaccagcttaaatcaacaggttaatagtagtttatggggacgtagacgttactttaacttgcacggttcacagctaattgtcagcgaaatatttctgcctgctgcggtcgagtacatcaaccaaagcatttaa

SEQ ID NO: 48445 - protein, 204 aa, Shewanella frigidimarina NCIMB 400
MNVTSISFPYGESIHWFSPQKIDSLPHSQLKEWLLATGSLTQRLKTHCKHFEVKVLGEHLLEPLADEFPAQTNPVWIREVLLCLDGTPWVFARTLIPQTILGSQTPNYQNADDKQIREQQNDFTRLGTRPLGELLFSSPDITPGNIEVAQFETCGRLAALATSLNQQVNSSLWGRRRYFNLHGSQLIVSEIFLPAAVEYINQSI

SEQ ID NO: 48446 - DNA, 564 bp, Pseudomonas fluorescens
  CDS (1)..(564): transl_table=11
gtgccgcactcaatgccccccgccccggcccccatctggctggtgcaaagccgtttgtcccccttccccggcacagccgttgccaactggctgttcgatgaagggtcgctgacccggcgcctgacccggctgtcccacaacgccttcagcgtcaccccgctggtgcaagagtggcaaaccctgcgcaacgacgaatgcgccgccctgggcctgcccgaacagagcgaaggctgggtgcgcgaggtgtacttgcgcgggcacggccaggcctgggtgttcgcccgtagcgtcgccgcccgcagcgccctgctcgaaggcggcctgaatatcgacgaactgggcagccgctccctgggcgagttgctgttctgcgaccaggcctttacccgccagcccatcgaagtctgccgctacccccggcactggctgcccgctgccgttgccgacaacggcctgtggggccgtcgctcacgctttgaccgcggccccctgagcctgctggtggcggaaatcttcctgcccagcctgtggaccgccatagacgcccgaccggaggcctgctga

SEQ ID NO: 48447 - protein, 187 aa, Pseudomonas fluorescens
MPHSMPPAPAPIWLVQSRLSPFPGTAVANWLFDEGSLTRRLTRLSHNAFSVTPLVQEWQTLRNDECAALGLPEQSEGWVREVYLRGHGQAWVFARSVAARSALLEGGLNIDELGSRSLGELLFCDQAFTRQPIEVCRYPRHWLPAAVADNGLWGRRSRFDRGPLSLLVAEIFLPSLWTAIDARPEAC

SEQ ID NO: 48448 - DNA, 609 bp, Xanthomonas albilineans
  CDS (1)..(609): transl_table=11
atgcatccgccgtcgccgttgaacacgcagcagaaagactggctgacacgcggtggttcgttgaccgcgcacctgcgcctgttggggcaggtacaggtgcaagtgcaacgggagcacaaagccatggcctggctggatgaatatcgggtgctcggactgtcgcgctgcctgcttgtatgggtgcgtgaagtggtcctggtggtggacgccaaaccctatgtctatgcgcgtagcctgacgccgctgaccgccagttacaacgcctggcaggcagtgcgtagcatcggcagtcgcccgttagctgatctgttgttccgtgatcgcagcgtgctacgttcggcgttggcgagtcggcgcatcaccgcgcagcatccgctgcaccggcgcgcatgcaacttcgtggcacagtcgcatgcgacgcaagccctgctggcgcgccgctcggtatttacgcggcaaggcgccccgttgctgatcaccgaatgcatgctgccagcgttgtgggcaacgctggaaccggtggcagctccgcgccaggcgagtctgagtgcggacggcccttgccggcattcagcgcagatcgtctcgcctgagtcgatgctggaatag

SEQ ID NO: 48449 - protein, 202 aa, Xanthomonas albilineans
MHPPSPLNTQQKDWLTRGGSLTAHLRLLGQVQVQVQREHKAMAWLDEYRVLGLSRCLLVWVREVVLVVDAKPYVYARSLTPLTASYNAWQAVRSIGSRPLADLLFRDRSVLRSALASRRITAQHPLHRRACNFVAQSHATQALLARRSVFTRQGAPLLITECMLPALWATLEPVAAPRQASLSADGPCRHSAQIVSPESMLE

SEQ ID NO: 48450 - DNA, 549 bp, Pseudomonas putida
  CDS (1)..(549): transl_table=11
atgcaagtagtttataacttttcgcaacccgggctgcagtggaaacaaagtgaccatttgcgctcactaatgacggtgaccagtagggactggctgttggatagggggtctctgacaaggcgtttgcgagtcctgtcagacgatgacctggaggtagttcctttacgtgaggaggttggagtgatcctgccacatgaagctgacgtattgggactgcagttaggggcaatcggcggggtacgtgaggtttatctagtcgggtttggtcgaccatgggtttttgcaaggtctatcatcgtaaactcaggctctattgaggaaggctcagcgttattacagctgggaaacatgccgctgggagatttattgtttggagatggctcttttcagcggagcgaaattgaagtgtgtcgctatcacgatgcgtgcaatgcgagtgcgagatctacttatccgttgtgggctaggcgttccgtgttcaaacgtgagaaaatgcatgtcttggtgcaagaaatgtttttgccagcactctgggaggagatgagctag

SEQ ID NO: 48451 - protein, 182 aa, Pseudomonas putida
MQVVYNFSQPGLQWKQSDHLRSLMTVTSRDWLLDRGSLTRRLRVLSDDDLEVVPLREEVGVILPHEADVLGLQLGAIGGVREVYLVGFGRPWVFARSIIVNSGSIEEGSALLQLGNMPLGDLLFGDGSFQRSEIEVCRYHDACNASARSTYPLWARRSVFKREKMHVLVQEMFLPALWEEMS

SEQ ID NO: 48452 - DNA, 549 bp, Pseudomonas sp
  CDS (1)..(549): transl_table=11
atggaggtggcgtaccgtttttcgcaaccgcacctggagtggaattcctacggccattggcgttcgtcgatagccgcgacccagcgggaatggctgtttgaccgcagttcactgacgcgccgcctcaggacgctatccgacaatgagttcgaggtgattcccctacgtgaagcggcggggccgatgctgccggaagaatgccgggtgcttgggttgcaacccggggtcacgggctggattcgtgaagtctacctggccggtttcggtcggccgtgggtgtatgcaaggtcggtgatcagtcattgtgatgttgaaggaagtgattcagcgttacttcaactaggcaatattccattgggaagtctgttatttggcgagaacccttataagcgcagcgaaatagaagtgtgtcgatatccggatgcctgtaacgccagcagtcgaccggcttatccgttatgggccagacgttcggtgttcagtcgtcggcaaagtcgcgtcctggttcatgaaatgttcttgccagcactgtgggaggagttgagttaa

SEQ ID NO: 48453 - protein, 182 aa, Pseudomonas sp
MEVAYRFSQPHLEWNSYGHWRSSIAATQREWLFDRSSLTRRLRTLSDNEFEVIPLREAAGPMLPEECRVLGLQPGVTGWIREVYLAGFGRPWVYARSVISHCDVEGSDSALLQLGNIPLGSLLFGENPYKRSEIEVCRYPDACNASSRPAYPLWARRSVFSRRQSRVLVHEMFLPALWEELS

SEQ ID NO: 48454 - DNA, 23 bp, Artificial sequence
  Primer sequence
atgcgattgttgcgtttttgttg

SEQ ID NO: 48455 - DNA, 22 bp, Artificial sequence
  Primer sequence
ttagtacaacggtgacgccggt

SEQ ID NO: 48456 - protein, 177 aa, Artificial sequence
  Consensus
  Variant (3)..(6): Xaa in position 3 to 6 is any amino acid
  Variant (10)..(19): Xaa in position 10 to 19 is any amino acid
  Variant (20)..(21): Xaa in position 20 to 21 is any or no amino acid
  Variant (23)..(41): Xaa in position 23 to 41 is any amino acid
  Variant (42)..(54): Xaa in position 42 to 54 is any or no amino acid
  Variant (59)..(59): Xaa in position 59 is any amino acid
  Variant (61)..(66): Xaa in position 61 to 66 is any amino acid
  Variant (67)..(67): Xaa in position 67 is any or no amino acid
  Variant (70)..(70): Xaa in position 70 is any amino acid
  Variant (72)..(72): Xaa in position 72 is any amino acid
  Variant (75)..(84): Xaa in position 75 to 84 is any amino acid
  Variant (85)..(101): Xaa in position 85 to 101 is any or no amino acid
  Variant (103)..(103): Xaa in position 103 is any amino acid
  Variant (104)..(104): Xaa in position 104 is any or no amino acid
  Variant (107)..(109): Xaa in position 107 to 109 is any amino acid
  Variant (112)..(113): Xaa in position 112 to 113 is any amino acid
  Variant (116)..(121): Xaa in position 116 to 121 is any amino acid
  Variant (123)..(124): Xaa in position 123 to 124 is any amino acid
  Variant (126)..(131): Xaa in position 126 to 131 is any amino acid
  Variant (132)..(154): Xaa in position 132 to 154 is any or no amino acid
  Variant (156)..(156): Xaa in position 156 is any amino acid
  Variant (161)..(168): Xaa in position 161 to 168 is any amino acid
  Variant (172)..(172): Xaa in position 172 is any amino acid
  Variant (174)..(174): Xaa in position 174 is any amino acid
WLXXXXSLTXXXXXXXXXXXXVXXXXXXXXXXXXXXXXXXXXXXXXXXXXXXXXVREVXLXXXXXXXWVXAXSVXXXXXXXXXXXXXXXXXXXXXXXXXXXLXXLGXXXLGXXLFXXXXXXRXXIXXXXXXXXXXXXXXXXXXXXXXXXXXXXXLXARRSXXXXXXXXLLVXEXFLP

SEQ ID NO: 48457 - protein, 9 aa, Artificial sequence
  Consensus
  Variant (2)..(2): Xaa in position 2 is Leu or Val
  Variant (3)..(5): Xaa in position 3 to 5 is any amino acid
  Variant (6)..(6): Xaa in position 6 is Asp, Gly, Ser or Thr
  Variant (8)..(8): Xaa in position 8 is Leu, Met or Val
WXXXXXSXT

SEQ ID NO: 48458 - protein, 17 aa, Artificial sequence
  Consensus
  Variant (3)..(3): Xaa in position 3 is Ile or Val
  Variant (4)..(4): Xaa in position 4 is any amino acid
  Variant (6)..(8): Xaa in position 6 to 8 is any amino acid
  Variant (9)..(9): Xaa in position 9 is Asp, Glu, Gly, Asn or Gln
  Variant (10)..(14): Xaa in position 10 to 14 is any amino acid
  Variant (15)..(15): Xaa in position 15 is Ala, Gly or Gln
  Variant (16)..(16): Xaa in position 16 is any amino acid
  Variant (17)..(17): Xaa in position 17 is Gln, Ser or Thr
REXXLXXXXXXXXXXXX

SEQ ID NO: 48459 - protein, 10 aa, Artificial sequence
  Consensus
  Variant (2)..(3): Xaa in position 2 to 3 is any amino acid
  Variant (4)..(4): Xaa in position 4 is Ala, Pro or Ser
  Variant (5)..(5): Xaa in position 5 is Ile or Leu
  Variant (7)..(8): Xaa in position 7 to 8 is any amino acid
  Variant (9)..(9): Xaa in position 9 is Leu or Val
GXXXXGXXXF

SEQ ID NO: 48460 - protein, 23 aa, Artificial sequence
  Consensus
  Variant (2)..(3): Xaa in position 2 to 3 is any or no amino acid
  Variant (5)..(5): Xaa in position 5 is any or no amino acid
  Variant (7)..(14): Xaa in position 7 to 14 is any amino acid
  Variant (15)..(15): Xaa in position 15 is Ile, Leu, Met or Val
  Variant (16)..(16): Xaa in position 16 is Leu or Met
  Variant (17)..(17): Xaa in position 17 is Ile, Leu or Val
  Variant (18)..(18): Xaa in position 18 is any amino acid
  Variant (20)..(21): Xaa in position 20 to 21 is any amino acid
  Variant (23)..(23): Xaa in position 23 is Ala, Pro or Ser
RXXRXSXXXXXXXXXXXXEXXLX

SEQ ID NO: 48461 - DNA, 1473 bp, Escherichia coli; identical to SEQ ID NO: 27148
  CDS (1)..(1473)

SEQ ID NO: 48462 - protein, 490 aa, Escherichia coli; identical to SEQ ID NO: 27149

SEQ ID NO: 48463 - DNA, 1620 bp, Saccharomyces cerevisiae; identical to SEQ ID NO: 27150
  CDS (1)..(1620)

SEQ ID NO: 48464 - protein, 539 aa, Saccharomyces cerevisiae; identical to SEQ ID NO: 27151

SEQ ID NO: 48465 - DNA, 1545 bp, Mesorhizobium loti MAFF303099; identical to SEQ ID NO: 27152
  CDS (1)..(1545): transl_table=11

SEQ ID NO: 48466 - protein, 514 aa, Mesorhizobium loti MAFF303099; identical to SEQ ID NO: 27153

SEQ ID NO: 48467 - DNA, 1656 bp, Mesorhizobium loti MAFF303099; identical to SEQ ID NO: 27154
  CDS (1)..(1656): transl_table=11

SEQ ID NO: 48468 - protein, 551 aa, Mesorhizobium loti MAFF303099; identical to SEQ ID NO: 27155

SEQ ID NO: 48469 - DNA, 1518 bp, Mesorhizobium loti MAFF303099; identical to SEQ ID NO: 27156
  CDS (1)..(1518): transl_table=11

SEQ ID NO: 48470 - protein, 505 aa, Mesorhizobium loti MAFF303099; identical to SEQ ID NO: 27157

SEQ ID NO: 48471 - DNA, 1563 bp, Thermotoga maritima MSB8; identical to SEQ ID NO: 27158
  CDS (1)..(1563): transl_table=11

SEQ ID NO: 48472 - protein, 520 aa, Thermotoga maritima MSB8; identical to SEQ ID NO: 27159

SEQ ID NO: 48473 - DNA, 1452 bp, Pasteurella multocida subsp. multocida str. Pm70; identical to SEQ ID NO: 27160
  CDS (1)..(1452): transl_table=11

SEQ ID NO: 48474 - protein, 483 aa, Pasteurella multocida subsp. multocida str. Pm70; identical to SEQ ID NO: 27161

SEQ ID NO: 48475 - DNA, 1518 bp, Pasteurella multocida subsp. multocida str. Pm70; identical to SEQ ID NO: 27162
  CDS (1)..(1518): transl_table=11

SEQ ID NO: 48476 - protein, 505 aa, Pasteurella multocida subsp. multocida str. Pm70; identical to SEQ ID NO: 27163

SEQ ID NO: 48477 - DNA, 2733 bp, Pasteurella multocida subsp. multocida str. Pm70; identical to SEQ ID NO: 27164
  CDS (1)..(2733): transl_table=11

SEQ ID NO: 48478 - protein, 910 aa, Pasteurella multocida subsp. multocida str. Pm70; identical to SEQ ID NO: 27165

SEQ ID NO: 48479 - DNA, 1566 bp, Pseudomonas aeruginosa PAO1; identical to SEQ ID NO: 27166
  CDS (1)..(1566): transl_table=11

SEQ ID NO: 48480 - protein, 521 aa, Pseudomonas aeruginosa PAO1; identical to SEQ ID NO: 27167

SEQ ID NO: 48481 - DNA, 2751 bp, Pseudomonas aeruginosa PAO1; identical to SEQ ID NO: 27168
  CDS (1)..(2751): transl_table=11

SEQ ID NO: 48482 - protein, 916 aa, Pseudomonas aeruginosa PAO1; identical to SEQ ID NO: 27169

SEQ ID NO: 48483 - DNA, 1698 bp, Lactococcus lactis subsp. lactis Il1403; identical to SEQ ID NO: 27170
  CDS (1)..(1698): transl_table=11

SEQ ID NO: 48484 - protein, 565 aa, Lactococcus lactis subsp. lactis Il1403; identical to SEQ ID NO: 27171

SEQ ID NO: 48485 - DNA, 1521 bp, Lactococcus lactis subsp. lactis Il1403; identical to SEQ ID NO: 27172
  CDS (1)..(1521): transl_table=11

SEQ ID NO: 48486 - protein, 506 aa, Lactococcus lactis subsp. lactis Il1403; identical to SEQ ID NO: 27173

SEQ ID NO: 48487 - DNA, 1590 bp, Escherichia coli O157:H7 EDL933; identical to SEQ ID NO: 27174
  CDS (1)..(1590): transl_table=11

SEQ ID NO: 48488 - protein, 529 aa, Escherichia coli O157:H7 EDL933; identical to SEQ ID NO: 27175
  misc_feature (383)..(383): Xaa can be any naturally occuring amino acid

SEQ ID NO: 48489 - DNA, 1590 bp, Escherichia coli O157:H7; identical to SEQ ID NO: 27176
  CDS (1)..(1590): transl_table=11

SEQ ID NO: 48490 - protein, 529 aa, Escherichia coli O157:H7; identical to SEQ ID NO: 27177

SEQ ID NO: 48491 - DNA, 1512 bp, Escherichia coli O157:H7; identical to SEQ ID NO: 27178
  CDS (1)..(1512): transl_table=11

SEQ ID NO: 48492 - protein, 503 aa, Escherichia coli O157:H7; identical to SEQ ID NO: 27179

SEQ ID NO: 48493 - DNA, 2685 bp, Escherichia coli O157:H7; identical to SEQ ID NO: 27180
  CDS (1)..(2685): transl_table=11

SEQ ID NO: 48494 - protein, 894 aa, Escherichia coli O157:H7; identical to SEQ ID NO: 27181

SEQ ID NO: 48495 - DNA, 2793 bp, Agrobacterium tumefaciens str. C58; identical to SEQ ID NO: 27182
  CDS (1)..(2793): transl_table=11

SEQ ID NO: 48496 - protein, 930 aa, Agrobacterium tumefaciens str. C58; identical to SEQ ID NO: 27183

SEQ ID NO: 48497 - DNA, 1593 bp, Staphylococcus aureus subsp. aureus Mu50; identical to SEQ ID NO: 27184
  CDS (1)..(1593): transl_table=11

SEQ ID NO: 48498 - protein, 530 aa, Staphylococcus aureus subsp. aureus Mu50; identical to SEQ ID NO: 27185

SEQ ID NO: 48499 - DNA, 1704 bp, Sinorhizobium meliloti 1021; identical to SEQ ID NO: 27186
  CDS (1)..(1704): transl_table=11

SEQ ID NO: 48500 - protein, 567 aa, Sinorhizobium meliloti 1021; identical to SEQ ID NO: 27187

SEQ ID NO: 48501 - DNA, 1491 bp, Yersinia pestis CO92; identical to SEQ ID NO: 27188
  CDS (1)..(1491)

SEQ ID NO: 48502 - protein, 496 aa, Yersinia pestis CO92; identical to SEQ ID NO: 27189

SEQ ID NO: 48503 - DNA, 1593 bp, Yersinia pestis CO92; identical to SEQ ID NO: 27190
  CDS (1)..(1593)

SEQ ID NO: 48504 - protein, 530 aa, Yersinia pestis CO92; identical to SEQ ID NO: 27191

SEQ ID NO: 48505 - DNA, 1596 bp, Yersinia pestis CO92; identical to SEQ ID NO: 27192
  CDS (1)..(1596)

SEQ ID NO: 48506 - protein, 531 aa, Yersinia pestis CO92; identical to SEQ ID NO: 27193

SEQ ID NO: 48507 - DNA, 1515 bp, Yersinia pestis CO92; identical to SEQ ID NO: 27194
  CDS (1)..(1515)

SEQ ID NO: 48508 - protein, 504 aa, Yersinia pestis CO92; identical to SEQ ID NO: 27195

SEQ ID NO: 48509 - DNA, 1536 bp, Sinorhizobium meliloti 1021; identical to SEQ ID NO: 27196
  CDS (1)..(1536): transl_table=11

SEQ ID NO: 48510 - protein, 511 aa, Sinorhizobium meliloti 1021; identical to SEQ ID NO: 27197

SEQ ID NO: 48511 - DNA, 1647 bp, Sinorhizobium meliloti 1021; identical to SEQ ID NO: 27198
  CDS (1)..(1647): transl_table=11

SEQ ID NO: 48512 - protein, 548 aa, Sinorhizobium meliloti 1021; identical to SEQ ID NO: 27199

SEQ ID NO: 48513 - DNA, 1602 bp, Sinorhizobium meliloti 1021; identical to SEQ ID NO: 27200
  CDS (1)..(1602): transl_table=11

SEQ ID NO: 48514 - protein, 533 aa, Sinorhizobium meliloti 1021; identical to SEQ ID NO: 27201

SEQ ID NO: 48515 - DNA, 1476 bp, Salmonella typhimurium LT2; identical to SEQ ID NO: 27202
  CDS (1)..(1476): transl_table=11

SEQ ID NO: 48516 - protein, 491 aa, Salmonella typhimurium LT2; identical to SEQ ID NO: 27203

SEQ ID NO: 48517 - DNA, 1593 bp, Salmonella typhimurium LT2; identical to SEQ ID NO: 27204
  CDS (1)..(1593): transl_table=11

SEQ ID NO: 48518 - protein, 530 aa, Salmonella typhimurium LT2; identical to SEQ ID NO: 27205

SEQ ID NO: 48519 - DNA, 1872 bp, Salmonella typhimurium LT2; identical to SEQ ID NO: 27206
  CDS (1)..(1872): transl_table=11

SEQ ID NO: 48520 - protein, 623 aa, Salmonella typhimurium LT2; identical to SEQ ID NO: 27207

SEQ ID NO: 48521 - DNA, 1590 bp, Salmonella typhimurium LT2; identical to SEQ ID NO: 27208
  CDS (1)..(1590): transl_table=11

SEQ ID NO: 48522 - protein, 529 aa, Salmonella typhimurium LT2; identical to SEQ ID NO: 27209

SEQ ID NO: 48523 - DNA, 1536 bp, Salmonella typhimurium LT2; identical to SEQ ID NO: 27210
  CDS (1)..(1536): transl_table=11

SEQ ID NO: 48524 - protein, 511 aa, Salmonella typhimurium LT2; identical to SEQ ID NO: 27211

SEQ ID NO: 48525 - DNA, 1656 bp, Ralstonia solanacearum GMI1000; identical to SEQ ID NO: 27212
  CDS (1)..(1656): transl_table=11

SEQ ID NO: 48526 - protein, 551 aa, Ralstonia solanacearum GMI1000; identical to SEQ ID NO: 27213

SEQ ID NO: 48527 - DNA, 1524 bp, Agrobacterium tumefaciens str. C58; identical to SEQ ID NO: 27214
  CDS (1)..(1524): transl_table=11

SEQ ID NO: 48528 - protein, 507 aa, Agrobacterium tumefaciens str. C58; identical to SEQ ID NO: 27215

SEQ ID NO: 48529 - DNA, 1764 bp, Brucella melitensis 16M; identical to SEQ ID NO: 27216
  CDS (1)..(1764): transl_table=11

SEQ ID NO: 48530 - protein, 587 aa, Brucella melitensis 16M; identical to SEQ ID NO: 27217

SEQ ID NO: 48531 - DNA, 1464 bp, Schizosaccharomyces pombe 972h-; identical to SEQ ID NO: 27218
  CDS (1)..(1464)

SEQ ID NO: 48532 - protein, 487 aa, Schizosaccharomyces pombe 972h-; identical to SEQ ID NO: 27219

SEQ ID NO: 48533 - DNA, 1734 bp, Corynebacterium glutamicum ATCC 13032; identical to SEQ ID NO: 27220
  CDS (1)..(1734): transl_table=11

SEQ ID NO: 48534 - protein, 577 aa, Corynebacterium glutamicum ATCC 13032; identical to SEQ ID NO: 27221

SEQ ID NO: 48535 - DNA, 1644 bp, Corynebacterium glutamicum ATCC 13032; identical to SEQ ID NO: 27222
  CDS (1)..(1644): transl_table=11

SEQ ID NO: 48536 - protein, 547 aa, Corynebacterium glutamicum ATCC 13032; identical to SEQ ID NO: 27223

SEQ ID NO: 48537 - DNA, 1524 bp, Thermoanaerobacter tengcongensis MB4; identical to SEQ ID NO: 27224
  CDS (1)..(1524): transl_table=11

SEQ ID NO: 48538 - protein, 507 aa, Thermoanaerobacter tengcongensis MB4; identical to SEQ ID NO: 27225

SEQ ID NO: 48539 - DNA, 1593 bp, Staphylococcus aureus subsp. aureus MW2; identical to SEQ ID NO: 27226
  CDS (1)..(1593): transl_table=11

SEQ ID NO: 48540 - protein, 530 aa, Staphylococcus aureus subsp. aureus MW2; identical to SEQ ID NO: 27227

SEQ ID NO: 48541 - DNA, 1497 bp, Yersinia pestis KIM; identical to SEQ ID NO: 27228
  CDS (1)..(1497): transl_table=11

SEQ ID NO: 48542 - protein, 498 aa, Yersinia pestis KIM; identical to SEQ ID NO: 27229

SEQ ID NO: 48543 - DNA, 1515 bp, Yersinia pestis KIM; identical to SEQ ID NO: 27230
  CDS (1)..(1515): transl_table=11

SEQ ID NO: 48544 - protein, 504 aa, Yersinia pestis KIM; identical to SEQ ID NO: 27231

SEQ ID NO: 48545 - DNA, 1557 bp, Yersinia pestis KIM; identical to SEQ ID NO: 27232
  CDS (1)..(1557): transl_table=11

SEQ ID NO: 48546 - protein, 518 aa, Yersinia pestis KIM; identical to SEQ ID NO: 27233

SEQ ID NO: 48547 - DNA, 1542 bp, Bifidobacterium longum NCC2705; identical to SEQ ID NO: 27234
  CDS (1)..(1542): transl_table=11

SEQ ID NO: 48548 - protein, 513 aa, Bifidobacterium longum NCC2705; identical to SEQ ID NO: 27235

SEQ ID NO: 48549 - DNA, 2433 bp, Bifidobacterium longum NCC2705; identical to SEQ ID NO: 27236
  CDS (1)..(2433): transl_table=11

SEQ ID NO: 48550 - protein, 810 aa, Bifidobacterium longum NCC2705; identical to SEQ ID NO: 27237

SEQ ID NO: 48551 - DNA, 1593 bp, Shigella flexneri 2a str. 301; identical to SEQ ID NO: 27238
  CDS (1)..(1593): transl_table=11

SEQ ID NO: 48552 - protein, 530 aa, Shigella flexneri 2a str. 301; identical to SEQ ID NO: 27239

SEQ ID NO: 48553 - DNA, 1512 bp, Shigella flexneri 2a str. 301; identical to SEQ ID NO: 27240
  CDS (1)..(1512): transl_table=11

SEQ ID NO: 48554 - protein, 503 aa, Shigella flexneri 2a str. 301; identical to SEQ ID NO: 27241

SEQ ID NO: 48555 - DNA, 2736 bp, Shigella flexneri 2a str. 301; identical to SEQ ID NO: 27242
  CDS (1)..(2736): transl_table=11

SEQ ID NO: 48556 - protein, 911 aa, Shigella flexneri 2a str. 301; identical to SEQ ID NO: 27243

SEQ ID NO: 48557 - DNA, 1413 bp, Shewanella oneidensis MR-1; identical to SEQ ID NO: 27244
  CDS (1)..(1413): transl_table=11

SEQ ID NO: 48558 - protein, 470 aa, Shewanella oneidensis MR-1; identical to SEQ ID NO: 27245

SEQ ID NO: 48559 - DNA, 1380 bp, Streptococcus agalactiae NEM316; identical to SEQ ID NO: 27246
  CDS (1)..(1380): transl_table=11

SEQ ID NO: 48560 - protein, 459 aa, Streptococcus agalactiae NEM316; identical to SEQ ID NO: 27247

SEQ ID NO: 48561 - DNA, 1740 bp, Corynebacterium efficiens YS-314; identical to SEQ ID NO: 27248
  CDS (1)..(1740): transl_table=11

SEQ ID NO: 48562 - protein, 579 aa, Corynebacterium efficiens YS-314; identical to SEQ ID NO: 27249

SEQ ID NO: 48563 - DNA, 1476 bp, Corynebacterium efficiens YS-314; identical to SEQ ID NO: 27250
  CDS (1)..(1476): transl_table=11

SEQ ID NO: 48564 - protein, 491 aa, Corynebacterium efficiens YS-314; identical to SEQ ID NO: 27251

SEQ ID NO: 48565 - DNA, 2721 bp, Pseudomonas putida KT2440; identical to SEQ ID NO: 27252
  CDS (1)..(2721): transl_table=11

SEQ ID NO: 48566 - protein, 906 aa, Pseudomonas putida KT2440; identical to SEQ ID NO: 27253

SEQ ID NO: 48567 - DNA, 1485 bp, Escherichia coli CFT073; identical to SEQ ID NO: 27254
  CDS (1)..(1485): transl_table=11

SEQ ID NO: 48568 - protein, 494 aa, Escherichia coli CFT073; identical to SEQ ID NO: 27255

SEQ ID NO: 48569 - DNA, 1512 bp, Escherichia coli CFT073; identical to SEQ ID NO: 27256
  CDS (1)..(1512): transl_table=11

SEQ ID NO: 48570 - protein, 503 aa, Escherichia coli CFT073; identical to SEQ ID NO: 27257

SEQ ID NO: 48571 - DNA, 2736 bp, Escherichia coli CFT073; identical to SEQ ID NO: 27258
  CDS (1)..(2736): transl_table=11

SEQ ID NO: 48572 - protein, 911 aa, Escherichia coli CFT073; identical to SEQ ID NO: 27259

SEQ ID NO: 48573 - DNA, 1578 bp, Escherichia coli CFT073; identical to SEQ ID NO: 27260
  CDS (1)..(1578): transl_table=11

SEQ ID NO: 48574 - protein, 525 aa, Escherichia coli CFT073; identical to SEQ ID NO: 27261

SEQ ID NO: 48575 - DNA, 1542 bp, Vibrio vulnificus CMCP6; identical to SEQ ID NO: 27262
  CDS (1)..(1542): transl_table=11

SEQ ID NO: 48576 - protein, 513 aa, Vibrio vulnificus CMCP6; identical to SEQ ID NO: 27263

SEQ ID NO: 48577 - DNA, 1485 bp, Bradyrhizobium japonicum USDA 110; identical to SEQ ID NO: 27264
  CDS (1)..(1485)

SEQ ID NO: 48578 - protein, 494 aa, Bradyrhizobium japonicum USDA 110; identical to SEQ ID NO: 27265

SEQ ID NO: 48579 - DNA, 1518 bp, Clostridium tetani E88; identical to SEQ ID NO: 27266
  CDS (1)..(1518): transl_table=11

SEQ ID NO: 48580 - protein, 505 aa, Clostridium tetani E88; identical to SEQ ID NO: 27267

SEQ ID NO: 48581 - DNA, 1407 bp, Lactobacillus plantarum WCFS1; identical to SEQ ID NO: 27268
  CDS (1)..(1407): transl_table=11

SEQ ID NO: 48582 - protein, 468 aa, Lactobacillus plantarum WCFS1; identical to SEQ ID NO: 27269

SEQ ID NO: 48583 - DNA, 1629 bp, Tropheryma whipplei str. Twist; identical to SEQ ID NO: 27270
  CDS (1)..(1629): transl_table=11

SEQ ID NO: 48584 - protein, 542 aa, Tropheryma whipplei str. Twist; identical to SEQ ID NO: 27271

SEQ ID NO: 48585 - DNA, 1557 bp, Tropheryma whipplei str. Twist; identical to SEQ ID NO: 27272
  CDS (1)..(1557): transl_table=11

SEQ ID NO: 48586 - protein, 518 aa, Tropheryma whipplei str. Twist; identical to SEQ ID NO: 27273

SEQ ID NO: 48587 - DNA, 1629 bp, Tropheryma whipplei TW08/27; identical to SEQ ID NO: 27274
  CDS (1)..(1629): transl_table=11

SEQ ID NO: 48588 - protein, 542 aa, Tropheryma whipplei TW08/27; identical to SEQ ID NO: 27275

SEQ ID NO: 48589 - DNA, 1557 bp, Tropheryma whipplei TW08/27; identical to SEQ ID NO: 27276
  CDS (1)..(1557): transl_table=11

SEQ ID NO: 48590 - protein, 518 aa, Tropheryma whipplei TW08/27; identical to SEQ ID NO: 27277

SEQ ID NO: 48591 - DNA, 1584 bp, Pseudomonas syringae pv. tomato str. DC3000; identical to SEQ ID NO: 27278
  CDS (1)..(1584): transl_table=11

SEQ ID NO: 48592 - protein, 527 aa, Pseudomonas syringae pv. tomato str. DC3000; identical to SEQ ID NO: 27279

SEQ ID NO: 48593 - DNA, 1455 bp, Vibrio parahaemolyticus RIMD 2210633; identical to SEQ ID NO: 27280
  CDS (1)..(1455): transl_table=11

SEQ ID NO: 48594 - protein, 484 aa, Vibrio parahaemolyticus RIMD 2210633; identical to SEQ ID NO: 27281

SEQ ID NO: 48595 - DNA, 1632 bp, Vibrio parahaemolyticus RIMD 2210633; identical to SEQ ID NO: 27282
  CDS (1)..(1632): transl_table=11

SEQ ID NO: 48596 - protein, 543 aa, Vibrio parahaemolyticus RIMD 2210633; identical to SEQ ID NO: 27283

SEQ ID NO: 48597 - DNA, 1590 bp, Salmonella enterica subsp. enterica serovar Typhi Ty2; identical to SEQ ID NO: 27284
  CDS (1)..(1590): transl_table=11

SEQ ID NO: 48598 - protein, 529 aa, Salmonella enterica subsp. enterica serovar Typhi Ty2; identical to SEQ ID NO: 27285

SEQ ID NO: 48599 - DNA, 1596 bp, Salmonella enterica subsp. enterica serovar Typhi Ty2; identical to SEQ ID NO: 27286
  CDS (1)..(1596): transl_table=11

SEQ ID NO: 48600 - protein, 531 aa, Salmonella enterica subsp. enterica serovar Typhi Ty2; identical to SEQ ID NO: 27287

SEQ ID NO: 48601 - DNA, 1536 bp, Salmonella enterica subsp. enterica serovar Typhi Ty2; identical to SEQ ID NO: 27288
  CDS (1)..(1536): transl_table=11

SEQ ID NO: 48602 - protein, 511 aa, Salmonella enterica subsp. enterica serovar Typhi Ty2 [sequence omitted]

SEQ ID NO: 48603 - DNA, 2742 bp, Salmonella enterica subsp. enterica serovar Typhi Ty2; identical to SEQ ID NO: 27290
  CDS (1)..(2742): transl_table=11

SEQ ID NO: 48604 - protein, 913 aa, Salmonella enterica subsp. enterica serovar Typhi Ty2; identical to SEQ ID NO: 27291

SEQ ID NO: 48605 - DNA, 1470 bp, Bacteroides thetaiotaomicron VPI-5482; identical to SEQ ID NO: 27292
  CDS (1)..(1470): transl_table=11

SEQ ID NO: 48606 - protein, 489 aa, Bacteroides thetaiotaomicron VPI-5482; identical to SEQ ID NO: 27293

SEQ ID NO: 48607 - DNA, 1455 bp, Bacteroides thetaiotaomicron VPI-5482; identical to SEQ ID NO: 27294
  CDS (1)..(1455): transl_table=11

SEQ ID NO: 48608 - protein, 484 aa, Bacteroides thetaiotaomicron VPI-5482; identical to SEQ ID NO: 27295

SEQ ID NO: 48609 - DNA, 1425 bp, Enterococcus faecalis V583; identical to SEQ ID NO: 27296
  CDS (1)..(1425): transl_table=11

SEQ ID NO: 48610 - protein, 474 aa, Enterococcus faecalis V583; identical to SEQ ID NO: 27297

SEQ ID NO: 48611 - DNA, 1542 bp, Streptomyces avermitilis MA-4680; identical to SEQ ID NO: 27298
  CDS (1)..(1542)

SEQ ID NO: 48612 - protein, 513 aa, Streptomyces avermitilis MA-4680; identical to SEQ ID NO: 27299

SEQ ID NO: 48613 - DNA, 1533 bp, Bacillus cereus ATCC 14579; identical to SEQ ID NO: 27300
  CDS (1)..(1533): transl_table=11

SEQ ID NO: 48614 - protein, 510 aa, Bacillus cereus ATCC 14579; identical to SEQ ID NO: 27301

SEQ ID NO: 48615 - DNA, 2772 bp, Nitrosomonas europaea ATCC 19718; identical to SEQ ID NO: 27302
  CDS (1)..(2772): transl_table=11

SEQ ID NO: 48616 - protein, 923 aa, Nitrosomonas europaea ATCC 19718; identical to SEQ ID NO: 27303

SEQ ID NO: 48617 - DNA, 1533 bp, Bacillus anthracis str. Ames; identical to SEQ ID NO: 27304
  CDS (1)..(1533): transl_table=11

SEQ ID NO: 48618 - protein, 510 aa, Bacillus anthracis str. Ames; identical to SEQ ID NO: 27305

SEQ ID NO: 48619 - DNA, 1623 bp, Prochlorococcus marinus subsp. marinus str. CCMP1375; identical to SEQ ID NO: 27306
  CDS (1)..(1623): transl_table=11

SEQ ID NO: 48620 - protein, 540 aa, Prochlorococcus marinus subsp. marinus str. CCMP1375; identical to SEQ ID NO: 27307

SEQ ID NO: 48621 - DNA, 1635 bp, Bordetella pertussis Tohama I; identical to SEQ ID NO: 27308
  CDS (1)..(1635): transl_table=11

SEQ ID NO: 48622 - protein, 544 aa, Bordetella pertussis Tohama I; identical to SEQ ID NO: 27309

SEQ ID NO: 48623 - DNA, 1761 bp, Bordetella bronchiseptica RB50; identical to SEQ ID NO: 27310
  CDS (1)..(1761)

SEQ ID NO: 48624 - protein, 586 aa, Bordetella bronchiseptica RB50; identical to SEQ ID NO: 27311

SEQ ID NO: 48625 - DNA, 1476 bp, Photorhabdus luminescens subsp. laumondii TTO1; identical to SEQ ID NO: 27312
  CDS (1)..(1476): transl_table=11

SEQ ID NO: 48626 - protein, 491 aa, Photorhabdus luminescens subsp. laumondii TTO1; identical to SEQ ID NO: 27313

SEQ ID NO: 48627 - DNA, 1596 bp, Photorhabdus luminescens subsp. laumondii TTO1; identical to SEQ ID NO: 27314
  CDS (1)..(1596): transl_table=11

SEQ ID NO: 48628 - protein, 531 aa, Photorhabdus luminescens subsp. laumondii TTO1; identical to SEQ ID NO: 27315

SEQ ID NO: 48629 - DNA, 1536 bp, Photorhabdus luminescens subsp. laumondii TTO1; identical to SEQ ID NO: 27316
  CDS (1)..(1536): transl_table=11

SEQ ID NO: 48630 - protein, 511 aa, Photorhabdus luminescens subsp. laumondii TTO1; identical to SEQ ID NO: 27317

SEQ ID NO: 48631 - DNA, 1683 bp, Corynebacterium diphtheriae NCTC 13129; identical to SEQ ID NO: 27318
  CDS (1)..(1683): transl_table=11

SEQ ID NO: 48632 - protein, 560 aa, Corynebacterium diphtheriae NCTC 13129; identical to SEQ ID NO: 27319

SEQ ID NO: 48633 - DNA, 1443 bp, Corynebacterium diphtheriae NCTC 13129; identical to SEQ ID NO: 27320
  CDS (1)..(1443): transl_table=11

SEQ ID NO: 48634 - protein, 480 aa, Corynebacterium diphtheriae NCTC 13129; identical to SEQ ID NO: 27321

SEQ ID NO: 48635 - DNA, 2715 bp, Rhodopseudomonas palustris CGA009; identical to SEQ ID NO: 27322
  CDS (1)..(2715): transl_table=11

SEQ ID NO: 48636 - protein, 904 aa, Rhodopseudomonas palustris CGA009; identical to SEQ ID NO: 27323

SEQ ID NO: 48637 - DNA, 2796 bp, Rhodopseudomonas palustris CGA009; identical to SEQ ID NO: 27324
  CDS (1)..(2796): transl_table=11

SEQ ID NO: 48638 - protein, 931 aa, Rhodopseudomonas palustris CGA009; identical to SEQ ID NO: 27325

SEQ ID NO: 48639 - DNA, 2793 bp, Geobacter sulfurreducens PCA; identical to SEQ ID NO: 27326
  CDS (1)..(2793): transl_table=11

SEQ ID NO: 48640 - protein, 930 aa, Geobacter sulfurreducens PCA; identical to SEQ ID NO: 27327

SEQ ID NO: 48641 - DNA, 1347 bp, Lactobacillus johnsonii NCC 533; identical to SEQ ID NO: 27328
  CDS (1)..(1347): transl_table=11

SEQ ID NO: 48642 - protein, 448 aa, Lactobacillus johnsonii NCC 533; identical to SEQ ID NO: 27329

SEQ ID NO: 48643 - DNA, 1425 bp, Treponema denticola ATCC 35405; identical to SEQ ID NO: 27330
  CDS (1)..(1425): transl_table=11

SEQ ID NO: 48644 - protein, 474 aa, Treponema denticola ATCC 35405; identical to SEQ ID NO: 27331

SEQ ID NO: 48645 - DNA, 1509 bp, Treponema denticola ATCC 35405; identical to SEQ ID NO: 27332
  CDS (1)..(1509): transl_table=11

SEQ ID NO: 48646 - protein, 502 aa, Treponema denticola ATCC 35405; identical to SEQ ID NO: 27333

SEQ ID NO: 48647 - DNA, 1446 bp, Treponema denticola ATCC 35405; identical to SEQ ID NO: 27334
  CDS (1)..(1446): transl_table=11

SEQ ID NO: 48648 - protein, 481 aa, Treponema denticola ATCC 35405; identical to SEQ ID NO: 27335

SEQ ID NO: 48649 - DNA, 1509 bp, Treponema denticola ATCC 35405; identical to SEQ ID NO: 27336
  CDS (1)..(1509): transl_table=11

SEQ ID NO: 48650 - protein, 502 aa, Treponema denticola ATCC 35405; identical to SEQ ID NO: 27337

SEQ ID NO: 48651 - DNA, 1743 bp, Yersinia pestis biovar Medievalis str. 91001; identical to SEQ ID NO: 27338
  CDS (1)..(1743): transl_table=11

SEQ ID NO: 48652 - protein, 580 aa, Yersinia pestis biovar Medievalis str. 91001; identical to SEQ ID NO: 27339

SEQ ID NO: 48653 - DNA, 2085 bp, Neurospora crassa; identical to SEQ ID NO: 27340
  CDS (1)..(2085)

SEQ ID NO: 48654 - protein, 694 aa, Neurospora crassa; identical to SEQ ID NO: 27341

SEQ ID NO: 48655 - DNA, 2052 bp, Magnaporthe grisea 70-15; identical to SEQ ID NO: 27342
  CDS (1)..(2052)

SEQ ID NO: 48656 - protein, 683 aa, Magnaporthe grisea 70-15; identical to SEQ ID NO: 27343

SEQ ID NO: 48657 - DNA, 1965 bp, Gibberella zeae PH-1; identical to SEQ ID NO: 27344
  CDS (1)..(1965)

SEQ ID NO: 48658 - protein, 654 aa, Gibberella zeae PH-1; identical to SEQ ID NO: 27345

SEQ ID NO: 48659 - DNA, 2004 bp, Ustilago maydis 521; identical to SEQ ID NO: 27346
  CDS (1)..(2004)

SEQ ID NO: 48660 - protein, 667 aa, Ustilago maydis 521; identical to SEQ ID NO: 27347

SEQ ID NO: 48661 - DNA, 1635 bp, Candida glabrata CBS138; identical to SEQ ID NO: 27348
  CDS (1)..(1635)

SEQ ID NO: 48662 - protein, 544 aa, Candida glabrata CBS138; identical to SEQ ID NO: 27349

SEQ ID NO: 48663 - DNA, 1566 bp, Kluyveromyces lactis NRRL Y-1140; identical to SEQ ID NO: 27350
  CDS (1)..(1566)

SEQ ID NO: 48664 - protein, 521 aa, Kluyveromyces lactis NRRL Y-1140; identical to SEQ ID NO: 27351

SEQ ID NO: 48665 - DNA, 1641 bp, Debaryomyces hansenii CBS767; identical to SEQ ID NO: 27352
  CDS (1)..(1641)

SEQ ID NO: 48666 - protein, 546 aa, Debaryomyces hansenii CBS767; identical to SEQ ID NO: 27353

SEQ ID NO: 48667 - DNA, 1503 bp, Yarrowia lipolytica CLIB99; identical to SEQ ID NO: 27354
  CDS (1)..(1503)

SEQ ID NO: 48668 - protein, 500 aa, Yarrowia lipolytica CLIB99; identical to SEQ ID NO: 27355

SEQ ID NO: 48669 - DNA, 1632 bp, Cryptococcus neoformans var. neoformans JEC21; identical to SEQ ID NO: 27356
  CDS (1)..(1632)

SEQ ID NO: 48670 - protein, 543 aa, Cryptococcus neoformans var. neoformans JEC21; identical to SEQ ID NO: 27357

SEQ ID NO: 48671 - DNA, 1638 bp, Candida albicans SC5314; identical to SEQ ID NO: 27358
  CDS (1)..(1638): transl_table=12

SEQ ID NO: 48672 - protein, 545 aa, Candida albicans SC5314; identical to SEQ ID NO: 27359

SEQ ID NO: 48673 - DNA, 1899 bp, Desulfovibrio vulgaris subsp. vulgaris str. Hildenborough; identical to SEQ ID NO: 27360
  CDS (1)..(1899): transl_table=11

SEQ ID NO: 48674 - protein, 632 aa, Desulfovibrio vulgaris subsp. vulgaris str. Hildenborough; identical to SEQ ID NO: 27361

SEQ ID NO: 48675 - DNA, 1527 bp, Bacillus anthracis str. Sterne; identical to SEQ ID NO: 27362
  CDS (1)..(1527): transl_table=11

SEQ ID NO: 48676 - protein, 508 aa, Bacillus anthracis str. Sterne; identical to SEQ ID NO: 27363

SEQ ID NO: 48677 - DNA, 1593 bp, Staphylococcus aureus subsp. aureus MRSA252; identical to SEQ ID NO: 27364
  CDS (1)..(1593): transl_table=11

SEQ ID NO: 48678 - protein, 530 aa, Staphylococcus aureus subsp. aureus MRSA252; identical to SEQ ID NO: 27365

SEQ ID NO: 48679 - DNA, 1476 bp, Erwinia carotovora subsp. atroseptica SCRI1043; identical to SEQ ID NO: 27366
  CDS (1)..(1476)

SEQ ID NO: 48680 - protein, 491 aa, Erwinia carotovora subsp. atroseptica SCRI1043; identical to SEQ ID NO: 27367

SEQ ID NO: 48681 - DNA, 1617 bp, Erwinia carotovora subsp. atroseptica SCRI1043; identical to SEQ ID NO: 27368
  CDS (1)..(1617)

SEQ ID NO: 48682 - protein, 538 aa, Erwinia carotovora subsp. atroseptica SCRI1043; identical to SEQ ID NO: 27369

SEQ ID NO: 48683 - DNA, 1380 bp, Desulfotalea psychrophila LSv54; identical to SEQ ID NO: 27370
  CDS (1)..(1380): transl_table=11

SEQ ID NO: 48684 - protein, 459 aa, Desulfotalea psychrophila LSv54; identical to SEQ ID NO: 27371

SEQ ID NO: 48685 - DNA, 1491 bp, Yersinia pseudotuberculosis IP 32953; identical to SEQ ID NO: 27372
  CDS (1)..(1491): transl_table=11

SEQ ID NO: 48686 - protein, 496 aa, Yersinia pseudotuberculosis IP 32953; identical to SEQ ID NO: 27373

SEQ ID NO: 48687 - DNA, 1743 bp, Yersinia pseudotuberculosis IP 32953; identical to SEQ ID NO: 27374
  CDS (1)..(1743): transl_table=11

SEQ ID NO: 48688 - protein, 580 aa, Yersinia pseudotuberculosis IP 32953; identical to SEQ ID NO: 27375

SEQ ID NO: 48689 - DNA, 1593 bp, Yersinia pseudotuberculosis IP 32953; identical to SEQ ID NO: 27376
  CDS (1)..(1593): transl_table=11

SEQ ID NO: 48690 - protein, 530 aa, Yersinia pseudotuberculosis IP 32953; identical to SEQ ID NO: 27377

SEQ ID NO: 48691 - DNA, 1764 bp, Yersinia pseudotuberculosis IP 32953; identical to SEQ ID NO: 27378
  CDS (1)..(1764): transl_table=11

SEQ ID NO: 48692 - protein, 587 aa, Yersinia pseudotuberculosis IP 32953; identical to SEQ ID NO: 27379

SEQ ID NO: 48693 - DNA, 1689 bp, Symbiobacterium thermophilum IAM 14863; identical to SEQ ID NO: 27380
  CDS (1)..(1689): transl_table=11

SEQ ID NO: 48694 - protein, 562 aa, Symbiobacterium thermophilum IAM 14863; identical to SEQ ID NO: 27381

SEQ ID NO: 48695 - DNA, 1533 bp, Bacillus cereus E33L; identical to SEQ ID NO: 27382
  CDS (1)..(1533): transl_table=11

SEQ ID NO: 48696 - protein, 510 aa, Bacillus cereus E33L; identical to SEQ ID NO: 27383

SEQ ID NO: 48697 - DNA, 1470 bp, Mannheimia succiniciproducens MBEL55E; identical to SEQ ID NO: 27384
  CDS (1)..(1470): transl_table=11

SEQ ID NO: 48698 - protein, 489 aa, Mannheimia succiniciproducens MBEL55E; identical to SEQ ID NO: 27385

SEQ ID NO: 48699 - DNA, 2736 bp, Mannheimia succiniciproducens MBEL55E; identical to SEQ ID NO: 27386
  CDS (1)..(2736): transl_table=11

SEQ ID NO: 48700 - protein, 911 aa, Mannheimia succiniciproducens MBEL55E; identical to SEQ ID NO: 27387

SEQ ID NO: 48701 - DNA, 1461 bp, Bacteroides fragilis YCH46; identical to SEQ ID NO: 27388
  CDS (1)..(1461): transl_table=11

SEQ ID NO: 48702 - protein, 486 aa, Bacteroides fragilis YCH46; identical to SEQ ID NO: 27389

SEQ ID NO: 48703 - DNA, 1455 bp, Bacteroides fragilis YCH46; identical to SEQ ID NO: 27390
  CDS (1)..(1455): transl_table=11

SEQ ID NO: 48704 - protein, 484 aa, Bacteroides fragilis YCH46; identical to SEQ ID NO: 27391

SEQ ID NO: 48705 - DNA, 1650 bp, Burkholderia mallei ATCC 23344; identical to SEQ ID NO: 27392
  CDS (1)..(1650): transl_table=11

SEQ ID NO: 48706 - protein, 549 aa, Burkholderia mallei ATCC 23344; identical to SEQ ID NO: 27393

SEQ ID NO: 48707 - DNA, 3216 bp, Burkholderia mallei ATCC 23344; identical to SEQ ID NO: 27394
  CDS (1)..(3216): transl_table=11

SEQ ID NO: 48708 - protein, 1071 aa, Burkholderia mallei ATCC 23344; identical to SEQ ID NO: 27395

SEQ ID NO: 48709 - DNA, 3225 bp, Burkholderia pseudomallei K96243; identical to SEQ ID NO: 27396
  CDS (1)..(3225): transl_table=11

SEQ ID NO: 48710 - protein, 1074 aa, Burkholderia pseudomallei K96243; identical to SEQ ID NO: 27397

SEQ ID NO: 48711 - DNA, 1641 bp, Methylococcus capsulatus str. Bath; identical to SEQ ID NO: 27398
  CDS (1)..(1641): transl_table=11

SEQ ID NO: 48712 - protein, 546 aa, Methylococcus capsulatus str. Bath; identical to SEQ ID NO: 27399

SEQ ID NO: 48713 - DNA, 2724 bp, Methylococcus capsulatus str. Bath; identical to SEQ ID NO: 27400
  CDS (1)..(2724): transl_table=11

SEQ ID NO: 48714 - protein, 907 aa, Methylococcus capsulatus str. Bath; identical to SEQ ID NO: 27401

SEQ ID NO: 48715 - DNA, 1446 bp, Mycoplasma hyopneumoniae 232; identical to SEQ ID NO: 27402
  CDS (1)..(1446): transl_table=4

SEQ ID NO: 48716 - protein, 481 aa, Mycoplasma hyopneumoniae 232; identical to SEQ ID NO: 27403

SEQ ID NO: 48717 - DNA, 1686 bp, Nocardia farcinica IFM 10152; identical to SEQ ID NO: 27404
  CDS (1)..(1686): transl_table=11

SEQ ID NO: 48718 - protein, 561 aa, Nocardia farcinica IFM 10152; identical to SEQ ID NO: 27405

SEQ ID NO: 48719 - DNA, 783 bp, Streptococcus thermophilus LMG 18311; identical to SEQ ID NO: 27406
  CDS (1)..(783): transl_table=11

SEQ ID NO: 48720 - protein, 260 aa, Streptococcus thermophilus LMG 18311; identical to SEQ ID NO: 27407

SEQ ID NO: 48721 - DNA, 1707 bp, Streptococcus thermophilus CNRZ1066; identical to SEQ ID NO: 27408
  CDS (1)..(1707): transl_table=11

SEQ ID NO: 48722 - protein, 568 aa, Streptococcus thermophilus CNRZ1066; identical to SEQ ID NO: 27409

SEQ ID NO: 48723 - DNA, 1590 bp, Salmonella enterica subsp. enterica serovar Paratyphi A str. ATCC; identical to SEQ ID NO: 27410
  CDS (1)..(1590): transl_table=11

SEQ ID NO: 48724 - protein, 529 aa, Salmonella enterica subsp. enterica serovar Paratyphi A str. ATCC; identical to SEQ ID NO: 27411

SEQ ID NO: 48725 - DNA, 1572 bp, Salmonella enterica subsp. enterica serovar Paratyphi A str. ATCC; identical to SEQ ID NO: 27412
  CDS (1)..(1572): transl_table=11

SEQ ID NO: 48726 - protein, 523 aa, Salmonella enterica subsp. enterica serovar Paratyphi A str. ATCC; identical to SEQ ID NO: 27413

SEQ ID NO: 48727 - DNA, 1476 bp, Salmonella enterica subsp. enterica serovar Paratyphi A str. ATCC; identical to SEQ ID NO: 27414
  CDS (1)..(1476): transl_table=11

SEQ ID NO: 48728 - protein, 491 aa, Salmonella enterica subsp. enterica serovar Paratyphi A str. ATCC; identical to SEQ ID NO: 27415

SEQ ID NO: 48729 - DNA, 1536 bp, Salmonella enterica subsp. enterica serovar Paratyphi A str. ATCC; identical to SEQ ID NO: 27416
  CDS (1)..(1536): transl_table=11

SEQ ID NO: 48730 - protein, 511 aa, Salmonella enterica subsp. enterica serovar Paratyphi A str. ATCC; identical to SEQ ID NO: 27417

SEQ ID NO: 48731 - DNA, 1614 bp, Idiomarina loihiensis L2TR; identical to SEQ ID NO: 27418
  CDS (1)..(1614): transl_table=11

SEQ ID NO: 48732 - protein, 537 aa, Idiomarina loihiensis L2TR; identical to SEQ ID NO: 27419

SEQ ID NO: 48733 - DNA, 2919 bp, Azoarcus sp. EbN1; identical to SEQ ID NO: 27420
  CDS (1)..(2919): transl_table=11

SEQ ID NO: 48734 - protein, 972 aa, Azoarcus sp. EbN1; identical to SEQ ID NO: 27421

SEQ ID NO: 48735 - DNA, 2829 bp, Zymomonas mobilis subsp. mobilis ZM4; identical to SEQ ID NO: 27422
  CDS (1)..(2829): transl_table=11

SEQ ID NO: 48736 - protein, 942 aa, Zymomonas mobilis subsp. mobilis ZM4; identical to SEQ ID NO: 27423

SEQ ID NO: 48737 - DNA, 1593 bp, Zymomonas mobilis subsp. mobilis ZM4; identical to SEQ ID NO: 27424
  CDS (1)..(1593): transl_table=11

SEQ ID NO: 48738 - protein, 530 aa, Zymomonas mobilis subsp. mobilis ZM4; identical to SEQ ID NO: 27425

SEQ ID NO: 48739 - DNA, 1599 bp, Silicibacter pomeroyi DSS-3; identical to SEQ ID NO: 27426
  CDS (1)..(1599): transl_table=11

SEQ ID NO: 48740 - protein, 532 aa, Silicibacter pomeroyi DSS-3; identical to SEQ ID NO: 27427

SEQ ID NO: 48741 - DNA, 2727 bp, Silicibacter pomeroyi DSS-3; identical to SEQ ID NO: 27428
  CDS (1)..(2727): transl_table=11

SEQ ID NO: 48742 - protein, 908 aa, Silicibacter pomeroyi DSS-3; identical to SEQ ID NO: 27429

SEQ ID NO: 48743 - DNA, 1665 bp, Synechococcus elongatus PCC 6301; identical to SEQ ID NO: 27430
  CDS (1)..(1665): transl_table=11

SEQ ID NO: 48744 - protein, 554 aa, Synechococcus elongatus PCC 6301; identical to SEQ ID NO: 27431

SEQ ID NO: 48745 - DNA, 1593 bp, Staphylococcus aureus subsp. aureus COL; identical to SEQ ID NO: 27432
  CDS (1)..(1593): transl_table=11

SEQ ID NO: 48746 - protein, 530 aa, Staphylococcus aureus subsp. aureus COL; identical to SEQ ID NO: 27433

SEQ ID NO: 48747 - DNA, 1701 bp, Lactobacillus acidophilus NCFM; identical to SEQ ID NO: 27434
  CDS (1)..(1701): transl_table=11

SEQ ID NO: 48748 - protein, 566 aa, Lactobacillus acidophilus NCFM; identical to SEQ ID NO: 27435

SEQ ID NO: 48749 - DNA, 1560 bp, Salmonella enterica subsp. enterica serovar Choleraesuis str; identical to SEQ ID NO: 27436
  CDS (1)..(1560): transl_table=11

SEQ ID NO: 48750 - protein, 519 aa, Salmonella enterica subsp. enterica serovar Choleraesuis str; identical to SEQ ID NO: 27437

SEQ ID NO: 48751 - DNA, 1596 bp, Salmonella enterica subsp. enterica serovar Choleraesuis str; identical to SEQ ID NO: 27438
  CDS (1)..(1596): transl_table=11

SEQ ID NO: 48752 - protein, 531 aa, Salmonella enterica subsp. enterica serovar Choleraesuis str; identical to SEQ ID NO: 27439

SEQ ID NO: 48753 - DNA, 1590 bp, Salmonella enterica subsp. enterica serovar Choleraesuis str; identical to SEQ ID NO: 27440
  CDS (1)..(1590): transl_table=11

SEQ ID NO: 48754 - protein, 529 aa, Salmonella enterica subsp. enterica serovar Choleraesuis str; identical to SEQ ID NO: 27441

SEQ ID NO: 48755 - DNA, 2742 bp, Salmonella enterica subsp. enterica serovar Choleraesuis str; identical to SEQ ID NO: 27442
  CDS (1)..(2742): transl_table=11

SEQ ID NO: 48756 - protein, 913 aa, Salmonella enterica subsp. enterica serovar Choleraesuis str; identical to SEQ ID NO: 27443

SEQ ID NO: 48757 - DNA, 1584 bp, Pseudomonas syringae pv. syringae B728a; identical to SEQ ID NO: 27444
  CDS (1)..(1584)

SEQ ID NO: 48758 - protein, 527 aa, Pseudomonas syringae pv. syringae B728a; identical to SEQ ID NO: 27445

SEQ ID NO: 48759 - DNA, 1578 bp, Sulfolobus acidocaldarius DSM 639; identical to SEQ ID NO: 27446
  CDS (1)..(1578): transl_table=11

SEQ ID NO: 48760 - protein, 525 aa, Sulfolobus acidocaldarius DSM 639; identical to SEQ ID NO: 27447

SEQ ID NO: 48761 - DNA, 1374 bp, Leuconostoc mesenteroides subsp. mesenteroides ATCC 8293; identical to SEQ ID NO: 27448
  CDS (1)..(1374)

SEQ ID NO: 48762 - protein, 457 aa, Leuconostoc mesenteroides subsp. mesenteroides ATCC 8293; identical to SEQ ID NO: 27449

SEQ ID NO: 48763 - DNA, 1677 bp, Leuconostoc mesenteroides subsp. mesenteroides ATCC 8293; identical to SEQ ID NO: 27450
  CDS (1)..(1677)

SEQ ID NO: 48764 - protein, 558 aa, Leuconostoc mesenteroides subsp. mesenteroides ATCC 8293; identical to SEQ ID NO: 27451

SEQ ID NO: 48765 - DNA, 1674 bp, Bifidobacterium longum DJO10A; identical to SEQ ID NO: 27452
  CDS (1)..(1674)

SEQ ID NO: 48766 - protein, 557 aa, Bifidobacterium longum DJO10A; identical to SEQ ID NO: 27453

SEQ ID NO: 48767 - DNA, 1518 bp, Haemophilus somnus 129PT; identical to SEQ ID NO: 27454
  CDS (1)..(1518)

SEQ ID NO: 48768 - protein, 505 aa, Haemophilus somnus 129PT; identical to SEQ ID NO: 27455

SEQ ID NO: 48769 - DNA, 1566 bp, Pseudomonas syringae pv. syringae B728a; identical to SEQ ID NO: 27456
  CDS (1)..(1566)

SEQ ID NO: 48770 - protein, 521 aa, Pseudomonas syringae pv. syringae B728a; identical to SEQ ID NO: 27457

SEQ ID NO: 48771 - DNA, 1545 bp, Desulfovibrio desulfuricans G20; identical to SEQ ID NO: 27458
  CDS (1)..(1545)

SEQ ID NO: 48772 - protein, 514 aa, Desulfovibrio desulfuricans G20; identical to SEQ ID NO: 27459

SEQ ID NO: 48773 - DNA, 1473 bp, Actinobacillus pleuropneumoniae serovar 1 str. 4074; identical to SEQ ID NO: 27460
  CDS (1)..(1473)

SEQ ID NO: 48774 - protein, 490 aa, Actinobacillus pleuropneumoniae serovar 1 str. 4074; identical to SEQ ID NO: 27461

SEQ ID NO: 48775 - DNA, 2613 bp, Actinobacillus pleuropneumoniae serovar 1 str. 4074; identical to SEQ ID NO: 27462
  CDS (1)..(2613)

SEQ ID NO: 48776 - protein, 870 aa, Actinobacillus pleuropneumoniae serovar 1 str. 4074; identical to SEQ ID NO: 27463

SEQ ID NO: 48777 - DNA, 2763 bp, Dechloromonas aromatica RCB; identical to SEQ ID NO: 27464
  CDS (1)..(2763)

SEQ ID NO: 48778 - protein, 920 aa, Dechloromonas aromatica RCB; identical to SEQ ID NO: 27465

SEQ ID NO: 48779 - DNA, 1632 bp, Rhodobacter sphaeroides 2.4.1; identical to SEQ ID NO: 27466
  CDS (1)..(1632)

SEQ ID NO: 48780 - protein, 543 aa, Rhodobacter sphaeroides 2.4.1; identical to SEQ ID NO: 27467

SEQ ID NO: 48781 - DNA, 1557 bp, Burkholderia cepacia R18194; identical to SEQ ID NO: 27468
  CDS (1)..(1557)

SEQ ID NO: 48782 - protein, 518 aa, Burkholderia cepacia R18194; identical to SEQ ID NO: 27469

SEQ ID NO: 48783 - DNA, 1614 bp, Pseudomonas fluorescens PfO-1; identical to SEQ ID NO: 27470
  CDS (1)..(1614)

SEQ ID NO: 48784 - protein, 537 aa, Pseudomonas fluorescens PfO-1; identical to SEQ ID NO: 27471

SEQ ID NO: 48785 - DNA, 2721 bp, Pseudomonas fluorescens PfO-1; identical to SEQ ID NO: 27472
  CDS (1)..(2721)

SEQ ID NO: 48786 - protein, 906 aa, Pseudomonas fluorescens PfO-1; identical to SEQ ID NO: 27473

SEQ ID NO: 48787 - DNA, 1911 bp, Pseudomonas fluorescens PfO-1; identical to SEQ ID NO: 27474
  CDS (1)..(1911)

SEQ ID NO: 48788 - protein, 636 aa, Pseudomonas fluorescens PfO-1; identical to SEQ ID NO: 27475

SEQ ID NO: 48789 - DNA, 1563 bp, Pseudomonas fluorescens PfO-1; identical to SEQ ID NO: 27476
  CDS (1)..(1563)

SEQ ID NO: 48790 - protein, 520 aa, Pseudomonas fluorescens PfO-1; identical to SEQ ID NO: 27477

SEQ ID NO: 48791 - DNA, 1662 bp, Rhodospirillum rubrum; identical to SEQ ID NO: 27478
  CDS (1)..(1662)

SEQ ID NO: 48792 - protein, 553 aa, Rhodospirillum rubrum; identical to SEQ ID NO: 27479

SEQ ID NO: 48793 - DNA, 1569 bp, Burkholderia fungorum LB400; identical to SEQ ID NO: 27480
  CDS (1)..(1569)

SEQ ID NO: 48794 - protein, 522 aa, Burkholderia fungorum LB400; identical to SEQ ID NO: 27481

SEQ ID NO: 48795 - DNA, 786 bp, Thermobifida fusca; identical to SEQ ID NO: 27482
  CDS (1)..(786)

SEQ ID NO: 48796 - protein, 261 aa, Thermobifida fusca; identical to SEQ ID NO: 27483

SEQ ID NO: 48797 - DNA, 1506 bp, Cytophaga hutchinsonii; identical to SEQ ID NO: 27484
  CDS (1)..(1506)

SEQ ID NO: 48798 - protein, 501 aa, Cytophaga hutchinsonii; identical to SEQ ID NO: 27485

SEQ ID NO: 48799 - DNA, 1377 bp, Oenococcus oeni PSU-1; identical to SEQ ID NO: 27486
  CDS (1)..(1377)

SEQ ID NO: 48800 - protein, 458 aa, Oenococcus oeni PSU-1; identical to SEQ ID NO: 27487

SEQ ID NO: 48801 - DNA, 1689 bp, Oenococcus oeni PSU-1; identical to SEQ ID NO: 27488
  CDS (1)..(1689)

SEQ ID NO: 48802 - protein, 562 aa, Oenococcus oeni PSU-1; identical to SEQ ID NO: 27489

SEQ ID NO: 48803 - DNA, 1587 bp, Oenococcus oeni PSU-1; identical to SEQ ID NO: 27490
  CDS (1)..(1587)

SEQ ID NO: 48804 - protein, 528 aa, Oenococcus oeni PSU-1; identical to SEQ ID NO: 27491

SEQ ID NO: 48805 - DNA, 1653 bp, Streptococcus suis 89/1591; identical to SEQ ID NO: 27492
  CDS (1)..(1653)

SEQ ID NO: 48806 - protein, 550 aa, Streptococcus suis 89/1591; identical to SEQ ID NO: 27493

SEQ ID NO: 48807 - DNA, 2751 bp, Pseudomonas aeruginosa UCBPP-PA14; identical to SEQ ID NO: 27494
  CDS (1)..(2751)

SEQ ID NO: 48808 - protein, 916 aa, Pseudomonas aeruginosa UCBPP-PA14; identical to SEQ ID NO: 27495

SEQ ID NO: 48809 - DNA, 1671 bp, Ralstonia eutropha JMP134; identical to SEQ ID NO: 27496
  CDS (1)..(1671)

SEQ ID NO: 48810 - protein, 556 aa, Ralstonia eutropha JMP134; identical to SEQ ID NO: 27497

SEQ ID NO: 48811 - DNA, 1524 bp, Chloroflexus aurantiacus; identical to SEQ ID NO: 27498
  CDS (1)..(1524)

SEQ ID NO: 48812 - protein, 507 aa, Chloroflexus aurantiacus; identical to SEQ ID NO: 27499

SEQ ID NO: 48813 - DNA, 1845 bp, Chloroflexus aurantiacus; identical to SEQ ID NO: 27500
  CDS (1)..(1845)

SEQ ID NO: 48814 - protein, 614 aa, Chloroflexus aurantiacus; identical to SEQ ID NO: 27501

SEQ ID NO: 48815 - DNA, 1356 bp, Lactobacillus delbrueckii subsp. bulgaricus ATCC BAA-365; identical to SEQ ID NO: 27502
  CDS (1)..(1356)

SEQ ID NO: 48816 - protein, 451 aa, Lactobacillus delbrueckii subsp. bulgaricus ATCC BAA-365; identical to SEQ ID NO: 27503

SEQ ID NO: 48817 - DNA, 1677 bp, Streptococcus thermophilus LMD-9; identical to SEQ ID NO: 27504
  CDS (1)..(1677)

SEQ ID NO: 48818 - protein, 558 aa, Streptococcus thermophilus LMD-9; identical to SEQ ID NO: 27505

SEQ ID NO: 48819 - DNA, 1452 bp, Deinococcus geothermalis DSM 11300 [sequence omitted]

SEQ ID NO: 48820 - protein, 483 aa, Deinococcus geothermalis DSM 11300; identical to SEQ ID NO: 27507

SEQ ID NO: 48821 - DNA, 1437 bp, Anaeromyxobacter dehalogenans 2CP-C; identical to SEQ ID NO: 27508
  CDS (1)..(1437): transl_table=11

SEQ ID NO: 48822 - protein, 478 aa, Anaeromyxobacter dehalogenans 2CP-C; identical to SEQ ID NO: 27509

SEQ ID NO: 48823 - DNA, 2736 bp, Azotobacter vinelandii AvOP; identical to SEQ ID NO: 27510
  CDS (1)..(2736): transl_table=11

SEQ ID NO: 48824 - protein, 911 aa, Azotobacter vinelandii AvOP; identical to SEQ ID NO: 27511

SEQ ID NO: 48825 - DNA, 1590 bp, Azotobacter vinelandii AvOP; identical to SEQ ID NO: 27512
  CDS (1)..(1590): transl_table=11

SEQ ID NO: 48826 - protein, 529 aa, Azotobacter vinelandii AvOP; identical to SEQ ID NO: 27513

SEQ ID NO: 48827 - DNA, 1638 bp, Azotobacter vinelandii AvOP; identical to SEQ ID NO: 27514
  CDS (1)..(1638): transl_table=11

SEQ ID NO: 48828 - protein, 545 aa, Azotobacter vinelandii AvOP; identical to SEQ ID NO: 27515

SEQ ID NO: 48829 - DNA, 1623 bp, Burkholderia vietnamiensis G4; identical to SEQ ID NO: 27516
  CDS (1)..(1623): transl_table=11

SEQ ID NO: 48830 - protein, 540 aa, Burkholderia vietnamiensis G4; identical to SEQ ID NO: 27517

SEQ ID NO: 48831 - DNA, 2832 bp, Burkholderia vietnamiensis G4; identical to SEQ ID NO: 27518
  CDS (1)..(2832): transl_table=11

SEQ ID NO: 48832 - protein, 943 aa, Burkholderia vietnamiensis G4; identical to SEQ ID NO: 27519

SEQ ID NO: 48833 - DNA, 2829 bp, Burkholderia vietnamiensis G4; identical to SEQ ID NO: 27520
  CDS (1)..(2829): transl_table=11

SEQ ID NO: 48834 - protein, 942 aa, Burkholderia vietnamiensis G4; identical to SEQ ID NO: 27521

SEQ ID NO: 48835 - DNA, 3240 bp, Burkholderia mallei NCTC 10247; identical to SEQ ID NO: 27522
  CDS (1)..(3240)

SEQ ID NO: 48836 - protein, 1079 aa, Burkholderia mallei NCTC 10247; identical to SEQ ID NO: 27523

SEQ ID NO: 48837 - DNA, 1635 bp, Burkholderia cenocepacia AU 1054; identical to SEQ ID NO: 27524
  CDS (1)..(1635): transl_table=11

SEQ ID NO: 48838 - protein, 544 aa, Burkholderia cenocepacia AU 1054; identical to SEQ ID NO: 27525

SEQ ID NO: 48839 - DNA, 1632 bp, Burkholderia pseudomallei 1655; identical to SEQ ID NO: 27526
  CDS (1)..(1632)

SEQ ID NO: 48840 - protein, 543 aa, Burkholderia pseudomallei 1655; identical to SEQ ID NO: 27527

SEQ ID NO: 48841 - DNA, 2727 bp, Chromohalobacter salexigens DSM 3043; identical to SEQ ID NO: 27528
  CDS (1)..(2727): transl_table=11

SEQ ID NO: 48842 - protein, 908 aa, Chromohalobacter salexigens DSM 3043; identical to SEQ ID NO: 27529

SEQ ID NO: 48843 - DNA, 1680 bp, Chromohalobacter salexigens DSM 3043; identical to SEQ ID NO: 27530
  CDS (1)..(1680): transl_table=11

SEQ ID NO: 48844 - protein, 559 aa, Chromohalobacter salexigens DSM 3043; identical to SEQ ID NO: 27531

SEQ ID NO: 48845 - DNA, 1650 bp, Burkholderia pseudomallei 1710a; identical to SEQ ID NO: 27532
  CDS (1)..(1650)

SEQ ID NO: 48846 - protein, 549 aa, Burkholderia pseudomallei 1710a; identical to SEQ ID NO: 27533

SEQ ID NO: 48847 - DNA, 1650 bp, Burkholderia pseudomallei 668; identical to SEQ ID NO: 27534
  CDS (1)..(1650)

SEQ ID NO: 48848 - protein, 549 aa, Burkholderia pseudomallei 668; identical to SEQ ID NO: 27535

SEQ ID NO: 48849 - DNA, 3261 bp, Burkholderia pseudomallei Pasteur; identical to SEQ ID NO: 27536
  CDS (1)..(3261): Xaa of translated CDS can stand for any naturally occuring amino acid which can be translated from respective CDS-codon

SEQ ID NO: 48850 - protein, 1086 aa, Burkholderia pseudomallei Pasteur; identical to SEQ ID NO: 27537
  misc_feature (459)..(459): Xaa can be any naturally occuring amino acid
  misc_feature (489)..(489): Xaa can be any naturally occuring amino acid

SEQ ID NO: 48851 - DNA, 1692 bp, Polaromonas sp. JS666; identical to SEQ ID NO: 27538
  CDS (1)..(1692): transl_table=11

SEQ ID NO: 48852 - protein, 563 aa, Polaromonas sp. JS666; identical to SEQ ID NO: 27539

SEQ ID NO: 48853 - DNA, 1668 bp, Polaromonas sp. JS666; identical to SEQ ID NO: 27540
  CDS (1)..(1668): transl_table=11

SEQ ID NO: 48854 - protein, 555 aa, Polaromonas sp. JS666; identical to SEQ ID NO: 27541

SEQ ID NO: 48855 - DNA, 1560 bp, Exiguobacterium sp. 255-15; identical to SEQ ID NO: 27542
  CDS (1)..(1560): transl_table=11

SEQ ID NO: 48856 - protein, 519 aa, Exiguobacterium sp. 255-15; identical to SEQ ID NO: 27543

SEQ ID NO: 48857 - DNA, 1506 bp, Methanosarcina barkeri str. fusaro; identical to SEQ ID NO: 27544
  CDS (1)..(1506): transl_table=11

SEQ ID NO: 48858 - protein, 501 aa, Methanosarcina barkeri str. fusaro; identical to SEQ ID NO: 27545

SEQ ID NO: 48859 - DNA, 1449 bp, Desulfuromonas acetoxidans DSM 684; identical to SEQ ID NO: 27546
  CDS (1)..(1449): transl_table=11

SEQ ID NO: 48860 - protein, 482 aa, Desulfuromonas acetoxidans DSM 684; identical to SEQ ID NO: 27547

SEQ ID NO: 48861 - DNA, 1584 bp, Jannaschia sp. CCS1; identical to SEQ ID NO: 27548
  CDS (1)..(1584): transl_table=11

SEQ ID NO: 48862 - protein, 527 aa, Jannaschia sp. CCS1; identical to SEQ ID NO: 27549

SEQ ID NO: 48863 - DNA, 1503 bp, Desulfitobacterium hafniense DCB-2; identical to SEQ ID NO: 27550
  CDS (1)..(1503): transl_table=11

SEQ ID NO: 48864 - protein, 500 aa, Desulfitobacterium hafniense DCB-2; identical to SEQ ID NO: 27551

SEQ ID NO: 48865 - DNA, 2766 bp, Methylobacillus flagellatus KT; identical to SEQ ID NO: 27552
  CDS (1)..(2766): transl_table=11

SEQ ID NO: 48866 - protein, 921 aa, Methylobacillus flagellatus KT; identical to SEQ ID NO: 27553

SEQ ID NO: 48867 - DNA, 1602 bp, Methylobacillus flagellatus KT; identical to SEQ ID NO: 27554
  CDS (1)..(1602): transl_table=11

SEQ ID NO: 48868 - protein, 533 aa, Methylobacillus flagellatus KT; identical to SEQ ID NO: 27555

SEQ ID NO: 48869 - DNA, 1518 bp, Frankia sp. EAN1pec; identical to SEQ ID NO: 27556
  CDS (1)..(1518): transl_table=11

SEQ ID NO: 48870 - protein, 505 aa, Frankia sp. EAN1pec; identical to SEQ ID NO: 27557

SEQ ID NO: 48871 - DNA, 1497 bp, Shewanella baltica OS155; identical to SEQ ID NO: 27558
  CDS (1)..(1497): transl_table=11

SEQ ID NO: 48872 - protein, 498 aa, Shewanella baltica OS155; identical to SEQ ID NO: 27559

SEQ ID NO: 48873 - DNA, 1596 bp, Shewanella amazonensis SB2B; identical to SEQ ID NO: 27560
  CDS (1)..(1596): transl_table=11

SEQ ID NO: 48874 - protein, 531 aa, Shewanella amazonensis SB2B; identical to SEQ ID NO: 27561

SEQ ID NO: 48875 - DNA, 2760 bp, Ralstonia metallidurans CH34; identical to SEQ ID NO: 27562
  CDS (1)..(2760): transl_table=11

SEQ ID NO: 48876 - protein, 919 aa, Ralstonia metallidurans CH34; identical to SEQ ID NO: 27563

SEQ ID NO: 48877 - DNA, 1635 bp, Mesorhizobium sp. BNC1; identical to SEQ ID NO: 27564
  CDS (1)..(1635): transl_table=11

SEQ ID NO: 48878 - protein, 544 aa, Mesorhizobium sp. BNC1; identical to SEQ ID NO: 27565

SEQ ID NO: 48879 - DNA, 1629 bp, Mesorhizobium sp. BNC1; identical to SEQ ID NO: 27566
  CDS (1)..(1629): transl_table=11

SEQ ID NO: 48880 - protein, 542 aa, Mesorhizobium sp. BNC1; identical to SEQ ID NO: 27567

SEQ ID NO: 48881 - DNA, 1656 bp, Kineococcus radiotolerans SRS30216; identical to SEQ ID NO: 27568
  CDS (1)..(1656): transl_table=11

SEQ ID NO: 48882 - protein, 551 aa, Kineococcus radiotolerans SRS30216; identical to SEQ ID NO: 27569

SEQ ID NO: 48883 - DNA, 1593 bp, Silicibacter sp. TM1040; identical to SEQ ID NO: 27570
  CDS (1)..(1593): transl_table=11

SEQ ID NO: 48884 - protein, 530 aa, Silicibacter sp. TM1040; identical to SEQ ID NO: 27571

SEQ ID NO: 48885 - DNA, 1614 bp, Paracoccus denitrificans PD1222; identical to SEQ ID NO: 27572
  CDS (1)..(1614): transl_table=11

SEQ ID NO: 48886 - protein, 537 aa, Paracoccus denitrificans PD1222; identical to SEQ ID NO: 27573

SEQ ID NO: 48887 - DNA, 2517 bp, Paracoccus denitrificans PD1222; identical to SEQ ID NO: 27574
  CDS (1)..(2517): transl_table=11

SEQ ID NO: 48888 - protein, 838 aa, Paracoccus denitrificans PD1222; identical to SEQ ID NO: 27575

SEQ ID NO: 48889 - DNA, 1383 bp, Paracoccus denitrificans PD1222; identical to SEQ ID NO: 27576
  CDS (1)..(1383): transl_table=11

SEQ ID NO: 48890 - protein, 460 aa, Paracoccus denitrificans PD1222; identical to SEQ ID NO: 27577

SEQ ID NO: 48891 - DNA, 1470 bp, Shewanella frigidimarina NCIMB 400; identical to SEQ ID NO: 27578
  CDS (1)..(1470): transl_table=11

SEQ ID NO: 48892 - protein, 489 aa, Shewanella frigidimarina NCIMB 400; identical to SEQ ID NO: 27579

SEQ ID NO: 48893 - DNA, 2757 bp, Shewanella frigidimarina NCIMB 400; identical to SEQ ID NO: 27580
  CDS (1)..(2757): transl_table=11

SEQ ID NO: 48894 - protein, 918 aa, Shewanella frigidimarina NCIMB 400; identical to SEQ ID NO: 27581

SEQ ID NO: 48895 - DNA, 1611 bp, Burkholderia mallei JHU; identical to SEQ ID NO: 27582
  CDS (1)..(1611)

SEQ ID NO: 48896 - protein, 536 aa, Burkholderia mallei JHU; identical to SEQ ID NO: 27583

SEQ ID NO: 48897 - DNA, 1587 bp, Pseudomonas fluorescens; identical to SEQ ID NO: 27584
  CDS (1)..(1587): transl_table=11

SEQ ID NO: 48898 - protein, 528 aa, Pseudomonas fluorescens; identical to SEQ ID NO: 27585

SEQ ID NO: 48899 - DNA, 1632 bp, Cryptococcus neoformans var; identical to SEQ ID NO: 27586
  CDS (1)..(1632)

SEQ ID NO: 48900 - protein, 543 aa, Cryptococcus neoformans var; identical to SEQ ID NO: 27587

SEQ ID NO: 48901 - DNA, 1518 bp, Thermoanaerobacter ethanolicus; identical to SEQ ID NO: 27588
  CDS (1)..(1518): transl_table=11

SEQ ID NO: 48902 - protein, 505 aa, Thermoanaerobacter ethanolicus; identical to SEQ ID NO: 27589

SEQ ID NO: 48903 - DNA, 1515 bp, Bifidobacterium longum bv; identical to SEQ ID NO: 27590
  CDS (1)..(1515): transl_table=11

SEQ ID NO: 48904 - protein, 504 aa, Bifidobacterium longum bv; identical to SEQ ID NO: 27591

SEQ ID NO: 48905 - DNA, 2691 bp, Salmonella typhimurium; identical to SEQ ID NO: 27592
  CDS (1)..(2691): transl_table=11

SEQ ID NO: 48906 - protein, 896 aa, Salmonella typhimurium; identical to SEQ ID NO: 27593

SEQ ID NO: 48907 - DNA, 1476 bp, Treponema denticola; identical to SEQ ID NO: 27594
  CDS (1)..(1476): transl_table=11

SEQ ID NO: 48908 - protein, 491 aa, Treponema denticola; identical to SEQ ID NO: 27595

SEQ ID NO: 48909 - DNA, 1473 bp, Bacillus subtilis; identical to SEQ ID NO: 27596
  CDS (1)..(1473): transl_table=11

SEQ ID NO: 48910 - protein, 490 aa, Bacillus subtilis; identical to SEQ ID NO: 27597

SEQ ID NO: 48911 - DNA, 1707 bp, Enterococcus faecalis; identical to SEQ ID NO: 27598
  CDS (1)..(1707): transl_table=11

SEQ ID NO: 48912 - protein, 568 aa, Enterococcus faecalis; identical to SEQ ID NO: 27599

SEQ ID NO: 48913 - DNA, 1722 bp, Lactobacillus johnsonii; identical to SEQ ID NO: 27600
  CDS (1)..(1722): transl_table=11

SEQ ID NO: 48914 - protein, 573 aa, Lactobacillus johnsonii; identical to SEQ ID NO: 27601

SEQ ID NO: 48915 - DNA, 1584 bp, Oceanobacillus iheyensis; identical to SEQ ID NO: 27602
  CDS (1)..(1584): transl_table=11

SEQ ID NO: 48916 - protein, 527 aa, Oceanobacillus iheyensis; identical to SEQ ID NO: 27603

SEQ ID NO: 48917 - DNA, 1677 bp, Streptococcus agalactiae serotype III; identical to SEQ ID NO: 27604
  CDS (1)..(1677): transl_table=11

SEQ ID NO: 48918 - protein, 558 aa, Streptococcus agalactiae serotype III; identical to SEQ ID NO: 27605

SEQ ID NO: 48919 - DNA, 1677 bp, Streptococcus agalactiae serotype V; identical to SEQ ID NO: 27606
  CDS (1)..(1677): transl_table=11

SEQ ID NO: 48920 - protein, 558 aa, Streptococcus agalactiae serotype V; identical to SEQ ID NO: 27607

SEQ ID NO: 48921 - DNA, 1677 bp, Streptococcus mutans; identical to SEQ ID NO: 27608
  CDS (1)..(1677): transl_table=11

SEQ ID NO: 48922 - protein, 558 aa, Streptococcus mutans; identical to SEQ ID NO: 27609

SEQ ID NO: 48923 - DNA, 1683 bp, Streptococcus pneumoniae; identical to SEQ ID NO: 27610
  CDS (1)..(1683)

SEQ ID NO: 48924 - protein, 560 aa, Streptococcus pneumoniae; identical to SEQ ID NO: 27611

SEQ ID NO: 48925 - DNA, 1683 bp, Streptococcus pneumoniae; identical to SEQ ID NO: 27612
  CDS (1)..(1683): transl_table=11

SEQ ID NO: 48926 - protein, 560 aa, Streptococcus pneumoniae; identical to SEQ ID NO: 27613

SEQ ID NO: 48927 - DNA, 1707 bp, Clostridium perfringens; identical to SEQ ID NO: 27614
  CDS (1)..(1707): transl_table=11

SEQ ID NO: 48928 - protein, 568 aa, Clostridium perfringens; identical to SEQ ID NO: 27615

SEQ ID NO: 48929 - DNA, 1701 bp, Lactobacillus plantarum; identical to SEQ ID NO: 27616
  CDS (1)..(1701): transl_table=11

SEQ ID NO: 48930 - protein, 566 aa, Lactobacillus plantarum; identical to SEQ ID NO: 27617

SEQ ID NO: 48931 - DNA, 1587 bp, Methanosarcina acetivorans; identical to SEQ ID NO: 27618
  CDS (1)..(1587): transl_table=11

SEQ ID NO: 48932 - protein, 528 aa, Methanosarcina acetivorans; identical to SEQ ID NO: 27619

SEQ ID NO: 48933 - DNA, 2343 bp, Bifidobacterium longum; identical to SEQ ID NO: 27620
  CDS (1)..(2343)

SEQ ID NO: 48934 - protein, 780 aa, Bifidobacterium longum; identical to SEQ ID NO: 27621

SEQ ID NO: 48935 - DNA, 1695 bp, Photobacterium profundum; identical to SEQ ID NO: 27622
  CDS (1)..(1695): transl_table=11

SEQ ID NO: 48936 - protein, 564 aa, Photobacterium profundum; identical to SEQ ID NO: 27623

SEQ ID NO: 48937 - DNA, 1740 bp, Vibrio parahaemolyticus; identical to SEQ ID NO: 27624
  CDS (1)..(1740): transl_table=11

SEQ ID NO: 48938 - protein, 579 aa, Vibrio parahaemolyticus; identical to SEQ ID NO: 27625

SEQ ID NO: 48939 - DNA, 1725 bp, Vibrio vulnificus; identical to SEQ ID NO: 27626
  CDS (1)..(1725): transl_table=11

SEQ ID NO: 48940 - protein, 574 aa, Vibrio vulnificus; identical to SEQ ID NO: 27627

SEQ ID NO: 48941 - DNA, 1593 bp, Escherichia coli O157; identical to SEQ ID NO: 27628
  CDS (1)..(1593): transl_table=11

SEQ ID NO: 48942 - protein, 530 aa, Escherichia coli O157; identical to SEQ ID NO: 27629

SEQ ID NO: 48943 - DNA, 1590 bp, Escherichia coli; identical to SEQ ID NO: 27630
  CDS (1)..(1590): transl_table=11

SEQ ID NO: 48944 - protein, 529 aa, Escherichia coli; identical to SEQ ID NO: 27631

SEQ ID NO: 48945 - DNA, 1512 bp, Escherichia coli; identical to SEQ ID NO: 27632
  CDS (1)..(1512): transl_table=11

SEQ ID NO: 48946 - protein, 503 aa, Escherichia coli; identical to SEQ ID NO: 27633

SEQ ID NO: 48947 - DNA, 25 bp, Artificial sequence
  Primer sequence
atgtcatcgttgcaaattttgcaag

SEQ ID NO: 48948 - DNA, 28 bp, Artificial sequence
  Primer sequence
ttaatatatttttgtcagcacatagcga

SEQ ID NO: 48949 - protein, 762 aa, Artificial sequence; identical to SEQ ID NO: 27636
  Consensus
  Variant (2)..(4): Xaa in position 2 to 4 is any amino acid
  Variant (6)..(7): Xaa in position 6 to 7 is any amino acid
  Variant (9)..(12): Xaa in position 9 to 12 is any amino acid
  Variant (16)..(17): Xaa in position 16 to 17 is any amino acid
  Variant (18)..(21): Xaa in position 18 to 21 is any or no amino acid
  Variant (23)..(23): Xaa in position 23 is any amino acid
  Variant (27)..(31): Xaa in position 27 to 31 is any amino acid
  Variant (33)..(73): Xaa in position 33 to 73 is any amino acid
  Variant (74)..(118): Xaa in position 74 to 118 is any or no amino acid
  Variant (120)..(133): Xaa in position 120 to 133 is any amino acid
  Variant (134)..(185): Xaa in position 134 to 185 is any or no amino acid
  Variant (187)..(192): Xaa in position 187 to 192 is any amino acid
  Variant (193)..(203): Xaa in position 193 to 203 is any or no amino acid
  Variant (206)..(206): Xaa in position 206 is any amino acid
  Variant (208)..(210): Xaa in position 208 to 210 is any amino acid
  Variant (212)..(213): Xaa in position 212 to 213 is any amino acid
  Variant (215)..(217): Xaa in position 215 to 217 is any amino acid
  Variant (219)..(223): Xaa in position 219 to 223 is any amino acid
  Variant (227)..(227): Xaa in position 227 is any amino acid
  Variant (231)..(233): Xaa in position 231 to 233 is any amino acid
  Variant (236)..(245): Xaa in position 236 to 245 is any amino acid
  Variant (247)..(248): Xaa in position 247 to 248 is any amino acid
  Variant (250)..(253): Xaa in position 250 to 253 is any amino acid
  Variant (254)..(264): Xaa in position 254 to 264 is any or no amino acid
  Variant (266)..(280): Xaa in position 266 to 280 is any amino acid
  Variant (282)..(283): Xaa in position 282 to 283 is any amino acid
  Variant (285)..(314): Xaa in position 285 to 314 is any amino acid
  Variant (315)..(412): Xaa in position 315 to 412 is any or no amino acid
  Variant (414)..(417): Xaa in position 414 to 417 is any amino acid
  Variant (419)..(428): Xaa in position 419 to 428 is any amino acid
  Variant (429)..(444): Xaa in position 429 to 444 is any or no amino acid
  Variant (446)..(447): Xaa in position 446 to 447 is any amino acid
  Variant (448)..(448): Xaa in position 448 is any or no amino acid
  Variant (450)..(451): Xaa in position 450 to 451 is any amino acid
  Variant (453)..(456): Xaa in position 453 to 456 is any amino acid
  Variant (458)..(458): Xaa in position 458 is any amino acid
  Variant (460)..(461): Xaa in position 460 to 461 is any amino acid
  Variant (463)..(463): Xaa in position 463 is any amino acid
  Variant (468)..(471): Xaa in position 468 to 471 is any amino acid
  Variant (473)..(478): Xaa in position 473 to 478 is any amino acid
  Variant (479)..(482): Xaa in position 479 to 482 is any or no amino acid
  Variant (484)..(485): Xaa in position 484 to 485 is any amino acid
  Variant (486)..(518): Xaa in position 486 to 518 is any or no amino acid
  Variant (520)..(521): Xaa in position 520 to 521 is any amino acid
  Variant (523)..(531): Xaa in position 523 to 531 is any amino acid
  Variant (532)..(561): Xaa in position 532 to 561 is any or no amino acid
  Variant (563)..(577): Xaa in position 563 to 577 is any amino acid
  Variant (578)..(596): Xaa in position 578 to 596 is any or no amino acid
  Variant (598)..(601): Xaa in position 598 to 601 is any amino acid
  Variant (603)..(609): Xaa in position 603 to 609 is any amino acid
  Variant (610)..(640): Xaa in position 610 to 640 is any or no amino acid
  Variant (643)..(643): Xaa in position 643 is any amino acid
  Variant (645)..(647): Xaa in position 645 to 647 is any amino acid
  Variant (650)..(650): Xaa in position 650 is any amino acid
  Variant (653)..(654): Xaa in position 653 to 654 is any amino acid
  Variant (656)..(658): Xaa in position 656 to 658 is any amino acid
  Variant (660)..(660): Xaa in position 660 is any amino acid
  Variant (668)..(669): Xaa in position 668 to 669 is any amino acid
  Variant (673)..(682): Xaa in position 673 to 682 is any amino acid
  Variant (684)..(690): Xaa in position 684 to 690 is any amino acid
  Variant (691)..(742): Xaa in position 691 to 742 is any or no amino acid
  Variant (744)..(744): Xaa in position 744 is any amino acid
  Variant (747)..(761): Xaa in position 747 to 761 is any amino acid

SEQ ID NO: 48950 - protein, 9 aa, Artificial sequence
  Consensus
  Variant (2)..(2): Xaa in position 2 is any amino acid
  Variant (3)..(3): Xaa in position 3 is Asp, Asn or Ser
  Variant (5)..(5): Xaa in position 5 is any amino acid
  Variant (8)..(8): Xaa in position 8 is Ser or Thr
  Variant (9)..(9): Xaa in position 9 is Ala, Ser, Thr or Val
GXXGXGKXX

SEQ ID NO: 48951 - protein, 29 aa, Artificial sequence
  Consensus
  Variant (2)..(4): Xaa in position 2 to 4 is any amino acid
  Variant (5)..(5): Xaa in position 5 is Lys or Arg
  Variant (6)..(19): Xaa in position 6 to 19 is any amino acid
  Variant (20)..(20): Xaa in position 20 is Phe, Ile, Leu or Val
  Variant (21)..(21): Xaa in position 21 is any amino acid
  Variant (23)..(23): Xaa in position 23 is Asp, Glu, Asn or Gln
  Variant (25)..(27): Xaa in position 25 to 27 is any amino acid
  Variant (28)..(28): Xaa in position 28 is Ile, Leu or Val
  Variant (29)..(29): Xaa in position 29 is Asp or Thr
GXXXXXXXXXXXXXXXXXXXXDXPXXXXX

SEQ ID NO: 48952 - protein, 16 aa, Artificial sequence
  Consensus
  Variant (2)..(5): Xaa in position 2 to 5 is any amino acid
  Variant (6)..(6): Xaa in position 6 is Phe, Ile, Leu or Val
  Variant (7)..(7): Xaa in position 7 is any amino acid
  Variant (9)..(9): Xaa in position 9 is any amino acid
  Variant (10)..(10): Xaa in position 10 is Asn or Ser
  Variant (12)..(12): Xaa in position 12 is any amino acid
  Variant (15)..(15): Xaa in position 15 is any or no amino acid
GXXXXXXGXXGXGKXT

SEQ ID NO: 48953 - protein, 29 aa, Artificial sequence
  Consensus
  Variant (2)..(5): Xaa in position 2 to 5 is any amino acid
  Variant (6)..(6): Xaa in position 6 is Ile, Leu, Met or Val
  Variant (7)..(7): Xaa in position 7 is any amino acid
  Variant (8)..(8): Xaa in position 8 is Phe, Ile, Leu or Val
  Variant (9)..(17): Xaa in position 9 to 17 is any amino acid
  Variant (18)..(18): Xaa in position 18 is Phe, Ile, Leu, Met or Val
  Variant (19)..(19): Xaa in position 19 is any amino acid
  Variant (20)..(20): Xaa in position 20 is Phe, Ile, Leu or Val
  Variant (21)..(21): Xaa in position 21 is any amino acid
  Variant (24)..(28): Xaa in position 24 to 28 is any amino acid
GXXXXXXXXXXXXXXXXXXXXDEXXXXXD

SEQ ID NO: 48954 - protein, 7 aa, Artificial sequence
  Consensus
  Variant (2)..(2): Xaa in position 2 is any amino acid
  Variant (3)..(6): Xaa in position 3 to 6 is any or no amino acid
IXXXXXH

SEQ ID NO: 48955 - DNA, 1629 bp, Escherichia coli; identical to SEQ ID NO: 27642
  CDS (467)..(1513)

SEQ ID NO: 48956 - protein, 348 aa, Escherichia coli [sequence omitted]

SEQ ID NO: 48957 - DNA, 1053 bp, Vibrio cholerae O1 biovar eltor str. N16961; identical to SEQ ID NO: 27644
  CDS (1)..(1053): transl_table=11

SEQ ID NO: 48958 - protein, 350 aa, Vibrio cholerae O1 biovar eltor str. N16961; identical to SEQ ID NO: 27645

SEQ ID NO: 48959 - DNA, 1008 bp, Campylobacter jejuni subsp. jejuni NCTC 11168; identical to SEQ ID NO: 27646
  CDS (1)..(1008): transl_table=11

SEQ ID NO: 48960 - protein, 335 aa, Campylobacter jejuni subsp. jejuni NCTC 11168; identical to SEQ ID NO: 27647

SEQ ID NO: 48961 - DNA, 1047 bp, Salmonella typhimurium LT2; identical to SEQ ID NO: 27648
  CDS (1)..(1047): transl_table=11

SEQ ID NO: 48962 - protein, 348 aa, Salmonella typhimurium LT2; identical to SEQ ID NO: 27649

SEQ ID NO: 48963 - DNA, 1182 bp, Agrobacterium tumefaciens str. C58; identical to SEQ ID NO: 27650
  CDS (1)..(1182): transl_table=11

SEQ ID NO: 48964 - protein, 393 aa, Agrobacterium tumefaciens str. C58; identical to SEQ ID NO: 27651

SEQ ID NO: 48965 - DNA, 1077 bp, Plasmodium falciparum 3D7; identical to SEQ ID NO: 27652
  CDS (1)..(1077)

SEQ ID NO: 48966 - protein, 358 aa, Plasmodium falciparum 3D7; identical to SEQ ID NO: 27653

SEQ ID NO: 48967 - DNA, 1032 bp, Shewanella oneidensis MR-1; identical to SEQ ID NO: 27654
  CDS (1)..(1032): transl_table=11

SEQ ID NO: 48968 - protein, 343 aa, Shewanella oneidensis MR-1; identical to SEQ ID NO: 27655

SEQ ID NO: 48969 - DNA, 1044 bp, Vibrio vulnificus CMCP6; identical to SEQ ID NO: 27656
  CDS (1)..(1044): transl_table=11

SEQ ID NO: 48970 - protein, 347 aa, Vibrio vulnificus CMCP6; identical to SEQ ID NO: 27657

SEQ ID NO: 48971 - DNA, 1056 bp, Coxiella burnetii RSA 493; identical to SEQ ID NO: 27658
  CDS (1)..(1056): transl_table=11

SEQ ID NO: 48972 - protein, 351 aa, Coxiella burnetii RSA 493; identical to SEQ ID NO: 27659

SEQ ID NO: 48973 - DNA, 1050 bp, Nitrosomonas europaea ATCC 19718; identical to SEQ ID NO: 27660
  CDS (1)..(1050): transl_table=11

SEQ ID NO: 48974 - protein, 349 aa, Nitrosomonas europaea ATCC 19718; identical to SEQ ID NO: 27661

SEQ ID NO: 48975 - DNA, 1032 bp, Helicobacter hepaticus ATCC 51449; identical to SEQ ID NO: 27662
  CDS (1)..(1032): transl_table=11

SEQ ID NO: 48976 - protein, 343 aa, Helicobacter hepaticus ATCC 51449; identical to SEQ ID NO: 27663

SEQ ID NO: 48977 - DNA, 1050 bp, Wigglesworthia glossinidia endosymbiont of Glossina brevipalpis; identical to SEQ ID NO: 27664
  CDS (1)..(1050): transl_table=11

SEQ ID NO: 48978 - protein, 349 aa, Wigglesworthia glossinidia endosymbiont of Glossina brevipalpis; identical to SEQ ID NO: 27665

SEQ ID NO: 48979 - DNA, 1080 bp, Prochlorococcus marinus subsp. marinus str. CCMP1375; identical to SEQ ID NO: 27666
  CDS (1)..(1080): transl_table=11

SEQ ID NO: 48980 - protein, 359 aa, Prochlorococcus marinus subsp. marinus str. CCMP1375; identical to SEQ ID NO: 27667

SEQ ID NO: 48981 - DNA, 1080 bp, Bordetella pertussis Tohama I; identical to SEQ ID NO: 27668
  CDS (1)..(1080): transl_table=11

SEQ ID NO: 48982 - protein, 359 aa, Bordetella pertussis Tohama I; identical to SEQ ID NO: 27669

SEQ ID NO: 48983 - DNA, 1080 bp, Bordetella bronchiseptica RB50; identical to SEQ ID NO: 27670
  CDS (1)..(1080)

SEQ ID NO: 48984 - protein, 359 aa, Bordetella bronchiseptica RB50; identical to SEQ ID NO: 27671

SEQ ID NO: 48985 - DNA, 1050 bp, Prochlorococcus marinus subsp. pastoris str. CCMP1986; identical to SEQ ID NO: 27672
  CDS (1)..(1050): transl_table=11

SEQ ID NO: 48986 - protein, 349 aa, Prochlorococcus marinus subsp. pastoris str. CCMP1986; identical to SEQ ID NO: 27673

SEQ ID NO: 48987 - DNA, 1065 bp, Prochlorococcus marinus str. MIT 9313; identical to SEQ ID NO: 27674
  CDS (1)..(1065): transl_table=11

SEQ ID NO: 48988 - protein, 354 aa, Prochlorococcus marinus str. MIT 9313; identical to SEQ ID NO: 27675

SEQ ID NO: 48989 - DNA, 1032 bp, Synechococcus sp. WH 8102; identical to SEQ ID NO: 27676
  CDS (1)..(1032): transl_table=11

SEQ ID NO: 48990 - protein, 343 aa, Synechococcus sp. WH 8102; identical to SEQ ID NO: 27677

SEQ ID NO: 48991 - DNA, 1086 bp, Chromobacterium violaceum ATCC 12472; identical to SEQ ID NO: 27678
  CDS (1)..(1086): transl_table=11

SEQ ID NO: 48992 - protein, 361 aa, Chromobacterium violaceum ATCC 12472; identical to SEQ ID NO: 27679

SEQ ID NO: 48993 - DNA, 1014 bp, Wolinella succinogenes DSM 1740; identical to SEQ ID NO: 27680
  CDS (1)..(1014): transl_table=11

SEQ ID NO: 48994 - protein, 337 aa, Wolinella succinogenes DSM 1740; identical to SEQ ID NO: 27681

SEQ ID NO: 48995 - DNA, 1080 bp, Oryza sativa (japonica cultivar-group); identical to SEQ ID NO: 27682
  CDS (1)..(1080)

SEQ ID NO: 48996 - protein, 359 aa, Oryza sativa (japonica cultivar-group); identical to SEQ ID NO: 27683

SEQ ID NO: 48997 - DNA, 1044 bp, Vibrio vulnificus YJ016; identical to SEQ ID NO: 27684
  CDS (1)..(1044): transl_table=11

SEQ ID NO: 48998 - protein, 347 aa, Vibrio vulnificus YJ016; identical to SEQ ID NO: 27685

SEQ ID NO: 48999 - DNA, 1086 bp, Eremothecium gossypii; identical to SEQ ID NO: 27686
  CDS (1)..(1086)

SEQ ID NO: 49000 - protein, 361 aa, Eremothecium gossypii; identical to SEQ ID NO: 27687

SEQ ID NO: 49001 - DNA, 1074 bp, Neurospora crassa; identical to SEQ ID NO: 27688
  CDS (1)..(1074)

SEQ ID NO: 49002 - protein, 357 aa, Neurospora crassa; identical to SEQ ID NO: 27689

SEQ ID NO: 49003 - DNA, 957 bp, Gibberella zeae PH-1; identical to SEQ ID NO: 27690
  CDS (1)..(957)

SEQ ID NO: 49004 - protein, 318 aa, Gibberella zeae PH-1; identical to SEQ ID NO: 27691

SEQ ID NO: 49005 - DNA, 1185 bp, Ustilago maydis 521; identical to SEQ ID NO: 27692
  CDS (1)..(1185)

SEQ ID NO: 49006 - protein, 394 aa, Ustilago maydis 521; identical to SEQ ID NO: 27693

SEQ ID NO: 49007 - DNA, 1077 bp, Candida glabrata CBS138; identical to SEQ ID NO: 27694
  CDS (1)..(1077)

SEQ ID NO: 49008 - protein, 358 aa, Candida glabrata CBS138; identical to SEQ ID NO: 27695

SEQ ID NO: 49009 - DNA, 1095 bp, Kluyveromyces lactis NRRL Y-1140; identical to SEQ ID NO: 27696
  CDS (1)..(1095)

SEQ ID NO: 49010 - protein, 364 aa, Kluyveromyces lactis NRRL Y-1140; identical to SEQ ID NO: 27697

SEQ ID NO: 49011 - DNA, 1083 bp, Debaryomyces hansenii CBS767; identical to SEQ ID NO: 27698
  CDS (1)..(1083)

SEQ ID NO: 49012 - protein, 360 aa, Debaryomyces hansenii CBS767; identical to SEQ ID NO: 27699

SEQ ID NO: 49013 - DNA, 1038 bp, Yarrowia lipolytica CLIB99; identical to SEQ ID NO: 27700
  CDS (1)..(1038)

SEQ ID NO: 49014 - protein, 345 aa, Yarrowia lipolytica CLIB99; identical to SEQ ID NO: 27701

SEQ ID NO: 49015 - DNA, 1062 bp, Cryptococcus neoformans var. neoformans JEC21; identical to SEQ ID NO: 27702
  CDS (1)..(1062)

SEQ ID NO: 49016 - protein, 353 aa, Cryptococcus neoformans var. neoformans JEC21; identical to SEQ ID NO: 27703

SEQ ID NO: 49017 - DNA, 1083 bp, Plasmodium berghei; identical to SEQ ID NO: 27704
  CDS (1)..(1083)

SEQ ID NO: 49018 - protein, 360 aa, Plasmodium berghei; identical to SEQ ID NO: 27705

SEQ ID NO: 49019 - DNA, 1077 bp, Candida albicans SC5314; identical to SEQ ID NO: 27706
  CDS (1)..(1077): transl_table=12

SEQ ID NO: 49020 - protein, 358 aa, Candida albicans SC5314; identical to SEQ ID NO: 27707

SEQ ID NO: 49021 - DNA, 1035 bp, Acinetobacter sp. ADP1; identical to SEQ ID NO: 27708
  CDS (1)..(1035): transl_table=11

SEQ ID NO: 49022 - protein, 344 aa, Acinetobacter sp. ADP1; identical to SEQ ID NO: 27709

SEQ ID NO: 49023 - DNA, 1044 bp, Erwinia carotovora subsp. atroseptica SCRI1043; identical to SEQ ID NO: 27710
  CDS (1)..(1044)

SEQ ID NO: 49024 - protein, 347 aa, Erwinia carotovora subsp. atroseptica SCRI1043; identical to SEQ ID NO: 27711

SEQ ID NO: 49025 - DNA, 1080 bp, Legionella pneumophila subsp. pneumophila str. Philadelphia 1; identical to SEQ ID NO: 27712
  CDS (1)..(1080): transl_table=11

SEQ ID NO: 49026 - protein, 359 aa, Legionella pneumophila subsp. pneumophila str. Philadelphia 1; identical to SEQ ID NO: 27713

SEQ ID NO: 49027 - DNA, 1059 bp, Burkholderia mallei ATCC 23344; identical to SEQ ID NO: 27714
  CDS (1)..(1059): transl_table=11

SEQ ID NO: 49028 - protein, 352 aa, Burkholderia mallei ATCC 23344; identical to SEQ ID NO: 27715

SEQ ID NO: 49029 - DNA, 1044 bp, Methylococcus capsulatus str. Bath; identical to SEQ ID NO: 27716
  CDS (1)..(1044): transl_table=11

SEQ ID NO: 49030 - protein, 347 aa, Methylococcus capsulatus str. Bath; identical to SEQ ID NO: 27717

SEQ ID NO: 49031 - DNA, 1038 bp, Legionella pneumophila str. Paris; identical to SEQ ID NO: 27718
  CDS (1)..(1038): transl_table=11

SEQ ID NO: 49032 - protein, 345 aa, Legionella pneumophila str. Paris; identical to SEQ ID NO: 27719

SEQ ID NO: 49033 - DNA, 1038 bp, Legionella pneumophila str. Lens; identical to SEQ ID NO: 27720
  CDS (1)..(1038): transl_table=11

SEQ ID NO: 49034 - protein, 345 aa, Legionella pneumophila str. Lens; identical to SEQ ID NO: 27721

SEQ ID NO: 49035 - DNA, 1029 bp, Photobacterium profundum SS9; identical to SEQ ID NO: 27722
  CDS (1)..(1029): transl_table=11

SEQ ID NO: 49036 - protein, 342 aa, Photobacterium profundum SS9; identical to SEQ ID NO: 27723

SEQ ID NO: 49037 - DNA, 1047 bp, Salmonella enterica subsp. enterica serovar Paratyphi A str. ATCC; identical to SEQ ID NO: 27724
  CDS (1)..(1047): transl_table=11

SEQ ID NO: 49038 - protein, 348 aa, Salmonella enterica subsp. enterica serovar Paratyphi A str. ATCC; identical to SEQ ID NO: 27725

SEQ ID NO: 49039 - DNA, 1035 bp, Idiomarina loihiensis L2TR; identical to SEQ ID NO: 27726
  CDS (1)..(1035): transl_table=11

SEQ ID NO: 49040 - protein, 344 aa, Idiomarina loihiensis L2TR; identical to SEQ ID NO: 27727

SEQ ID NO: 49041 - DNA, 1035 bp, Azoarcus sp. EbN1; identical to SEQ ID NO: 27728
  CDS (1)..(1035): transl_table=11

SEQ ID NO: 49042 - protein, 344 aa, Azoarcus sp. EbN1; identical to SEQ ID NO: 27729

SEQ ID NO: 49043 - DNA, 1041 bp, Silicibacter pomeroyi DSS-3; identical to SEQ ID NO: 27730
  CDS (1)..(1041): transl_table=11

SEQ ID NO: 49044 - protein, 346 aa, Silicibacter pomeroyi DSS-3; identical to SEQ ID NO: 27731

SEQ ID NO: 49045 - DNA, 996 bp, Campylobacter jejuni RM1221; identical to SEQ ID NO: 27732
  CDS (1)..(996): transl_table=11

SEQ ID NO: 49046 - protein, 331 aa, Campylobacter jejuni RM1221; identical to SEQ ID NO: 27733

SEQ ID NO: 49047 - DNA, 1029 bp, Vibrio fischeri ES114; identical to SEQ ID NO: 27734
  CDS (1)..(1029): transl_table=11

SEQ ID NO: 49048 - protein, 342 aa, Vibrio fischeri ES114; identical to SEQ ID NO: 27735

SEQ ID NO: 49049 - DNA, 1047 bp, Salmonella enterica subsp. enterica serovar Choleraesuis str; identical to SEQ ID NO: 27736
  CDS (1)..(1047): transl_table=11

SEQ ID NO: 49050 - protein, 348 aa, Salmonella enterica subsp. enterica serovar Choleraesuis str; identical to SEQ ID NO: 27737

SEQ ID NO: 49051 - DNA, 1044 bp, Pseudomonas syringae pv. syringae B728a; identical to SEQ ID NO: 27738
  CDS (1)..(1044)

SEQ ID NO: 49052 - protein, 347 aa, Pseudomonas syringae pv. syringae B728a; identical to SEQ ID NO: 27739

SEQ ID NO: 49053 - DNA, 1041 bp, Rhodobacter sphaeroides 2.4.1; identical to SEQ ID NO: 27740
  CDS (1)..(1041)

SEQ ID NO: 49054 - protein, 346 aa, Rhodobacter sphaeroides 2.4.1; identical to SEQ ID NO: 27741

SEQ ID NO: 49055 - DNA, 1047 bp, Pseudomonas aeruginosa UCBPP-PA14; identical to SEQ ID NO: 27742
  CDS (1)..(1047)

SEQ ID NO: 49056 - protein, 348 aa, Pseudomonas aeruginosa UCBPP-PA14; identical to SEQ ID NO: 27743

SEQ ID NO: 49057 - DNA, 1077 bp, Psychrobacter sp. 273-4; identical to SEQ ID NO: 27744
  CDS (1)..(1077)

SEQ ID NO: 49058 - protein, 358 aa, Psychrobacter sp. 273-4; identical to SEQ ID NO: 27745

SEQ ID NO: 49059 - DNA, 1032 bp, Dechloromonas aromatica RCB; identical to SEQ ID NO: 27746
  CDS (1)..(1032)

SEQ ID NO: 49060 - protein, 343 aa, Dechloromonas aromatica RCB; identical to SEQ ID NO: 27747

SEQ ID NO: 49061 - DNA, 1035 bp, Ralstonia eutropha JMP134; identical to SEQ ID NO: 27748
  CDS (1)..(1035)

SEQ ID NO: 49062 - protein, 344 aa, Ralstonia eutropha JMP134; identical to SEQ ID NO: 27749

SEQ ID NO: 49063 - DNA, 1065 bp, Burkholderia cepacia R18194; identical to SEQ ID NO: 27750
  CDS (1)..(1065)

SEQ ID NO: 49064 - protein, 354 aa, Burkholderia cepacia R18194; identical to SEQ ID NO: 27751

SEQ ID NO: 49065 - DNA, 1047 bp, Rubrivivax gelatinosus PM1; identical to SEQ ID NO: 27752
  CDS (1)..(1047)

SEQ ID NO: 49066 - protein, 348 aa, Rubrivivax gelatinosus PM1; identical to SEQ ID NO: 27753

SEQ ID NO: 49067 - DNA, 1062 bp, Burkholderia fungorum LB400; identical to SEQ ID NO: 27754
  CDS (1)..(1062)

SEQ ID NO: 49068 - protein, 353 aa, Burkholderia fungorum LB400; identical to SEQ ID NO: 27755

SEQ ID NO: 49069 - DNA, 1041 bp, Novosphingobium aromaticivorans DSM 12444; identical to SEQ ID NO: 27756
  CDS (1)..(1041)

SEQ ID NO: 49070 - protein, 346 aa, Novosphingobium aromaticivorans DSM 12444; identical to SEQ ID NO: 27757

SEQ ID NO: 49071 - DNA, 1080 bp, Microbulbifer degradans 2-40; identical to SEQ ID NO: 27758
  CDS (1)..(1080)

SEQ ID NO: 49072 - protein, 359 aa, Microbulbifer degradans 2-40; identical to SEQ ID NO: 27759

SEQ ID NO: 49073 - DNA, 1035 bp, Thiobacillus denitrificans ATCC 25259; identical to SEQ ID NO: 27760
  CDS (1)..(1035)

SEQ ID NO: 49074 - protein, 344 aa, Thiobacillus denitrificans ATCC 25259; identical to SEQ ID NO: 27761

SEQ ID NO: 49075 - DNA, 996 bp, Chloroflexus aurantiacus; identical to SEQ ID NO: 27762
  CDS (1)..(996)

SEQ ID NO: 49076 - protein, 331 aa, Chloroflexus aurantiacus; identical to SEQ ID NO: 27763

SEQ ID NO: 49077 - DNA, 1005 bp, Campylobacter coli RM2228; identical to SEQ ID NO: 27764
  CDS (1)..(1005): transl_table=11

SEQ ID NO: 49078 - protein, 334 aa, Campylobacter coli RM2228; identical to SEQ ID NO: 27765

SEQ ID NO: 49079 - DNA, 993 bp, Campylobacter lari RM2100; identical to SEQ ID NO: 27766
  CDS (1)..(993): transl_table=11

SEQ ID NO: 49080 - protein, 330 aa, Campylobacter lari RM2100; identical to SEQ ID NO: 27767

SEQ ID NO: 49081 - DNA, 1002 bp, Campylobacter upsaliensis RM3195; identical to SEQ ID NO: 27768
  CDS (1)..(1002): transl_table=11

SEQ ID NO: 49082 - protein, 333 aa, Campylobacter upsaliensis RM3195; identical to SEQ ID NO: 27769

SEQ ID NO: 49083 - DNA, 1065 bp, Erythrobacter litoralis HTCC2594; identical to SEQ ID NO: 27770
  CDS (1)..(1065): transl_table=11

SEQ ID NO: 49084 - protein, 354 aa, Erythrobacter litoralis HTCC2594; identical to SEQ ID NO: 27771

SEQ ID NO: 49085 - DNA, 1080 bp, Azotobacter vinelandii AvOP; identical to SEQ ID NO: 27772
  CDS (1)..(1080): transl_table=11

SEQ ID NO: 49086 - protein, 359 aa, Azotobacter vinelandii AvOP; identical to SEQ ID NO: 27773

SEQ ID NO: 49087 - DNA, 1095 bp, Burkholderia vietnamiensis G4; identical to SEQ ID NO: 27774
  CDS (1)..(1095): transl_table=11

SEQ ID NO: 49088 - protein, 364 aa, Burkholderia vietnamiensis G4; identical to SEQ ID NO: 27775

SEQ ID NO: 49089 - DNA, 1095 bp, Burkholderia cenocepacia AU 1054; identical to SEQ ID NO: 27776
  CDS (1)..(1095): transl_table=11

SEQ ID NO: 49090 - protein, 364 aa, Burkholderia cenocepacia AU 1054; identical to SEQ ID NO: 27777

SEQ ID NO: 49091 - DNA, 1056 bp, Chromohalobacter salexigens DSM 3043; identical to SEQ ID NO: 27778
  CDS (1)..(1056): transl_table=11

SEQ ID NO: 49092 - protein, 351 aa, Chromohalobacter salexigens DSM 3043; identical to SEQ ID NO: 27779

SEQ ID NO: 49093 - DNA, 1059 bp, Burkholderia pseudomallei 668; identical to SEQ ID NO: 27780
  CDS (1)..(1059)

SEQ ID NO: 49094 - protein, 352 aa, Burkholderia pseudomallei 668; identical to SEQ ID NO: 27781

SEQ ID NO: 49095 - DNA, 1068 bp, Polaromonas sp. JS666; identical to SEQ ID NO: 27782
  CDS (1)..(1068): transl_table=11

SEQ ID NO: 49096 - protein, 355 aa, Polaromonas sp. JS666; identical to SEQ ID NO: 27783

SEQ ID NO: 49097 - DNA, 1341 bp, Jannaschia sp. CCS1; identical to SEQ ID NO: 27784
  CDS (1)..(1341): transl_table=11

SEQ ID NO: 49098 - protein, 446 aa, Jannaschia sp. CCS1; identical to SEQ ID NO: 27785

SEQ ID NO: 49099 - DNA, 1038 bp, Methylobacillus flagellatus KT; identical to SEQ ID NO: 27786
  CDS (1)..(1038): transl_table=11

SEQ ID NO: 49100 - protein, 345 aa, Methylobacillus flagellatus KT; identical to SEQ ID NO: 27787

SEQ ID NO: 49101 - DNA, 1023 bp, Sphingopyxis alaskensis RB2256; identical to SEQ ID NO: 27788
  CDS (1)..(1023): transl_table=11

SEQ ID NO: 49102 - protein, 340 aa, Sphingopyxis alaskensis RB2256; identical to SEQ ID NO: 27789

SEQ ID NO: 49103 - DNA, 1032 bp, Shewanella baltica OS155; identical to SEQ ID NO: 27790
  CDS (1)..(1032): transl_table=11

SEQ ID NO: 49104 - protein, 343 aa, Shewanella baltica OS155; identical to SEQ ID NO: 27791

SEQ ID NO: 49105 - DNA, 1029 bp, Shewanella amazonensis SB2B; identical to SEQ ID NO: 27792
  CDS (1)..(1029): transl_table=11

SEQ ID NO: 49106 - protein, 342 aa, Shewanella amazonensis SB2B; identical to SEQ ID NO: 27793

SEQ ID NO: 49107 - DNA, 1035 bp, Ralstonia metallidurans CH34; identical to SEQ ID NO: 27794
  CDS (1)..(1035): transl_table=11

SEQ ID NO: 49108 - protein, 344 aa, Ralstonia metallidurans CH34; identical to SEQ ID NO: 27795

SEQ ID NO: 49109 - DNA, 1041 bp, Mesorhizobium sp. BNC1; identical to SEQ ID NO: 27796
  CDS (1)..(1041): transl_table=11

SEQ ID NO: 49110 - protein, 346 aa, Mesorhizobium sp. BNC1; identical to SEQ ID NO: 27797

SEQ ID NO: 49111 - DNA, 1041 bp, Silicibacter sp. TM1040; identical to SEQ ID NO: 27798
  CDS (1)..(1041): transl_table=11

SEQ ID NO: 49112 - protein, 346 aa, Silicibacter sp. TM1040; identical to SEQ ID NO: 27799

SEQ ID NO: 49113 - DNA, 1044 bp, Paracoccus denitrificans PD1222; identical to SEQ ID NO: 27800
  CDS (1)..(1044): transl_table=11

SEQ ID NO: 49114 - protein, 347 aa, Paracoccus denitrificans PD1222; identical to SEQ ID NO: 27801

SEQ ID NO: 49115 - DNA, 1035 bp, Shewanella denitrificans OS-217; identical to SEQ ID NO: 27802
  CDS (1)..(1035): transl_table=11

SEQ ID NO: 49116 - protein, 344 aa, Shewanella denitrificans OS-217; identical to SEQ ID NO: 27803

SEQ ID NO: 49117 - DNA, 1038 bp, Shewanella frigidimarina NCIMB 400; identical to SEQ ID NO: 27804
  CDS (1)..(1038): transl_table=11

SEQ ID NO: 49118 - protein, 345 aa, Shewanella frigidimarina NCIMB 400; identical to SEQ ID NO: 27805

SEQ ID NO: 49119 - DNA, 1047 bp, Pseudomonas fluorescens; identical to SEQ ID NO: 27806
  CDS (1)..(1047): transl_table=11

SEQ ID NO: 49120 - protein, 348 aa, Pseudomonas fluorescens; identical to SEQ ID NO: 27807

SEQ ID NO: 49121 - DNA, 888 bp, Theileria parva; identical to SEQ ID NO: 27808
  CDS (1)..(888)

SEQ ID NO: 49122 - protein, 295 aa, Theileria parva; identical to SEQ ID NO: 27809

SEQ ID NO: 49123 - DNA, 1053 bp, Theileria annulata; identical to SEQ ID NO: 27810
  CDS (1)..(1053)

SEQ ID NO: 49124 - protein, 350 aa, Theileria annulata; identical to SEQ ID NO: 27811

SEQ ID NO: 49125 - DNA, 1005 bp, Aspergillus fumigatus Af293; identical to SEQ ID NO: 27812
  CDS (1)..(1005)

SEQ ID NO: 49126 - protein, 334 aa, Aspergillus fumigatus Af293; identical to SEQ ID NO: 27813

SEQ ID NO: 49127 - DNA, 1086 bp, Plasmodium chabaudi; identical to SEQ ID NO: 27814
  CDS (1)..(1086)

SEQ ID NO: 49128 - protein, 361 aa, Plasmodium chabaudi; identical to SEQ ID NO: 27815

SEQ ID NO: 49129 - DNA, 1086 bp, Plasmodium yoelii yoelii; identical to SEQ ID NO: 27816
  CDS (1)..(1086)

SEQ ID NO: 49130 - protein, 361 aa, Plasmodium yoelii yoelii; identical to SEQ ID NO: 27817

SEQ ID NO: 49131 - DNA, 1212 bp, Toxoplasma gondii; identical to SEQ ID NO: 27818
  CDS (1)..(1212)

SEQ ID NO: 49132 - protein, 403 aa, Toxoplasma gondii; identical to SEQ ID NO: 27819

SEQ ID NO: 49133 - DNA, 1038 bp, Beta vulgaris; identical to SEQ ID NO: 27820
  CDS (1)..(1038)

SEQ ID NO: 49134 - protein, 345 aa, Beta vulgaris; identical to SEQ ID NO: 27821

SEQ ID NO: 49135 - DNA, 1038 bp, Agrobacterium tumefaciens; identical to SEQ ID NO: 27822
  CDS (1)..(1038)

SEQ ID NO: 49136 - protein, 345 aa, Agrobacterium tumefaciens; identical to SEQ ID NO: 27823

SEQ ID NO: 49137 - DNA, 1269 bp, Aquifex aeolicus; identical to SEQ ID NO: 27824
  CDS (1)..(1269): transl_table=11

SEQ ID NO: 49138 - protein, 422 aa, Aquifex aeolicus; identical to SEQ ID NO: 27825

SEQ ID NO: 49139 - DNA, 1134 bp, Arabidopsis thaliana; identical to SEQ ID NO: 27826
  CDS (1)..(1134)

SEQ ID NO: 49140 - protein, 377 aa, Arabidopsis thaliana; identical to SEQ ID NO: 27827

SEQ ID NO: 49141 - DNA, 1053 bp, Buchnera aphidicola; identical to SEQ ID NO: 27828
  CDS (1)..(1053): transl_table=11

SEQ ID NO: 49142 - protein, 350 aa, Buchnera aphidicola; identical to SEQ ID NO: 27829

SEQ ID NO: 49143 - DNA, 1050 bp, Buchnera aphidicola; identical to SEQ ID NO: 27830
  CDS (1)..(1050): transl_table=11

SEQ ID NO: 49144 - protein, 349 aa, Buchnera aphidicola; identical to SEQ ID NO: 27831

SEQ ID NO: 49145 - DNA, 1020 bp, Helicobacter pylori J99; identical to SEQ ID NO: 27832
  CDS (1)..(1020): transl_table=11

SEQ ID NO: 49146 - protein, 339 aa, Helicobacter pylori J99; identical to SEQ ID NO: 27833

SEQ ID NO: 49147 - DNA, 1020 bp, Helicobacter pylori; identical to SEQ ID NO: 27834
  CDS (1)..(1020): transl_table=11

SEQ ID NO: 49148 - protein, 339 aa, Helicobacter pylori; identical to SEQ ID NO: 27835

SEQ ID NO: 49149 - DNA, 1281 bp, Listeria innocua; identical to SEQ ID NO: 27836
  CDS (1)..(1281): transl_table=11

SEQ ID NO: 49150 - protein, 426 aa, Listeria innocua; identical to SEQ ID NO: 27837

SEQ ID NO: 49151 - DNA, 1281 bp, Listeria monocytogenes; identical to SEQ ID NO: 27838
  CDS (1)..(1281): transl_table=11

SEQ ID NO: 49152 - protein, 426 aa, Listeria monocytogenes; identical to SEQ ID NO: 27839

SEQ ID NO: 49153 - DNA, 1281 bp, Listeria monocytogenes; identical to SEQ ID NO: 27840
  CDS (1)..(1281): transl_table=11

SEQ ID NO: 49154 - protein, 426 aa, Listeria monocytogenes; identical to SEQ ID NO: 27841

SEQ ID NO: 49155 - DNA, 1035 bp, Neisseria meningitidis; identical to SEQ ID NO: 27842
  CDS (1)..(1035): transl_table=11

SEQ ID NO: 49156 - protein, 344 aa, Neisseria meningitidis; identical to SEQ ID NO: 27843

SEQ ID NO: 49157 - DNA, 1047 bp, Pseudomonas aeruginosa; identical to SEQ ID NO: 27844
  CDS (1)..(1047): transl_table=11

SEQ ID NO: 49158 - protein, 348 aa, Pseudomonas aeruginosa; identical to SEQ ID NO: 27845

SEQ ID NO: 49159 - DNA, 1047 bp, Pseudomonas putida; identical to SEQ ID NO: 27846
  CDS (1)..(1047): transl_table=11

SEQ ID NO: 49160 - protein, 348 aa, Pseudomonas putida; identical to SEQ ID NO: 27847

SEQ ID NO: 49161 - DNA, 1035 bp, Ralstonia solanacearum; identical to SEQ ID NO: 27848
  CDS (1)..(1035): transl_table=11

SEQ ID NO: 49162 - protein, 344 aa, Ralstonia solanacearum; identical to SEQ ID NO: 27849

SEQ ID NO: 49163 - DNA, 1044 bp, Rhizobium meliloti; identical to SEQ ID NO: 27850
  CDS (1)..(1044): transl_table=11

SEQ ID NO: 49164 - protein, 347 aa, Rhizobium meliloti; identical to SEQ ID NO: 27851

SEQ ID NO: 49165 - DNA, 1047 bp, Salmonella typhimurium; identical to SEQ ID NO: 27648
  CDS (1)..(1047)

SEQ ID NO: 49166 - protein, 348 aa, Salmonella typhimurium; identical to SEQ ID NO: 27649

SEQ ID NO: 49167 - DNA, 1014 bp, Schizosaccharomyces pombe; identical to SEQ ID NO: 27854
  CDS (1)..(1014)

SEQ ID NO: 49168 - protein, 337 aa, Schizosaccharomyces pombe; identical to SEQ ID NO: 27855

SEQ ID NO: 49169 - DNA, 1278 bp, Staphylococcus epidermidis; identical to SEQ ID NO: 27856
  CDS (1)..(1278): transl_table=11

SEQ ID NO: 49170 - protein, 425 aa, Staphylococcus epidermidis; identical to SEQ ID NO: 27857

SEQ ID NO: 49171 - DNA, 1278 bp, Staphylococcus epidermidis; identical to SEQ ID NO: 27858
  CDS (1)..(1278): transl_table=11

SEQ ID NO: 49172 - protein, 425 aa, Staphylococcus epidermidis; identical to SEQ ID NO: 27859

SEQ ID NO: 49173 - DNA, 1029 bp, Synechocystis sp; identical to SEQ ID NO: 27860
  CDS (1)..(1029): transl_table=11

SEQ ID NO: 49174 - protein, 342 aa, Synechocystis sp; identical to SEQ ID NO: 27861

SEQ ID NO: 49175 - DNA, 1176 bp, Ustilago maydis; identical to SEQ ID NO: 27862
  CDS (1)..(1176)

SEQ ID NO: 49176 - protein, 391 aa, Ustilago maydis; identical to SEQ ID NO: 27863

SEQ ID NO: 49177 - DNA, 1029 bp, Vibrio cholerae; identical to SEQ ID NO: 27864
  CDS (1)..(1029)

SEQ ID NO: 49178 - protein, 342 aa, Vibrio cholerae; identical to SEQ ID NO: 27865

SEQ ID NO: 49179 - DNA, 1029 bp, Vibrio parahaemolyticus; identical to SEQ ID NO: 27866
  CDS (1)..(1029): transl_table=11

SEQ ID NO: 49180 - protein, 342 aa, Vibrio parahaemolyticus; identical to SEQ ID NO: 27867

SEQ ID NO: 49181 - DNA, 1029 bp, Vibrio vulnificus; identical to SEQ ID NO: 27868
  CDS (1)..(1029)

SEQ ID NO: 49182 - protein, 342 aa, Vibrio vulnificus; identical to SEQ ID NO: 27869

SEQ ID NO: 49183 - DNA, 1029 bp, Vibrio vulnificus; identical to SEQ ID NO: 27870
  CDS (1)..(1029)

SEQ ID NO: 49184 - protein, 342 aa, Vibrio vulnificus; identical to SEQ ID NO: 27871

SEQ ID NO: 49185 - DNA, 1095 bp, Saccharomyces cerevisiae; identical to SEQ ID NO: 27872
  CDS (1)..(1095)

SEQ ID NO: 49186 - protein, 364 aa, Saccharomyces cerevisiae; identical to SEQ ID NO: 27873

SEQ ID NO: 49187 - DNA, 1047 bp, Yersinia pestis; identical to SEQ ID NO: 27874
  CDS (1)..(1047): transl_table=11

SEQ ID NO: 49188 - protein, 348 aa, Yersinia pestis; identical to SEQ ID NO: 27875

SEQ ID NO: 49189 - DNA, 23 bp, Artificial sequence
  Primer sequence
atgactgcaccatcccaggtatt

SEQ ID NO: 49190 - DNA, 24 bp, Artificial sequence
  Primer sequence
ttattgtttaacggaccagcgtac

SEQ ID NO: 49191 - protein, 478 aa, Artificial sequence; identical to SEQ ID NO: 27878
  Consensus
  Variant (2)..(2): Xaa in position 2 is any amino acid
  Variant (4)..(5): Xaa in position 4 to 5 is any amino acid
  Variant (7)..(7): Xaa in position 7 is any amino acid
  Variant (9)..(9): Xaa in position 9 is any amino acid
  Variant (15)..(16): Xaa in position 15 to 16 is any or no amino acid
  Variant (19)..(20): Xaa in position 19 to 20 is any amino acid
  Variant (22)..(33): Xaa in position 22 to 33 is any amino acid
  Variant (34)..(41): Xaa in position 34 to 41 is any or no amino acid
  Variant (49)..(49): Xaa in position 49 is any or no amino acid
  Variant (51)..(51): Xaa in position 51 is any or no amino acid
  Variant (54)..(58): Xaa in position 54 to 58 is any amino acid
  Variant (59)..(61): Xaa in position 59 to 61 is any or no amino acid
  Variant (64)..(64): Xaa in position 64 is any amino acid
  Variant (65)..(65): Xaa in position 65 is any or no amino acid
  Variant (67)..(84): Xaa in position 67 to 84 is any or no amino acid
  Variant (88)..(89): Xaa in position 88 to 89 is any or no amino acid
  Variant (92)..(92): Xaa in position 92 is any amino acid
  Variant (93)..(98): Xaa in position 93 to 98 is any or no amino acid
  Variant (101)..(102): Xaa in position 101 to 102 is any amino acid
  Variant (104)..(106): Xaa in position 104 to 106 is any amino acid
  Variant (107)..(108): Xaa in position 107 to 108 is any or no amino acid
  Variant (110)..(110): Xaa in position 110 is any amino acid
  Variant (112)..(112): Xaa in position 112 is any amino acid
  Variant (118)..(119): Xaa in position 118 to 119 is any amino acid
  Variant (124)..(125): Xaa in position 124 to 125 is any amino acid
  Variant (128)..(139): Xaa in position 128 to 139 is any amino acid
  Variant (140)..(145): Xaa in position 140 to 145 is any or no amino acid
  Variant (147)..(150): Xaa in position 147 to 150 is any amino acid
  Variant (152)..(152): Xaa in position 152 is any amino acid
  Variant (154)..(154): Xaa in position 154 is any amino acid
  Variant (159)..(161): Xaa in position 159 to 161 is any amino acid
  Variant (162)..(181): Xaa in position 162 to 181 is any or no amino acid
  Variant (183)..(185): Xaa in position 183 to 185 is any amino acid
  Variant (187)..(188): Xaa in position 187 to 188 is any amino acid
  Variant (191)..(192): Xaa in position 191 to 192 is any amino acid
  Variant (193)..(203): Xaa in position 193 to 203 is any or no amino acid
  Variant (205)..(206): Xaa in position 205 to 206 is any amino acid
  Variant (208)..(211): Xaa in position 208 to 211 is any amino acid
  Variant (213)..(213): Xaa in position 213 is any amino acid
  Variant (218)..(218): Xaa in position 218 is any amino acid
  Variant (224)..(225): Xaa in position 224 to 225 is any amino acid
  Variant (227)..(229): Xaa in position 227 to 229 is any amino acid
  Variant (231)..(235): Xaa in position 231 to 235 is any amino acid
  Variant (236)..(244): Xaa in position 236 to 244 is any or no amino acid
  Variant (246)..(246): Xaa in position 246 is any or no amino acid
  Variant (251)..(252): Xaa in position 251 to 252 is any amino acid
  Variant (255)..(260): Xaa in position 255 to 260 is any amino acid
  Variant (262)..(264): Xaa in position 262 to 264 is any amino acid
  Variant (265)..(265): Xaa in position 265 is any or no amino acid
  Variant (267)..(288): Xaa in position 267 to 288 is any or no amino acid
  Variant (290)..(290): Xaa in position 290 is any or no amino acid
  Variant (293)..(293): Xaa in position 293 is any amino acid
  Variant (296)..(296): Xaa in position 296 is any amino acid
  Variant (298)..(303): Xaa in position 298 to 303 is any amino acid
  Variant (306)..(310): Xaa in position 306 to 310 is any amino acid
  Variant (311)..(311): Xaa in position 311 is any or no amino acid
  Variant (314)..(315): Xaa in position 314 to 315 is any amino acid
  Variant (317)..(317): Xaa in position 317 is any amino acid
  Variant (319)..(319): Xaa in position 319 is any amino acid
  Variant (327)..(330): Xaa in position 327 to 330 is any amino acid
  Variant (332)..(364): Xaa in position 332 to 364 is any or no amino acid
  Variant (367)..(367): Xaa in position 367 is any amino acid
  Variant (369)..(369): Xaa in position 369 is any amino acid
  Variant (371)..(373): Xaa in position 371 to 373 is any amino acid
  Variant (375)..(375): Xaa in position 375 is any amino acid
  Variant (376)..(390): Xaa in position 376 to 390 is any or no amino acid
  Variant (393)..(395): Xaa in position 393 to 395 is any amino acid
  Variant (396)..(396): Xaa in position 396 is any or no amino acid
  Variant (398)..(399): Xaa in position 398 to 399 is any amino acid
  Variant (401)..(402): Xaa in position 401 to 402 is any amino acid
  Variant (404)..(404): Xaa in position 404 is any amino acid
  Variant (406)..(407): Xaa in position 406 to 407 is any amino acid
  Variant (409)..(410): Xaa in position 409 to 410 is any amino acid
  Variant (413)..(413): Xaa in position 413 is any amino acid
  Variant (415)..(420): Xaa in position 415 to 420 is any amino acid
  Variant (421)..(426): Xaa in position 421 to 426 is any or no amino acid
  Variant (428)..(428): Xaa in position 428 is any amino acid
  Variant (430)..(430): Xaa in position 430 is any amino acid
  Variant (432)..(441): Xaa in position 432 to 441 is any amino acid
  Variant (442)..(466): Xaa in position 442 to 466 is any or no amino acid
  Variant (468)..(468): Xaa in position 468 is any amino acid
  Variant (470)..(472): Xaa in position 470 to 472 is any amino acid
  Variant (474)..(475): Xaa in position 474 to 475 is any amino acid
  Variant (477)..(477): Xaa in position 477 is any amino acid

SEQ ID NO: 49192 - protein, 17 aa, Artificial sequence
  Consensus
  Variant (2)..(3): Xaa in position 2 to 3 is any amino acid
  Variant (4)..(5): Xaa in position 4 to 5 is any or no amino acid
  Variant (7)..(7): Xaa in position 7 is any amino acid
  Variant (8)..(9): Xaa in position 8 to 9 is any or no amino acid
  Variant (11)..(11): Xaa in position 11 is any amino acid
  Variant (13)..(13): Xaa in position 13 is any amino acid
  Variant (15)..(15): Xaa in position 15 is Phe, Leu or Val
  Variant (17)..(17): Xaa in position 17 is Asp, Glu or Gln
LXXXXPXXXDXHXHXRX

SEQ ID NO: 49193 - protein, 25 aa, Artificial sequence
  Consensus
  Variant (2)..(3): Xaa in position 2 to 3 is any amino acid
  Variant (4)..(4): Xaa in position 4 is any or no amino acid
  Variant (8)..(10): Xaa in position 8 to 10 is any amino acid
  Variant (12)..(12): Xaa in position 12 is Ala, Ile, Leu or Val
  Variant (13)..(20): Xaa in position 13 to 20 is any amino acid
  Variant (22)..(24): Xaa in position 22 to 24 is any amino acid
  Variant (25)..(25): Xaa in position 25 is Ile or Leu
AXXXMPNXXXPXXXXXXXXXYXXXX

SEQ ID NO: 49194 - protein, 8 aa, Artificial sequence
  Consensus
  Variant (2)..(2): Xaa in position 2 is any or no amino acid
  Variant (4)..(5): Xaa in position 4 to 5 is any or no amino acid
LXLXXHGE

SEQ ID NO: 49195 - protein, 41 aa, Artificial sequence; identical to SEQ ID NO: 27882
  Consensus
  Variant (2)..(2): Xaa in position 2 is any amino acid
  Variant (4)..(4): Xaa in position 4 is Ile, Leu or Val
  Variant (5)..(5): Xaa in position 5 is Ala, Leu, Pro or Val
  Variant (7)..(9): Xaa in position 7 to 9 is any amino acid
  Variant (10)..(10): Xaa in position 10 is Asp or His
  Variant (11)..(12): Xaa in position 11 to 12 is any amino acid
  Variant (13)..(13): Xaa in position 13 is Ala, Ser, Thr or Val
  Variant (15)..(17): Xaa in position 15 to 17 is any amino acid
  Variant (18)..(18): Xaa in position 18 is Ala, Ile or Val
  Variant (19)..(19): Xaa in position 19 is any amino acid
  Variant (20)..(20): Xaa in position 20 is Ala, Asp, Glu, Gly, Asn, Gln, Ser or Thr
  Variant (22)..(24): Xaa in position 22 to 24 is any amino acid
  Variant (25)..(26): Xaa in position 25 to 26 is any or no amino acid
  Variant (28)..(29): Xaa in position 28 to 29 is any or no amino acid
  Variant (31)..(31): Xaa in position 31 is Ser or Thr
  Variant (33)..(33): Xaa in position 33 is Ser or Thr
  Variant (37)..(40): Xaa in position 37 to 40 is any amino acid

SEQ ID NO: 49196 - DNA, 591 bp, Escherichia coli
  CDS (1)..(591)
atgcagcttaaacgtgtggcagaagccaaactgccaaccccatggggcgatttcctgatggtgggatttgaagaactggcaaccggacacgatcatgtcgcgctagtctatggcgatatttccgggcataccccggtacttgcgcgcgtccattccgaatgtctgaccggtgacgccctgttcagcttgcgctgcgattgtggcttccagctcgaagcggcattgacgcaaattgccgaggaaggccgtggtattttgctgtatcaccgtcaggaaggtcgtaacattggtctgctgaataaaatccgcgcttacgcactgcaggatcaaggttacgataccgtagaggctaaccaccagttaggcttcgccgctgatgagcgcgacttcactctttgcgctgatatgttcaaactccttggcgtcaatgaagtccgcttgttaaccaataacccgaaaaaagtcgaaattctgaccgaagcagggattaatattgttgaacgcgtaccattgattgtaggtcgtaaccccaataacgaacattatctcgataccaaagccgagaaaatgggccatttgctgaacaaataa

SEQ ID NO: 49197 - protein, 196 aa, Escherichia coli
MQLKRVAEAKLPTPWGDFLMVGFEELATGHDHVALVYGDISGHTPVLARVHSECLTGDALFSLRCDCGFQLEAALTQIAEEGRGILLYHRQEGRNIGLLNKIRAYALQDQGYDTVEANHQLGFAADERDFTLCADMFKLLGVNEVRLLTNNPKKVEILTEAGINIVERVPLIVGRNPNNEHYLDTKAEKMGHLLNK

SEQ ID NO: 49198 - DNA, 588 bp, Thermoplasma volcanium GSS1
  CDS (1)..(588): transl_table=11
atgatagagctttattcaaatgcaaagctgcctactgaatttgggcttttccgtatatatacgtttgtcaacgacgaaaataaggatcacgcagttattgtaaggggtgatccgagaggaaaggaaaatgtacctctccgcatacattccgaatgcctaactggcgatgtccttggctcacttcgatgcgactgcagagatcagctgatccagtctctgaggtatcttggcagacaggaatacggaatgcttatatacttaaggcaagagggtagaggtatcggtctccttaacaagataaaagcgtacagtctacaggatatgggtgcggatacggtagaagctaatcttaagctaggactgcctgtcgatagtcgaaactatagttttgctgcagaagttctaaggtactttgagataaaatctatatacataatgacaaataacccagaaaagataaaatcgctcatcgaaagtggaatcaacgtgaagggaagaataccaatattcagcgatccaacgccatacgataagttttatttggaaacaaagaaaacaaaactcgggcatgagatcgaaaatatataa

SEQ ID NO: 49199 - protein, 195 aa, Thermoplasma volcanium GSS1
MIELYSNAKLPTEFGLFRIYTFVNDENKDHAVIVRGDPRGKENVPLRIHSECLTGDVLGSLRCDCRDQLIQSLRYLGRQEYGMLIYLRQEGRGIGLLNKIKAYSLQDMGADTVEANLKLGLPVDSRNYSFAAEVLRYFEIKSIYIMTNNPEKIKSLIESGINVKGRIPIFSDPTPYDKFYLETKKTKLGHEIENI

SEQ ID NO: 49200 - DNA, 1431 bp, Arabidopsis thaliana
  CDS (1)..(1431)
atggcgtcgcttactctccggtgcgattcgacgcatcttttgccttcccgtgatgttgtcaagggaacaaaaccatttggaacgagcttggtgtatcctaggatcatatcgaagaagtttaatgttagaatgagagtgatacctgaggaaggagatgtgttctcttcttctaagagtaatggatcatcaatggggattgagttacagccagatttggtttcgtttggaacattagcagctgaaatgattcctacaacaatggattctcctgaagttgaggatgaagagtttgatttagatcgacctactgatggatttgcgtctattcctcaagctattgaagatattcgacatggcaagatggtagttgttgtagatgatgaagatagagaaaacgaaggagatttgataatggcggcatctttggctacacctgaagctatggcttttgttgtaaagcatgggactggaatcgtgtgtgtgagcatgaaaggcgaagacttggagaggttagagcttcctttaatggtaacgcgtaaggataacgaggaaaaactccgcacggccttcacggtttcagtggacgcaaaaaagggaacatccacaggtgtctcagctcgtgatagggcgcaaacaatattaacccttgcatcaaaagattcaaaacctgaagatttcaatcgtcctggtcatatttttcctttgagatacagagaaggtggtgttcttaaaagagcagggcatacagaagcctctgttgacttgactgtgttggccggtttagaaccagtatctgttttatgtgagattgtagatgatgatggttccatggctagattaccaagactccgccaattcgctcaagagaacaacttgaaattaatttcaatcgctgatttaatcagataccgaaggaaaagagagagactggttgagtttactgcggttgcgcctataccgacaatgtggggaccattcaaagcacattgctttaagtcattacttgatggagttgagcacattgcaatggtcaagggagaaatcggagatgggaaggatattctcgtgagagtacacgcggagtgtatcacagatgatatattcggaaatagctctggtggaaaacagttagcgattgcaatgagactgattgaagaaaatgggagaggtgtttttgtctacttacgtggtcctgaaagtaaaggcattgatctaagccacaagcctcgtacttacaacaccaattcagatcaagccgagggtgtttcatttcccgttgcttcacgggaatacggcattggagcacaaattctaagggatcttggagttagagagatgaaggtgatgacgaataatccagcacattacgttggtcttaaaggctatggtttatcaatttctggtaaggttccactcattactactccttaa

SEQ ID NO: 49201 - protein, 476 aa, Arabidopsis thaliana
MASLTLRCDSTHLLPSRDVVKGTKPFGTSLVYPRIISKKFNVRMRVIPEEGDVFSSSKSNGSSMGIELQPDLVSFGTLAAEMIPTTMDSPEVEDEEFDLDRPTDGFASIPQAIEDIRHGKMVVVVDDEDRENEGDLIMAASLATPEAMAFVVKHGTGIVCVSMKGEDLERLELPLMVTRKDNEEKLRTAFTVSVDAKKGTSTGVSARDRAQTILTLASKDSKPEDFNRPGHIFPLRYREGGVLKRAGHTEASVDLTVLAGLEPVSVLCEIVDDDGSMARLPRLRQFAQENNLKLISIADLIRYRRKRERLVEFTAVAPIPTMWGPFKAHCFKSLLDGVEHIAMVKGEIGDGKDILVRVHAECITDDIFGNSSGGKQLAIAMRLIEENGRGVFVYLRGPESKGIDLSHKPRTYNTNSDQAEGVSFPVASREYGIGAQILRDLGVREMKVMTNNPAHYVGLKGYGLSISGKVPLITTP

SEQ ID NO: 49202 - DNA, 1632 bp, Arabidopsis thaliana
  CDS (1)..(1632)
atgtcttccatcaatttatcctcatcatctccttccaccatctctctttcccgctcaagactaagccaaagctctactacattactccatggactacatcgtgttactttaccatctaaccatccattgtcaaccttttccattaaaaccaatactggaaaagttaaggctgcagtgatctctagagaagatgatctgctctcattcaccaacggaaacactcctctctcaaatgggtctctcattgatgatcggaccgaagagccattagaggctgattcggtttcacttggaacacttgctgctgattctgctcctgcaccagccaatggttttgttgctgaagatgatgactttgagttggatttaccaactcctggtttctcttctatccctgaggccattgaagatatacgccaaggaaagcttgtggtggttgtggatgatgaagatagggaaaatgaaggggatttggtgatggctgctcagttagcaacacctgaagctatggcttttattgtgagacatggaactgggatagtttgtgtgagcatgaaagaagatgatctcgagaggttgcaccttcctctaatggtgaatcagaaggaaaacgaagaaaagctctctactgcatttacagtgactgtggatgcaaaacatggtacaacaacgggagtatcagctcgtgacagggcaacaaccatattgtctcttgcatcaagagattcaaagcctgaggatttcaatcgtccaggtcatatcttcccactgaagtatcgggaaggtggggttctgaaaagggctggacacactgaagcatctgttgatctcactgttttagctggactggatcctgttggagtactttgtgaaattgttgatgatgatggttccatggctagattaccaaaacttcgtgaatttgccgccgagaacaacctgaaagttgtttccatcgcagatttgatcaggtatagaagaaagagagataaattagtggaacgtgcttctgcggctcggatcccaacaatgtggggacctttcactgcttactgctataggtccatattagacggaatagagcacatagcaatggttaagggtgagattggtgacggtcaagacattctcgtgagggttcattctgaatgtctaacaggggacatatttgggtctgcaaggtgtgattgcgggaaccagctagcactctcgatgcagcagatcgaggctactggtcgcggtgtgctggtttacctacgtggacatgaaggaagagggatcggtttaggacacaagcttcgagcttacaatctgcaagatgctggtcgagacacggttgaagctaatgaggaattaggacttcctgttgattctagagagtatggaattggtgcacagataataagggatttaggtgttaggacaatgaagctgatgacaaataatcccgcaaagtatgttggtttgaagggatatggattagccattgttgggagagtccctctattgagtcttatcacgaaggagaataagagatatctggagacaaagcggaccaagatgggtcacatgtatggcttgaagttcaaaggggatgttgtggagaagattgagtctgaatctgagtcctaa

SEQ ID NO: 49203 - protein, 543 aa, Arabidopsis thaliana
MSSINLSSSSPSTISLSRSRLSQSSTTLLHGLHRVTLPSNHPLSTFSIKTNTGKVKAAVISREDDLLSFTNGNTPLSNGSLIDDRTEEPLEADSVSLGTLAADSAPAPANGFVAEDDDFELDLPTPGFSSIPEAIEDIRQGKLVVVVDDEDRENEGDLVMAAQLATPEAMAFIVRHGTGIVCVSMKEDDLERLHLPLMVNQKENEEKLSTAFTVTVDAKHGTTTGVSARDRATTILSLASRDSKPEDFNRPGHIFPLKYREGGVLKRAGHTEASVDLTVLAGLDPVGVLCEIVDDDGSMARLPKLREFAAENNLKVVSIADLIRYRRKRDKLVERASAARIPTMWGPFTAYCYRSILDGIEHIAMVKGEIGDGQDILVRVHSECLTGDIFGSARCDCGNQLALSMQQIEATGRGVLVYLRGHEGRGIGLGHKLRAYNLQDAGRDTVEANEELGLPVDSREYGIGAQIIRDLGVRTMKLMTNNPAKYVGLKGYGLAIVGRVPLLSLITKENKRYLETKRTKMGHMYGLKFKGDVVEKIESESES

SEQ ID NO: 49204 - DNA, 651 bp, Vibrio cholerae O1 biovar eltor str. N16961
  CDS (1)..(651): transl_table=11
atgcaaatgttgagaaacgtgcatcccgttacagaaattcaagtgagtgcaaacatggcggaagtaagagccagagtcgattttaaagtcggtgcgaaaagcaatattgacgcagaaatcctgtcatttcatggactgcaatcagacaaagaacacgttgcagtgattttcaaatcagcggataccacccaagaagccccgcttgtgcgtatgcactcggagtgtttaacgggcgatgttttccattcgtctcgttgtgactgtggtgagcagctagaagaaaccattactcgcatggggcagtcaggcggcatcattctgtatttacgtcaagaagggcgaggtattggtctgtacaacaagattgatgcgtatcgcttgcaaagtcagggtatgaatacttatgaagccaataatcacctcggttttggggatgatctgcgtgactttacggaagccgcacaaatgctacaagccttgggggtgaagaagatccgtttggtgacgaacaatccgaaaaagatccgtgagttacaagaacatggcattgagattgtcgaggtggttcatacctcggcacacatcaaagacggtaatgaaaattacctgaaagccaaagtttctcacggtaagcatcaactcaaactgtaa

SEQ ID NO: 49205 - protein, 216 aa, Vibrio cholerae O1 biovar eltor str. N16961
MQMLRNVHPVTEIQVSANMAEVRARVDFKVGAKSNIDAEILSFHGLQSDKEHVAVIFKSADTTQEAPLVRMHSECLTGDVFHSSRCDCGEQLEETITRMGQSGGIILYLRQEGRGIGLYNKIDAYRLQSQGMNTYEANNHLGFGDDLRDFTEAAQMLQALGVKKIRLVTNNPKKIRELQEHGIEIVEVVHTSAHIKDGNENYLKAKVSHGKHQLKL

SEQ ID NO: 49206 - DNA, 1110 bp, Vibrio cholerae O1 biovar eltor str. N16961
  CDS (1)..(1110): transl_table=11
atgccaattagcaccccacaagagatcattgaagacattcgtcaaggcaaaatggtcatcctgatggatgatgaagatcgtgaaaatgaaggcgatctgatcatggcggctgagcacattacgccagcagcgatcaattttatggcaacccatggtcgcggactcatctgtttaacgctcacgaaagagcgttgtcgccgtctgggtttaaatcccatggtacaagataataatgcccagtacaccaccaatttcaccgtttcgattgaagctgccgaaggcgtgaccaccggtatttcagcggcggatcgcgcgcgcacagtacaagcggcagtggcaaaagaagcgaaagcggccgatttggttcagccggggcatattttcccgttggctgcacaagatggcggagtattaacgcgcgctgggcacacagaagctgggtgtgatttggcacgcttggcaggtttagagcccgcgtcggtgattgtggaaattcttaatgatgacggcaccatggcgcgtcgtccggacttagaagtgttcgctgaaaaacacggcttaaagctgggtacgattgcagacttgattgagtaccgcaaccacaccgaaaccaccattgagcgtgtcgcgcagtgtaaactgccaaccgaatatggtgagtttgagctggtgacttaccgcgacatcatcgataagcaaatccactttgctctgcgtaaaggcgatattactagtgcgccaactcttgtgcgtgtgcatctgcaagatacttttaccgatctgctgcacagcaaccgtgcggcagagcgcagttggccacttgcgacagcaatgcagcgtattgggcaagaaggcggggtgttggtgatcctgggtcatgaagaatcgagtgagctcttgctacaccgagtgaaaatgtttgagctgcaagataaaggcgaagcccctgcgatggccaaaaaacaaggcacttcacgccgggtcggggttggctcgcaaatccttgctgatcttggagtgaaagagatgcgtctgctctcttcaccaaacaaaaagtaccacgcattgggtggttttggtctcaatgtggtcgaatacgtctgcgaataa

SEQ ID NO: 49207 - protein, 369 aa, Vibrio cholerae O1 biovar eltor str. N16961
MPISTPQEIIEDIRQGKMVILMDDEDRENEGDLIMAAEHITPAAINFMATHGRGLICLTLTKERCRRLGLNPMVQDNNAQYTTNFTVSIEAAEGVTTGISAADRARTVQAAVAKEAKAADLVQPGHIFPLAAQDGGVLTRAGHTEAGCDLARLAGLEPASVIVEILNDDGTMARRPDLEVFAEKHGLKLGTIADLIEYRNHTETTIERVAQCKLPTEYGEFELVTYRDIIDKQIHFALRKGDITSAPTLVRVHLQDTFTDLLHSNRAAERSWPLATAMQRIGQEGGVLVILGHEESSELLLHRVKMFELQDKGEAPAMAKKQGTSRRVGVGSQILADLGVKEMRLLSSPNKKYHALGGFGLNVVEYVCE

SEQ ID NO: 49208 - DNA, 1215 bp, Bacillus halodurans C-125
  CDS (1)..(1215): transl_table=11
atggacaaaaagctatttgatccgattgaagaagcaatatatgaattaatgcaaggtcgagtcgtgatcgtttgtgatgatgaggatcgggaaaacgaaggggattttgtagcccttgctgaaaaagcaacaccagaagtgattaacttcatgatcacgcatggccgtggtctcgtttgcacgccaatcacggaagagcgggcaaaggaattagatcttgtccccatggtggaccataataccgatccccatggtacggcgtttaccgtcagcattgatcatcaaatgacgaccacaggaatttctgcccatgaacgggctatgacgattcaggcgttaattgataagaaaacgaaaaagcaccacttcaaacgaccaggtcacattttccccctaatagcgaaaaacggaggagtactccgacgggccggtcatacagaagcggccgttgatctagctcgtttgtcaggcgctgagccggcaggggttatttgtgaaatcattaaagaagatggttcaatggcacgagttcctgatttgcgaaaaatcgccgatcagtttgaactgaagatgatcacaattaaagatttaatcgaatatcgtcaccgtaaagacaagcttgtcaagcgtgaagtagatatttccttaccgacggatttcggctcattccgtgcaatcggttatacagatgtcattgatggaaaagagagtgtcgctttagtgaaaggacagattgttgaaggtgaaccaacactcgttcgtgttcactccgaatgtttaacaggtgatgtgttcggttctcaccgttgcgattgtggcccacaactccaggcagctctcacacaaatcgagcaacaaggcaaagggatactcctttatatgcgtcaagagggtcgtggtatcggtctcatgaataagttgaaggcatacaagcttcaagaagaaggctatgatactgtagaagcaaatgagaaattaggctttcctgctgatcttcgggactatggaatgggcgcgcaaattttacgcgacttaggtgtgtcaaaaatgcgcctccttacaaacaatccgcgaaaaattacgggcttgaaagggtatggccttgaagtggttgaacgggtgccgctccaattacctcataacaaagataatgagcgctatttgaaaacaaagcacgaaaagttaggacatctgctaaattttactcattcgtaa

SEQ ID NO: 49209 - protein, 404 aa, Bacillus halodurans C-125
MDKKLFDPIEEAIYELMQGRVVIVCDDEDRENEGDFVALAEKATPEVINFMITHGRGLVCTPITEERAKELDLVPMVDHNTDPHGTAFTVSIDHQMTTTGISAHERAMTIQALIDKKTKKHHFKRPGHIFPLIAKNGGVLRRAGHTEAAVDLARLSGAEPAGVICEIIKEDGSMARVPDLRKIADQFELKMITIKDLIEYRHRKDKLVKREVDISLPTDFGSFRAIGYTDVIDGKESVALVKGQIVEGEPTLVRVHSECLTGDVFGSHRCDCGPQLQAALTQIEQQGKGILLYMRQEGRGIGLMNKLKAYKLQEEGYDTVEANEKLGFPADLRDYGMGAQILRDLGVSKMRLLTNNPRKITGLKGYGLEVVERVPLQLPHNKDNERYLKTKHEKLGHLLNFTHS

SEQ ID NO: 49210 - DNA, 1197 bp, Lactococcus lactis subsp. lactis Il1403
  CDS (1)..(1197): transl_table=11
atgttccaatataataaagtagaagaagcacttgctgcacttaaagcaggggaaatgattatcgttagtgacgatgaaaatagagaaaatgagggcgaccttatctgtgcggccgaatttatcagtccagaaataattaattttatggcaagtgaggccaaaggattgatatgcgcaccactcagtgaaacttatgctaagaatttacaattagaagcaatggtagagaaaaatacagataatcatggaacagcttttacagtttcggttgatcatattgaaactagcacaggaatttcggcttttgaacgggccttaaccataaaaaaacttgttgatgccgagagtttaccaagtgattttcgtagaccaggtcatgtatttccacttattgccaagaaaaatggtctttttgagcgaaatggtcatactgaggctacggttgacttgttgcgtctggctggtttaaaagaagtaggtgtctgcgttgaaataatggacgaagatggaacaatgatgcataaggagaaactgaaggaaaaagcgcaagagtggggcttgaaatatatcacaattaaagctattcaagagtatcttaagcaaaatgaactacaagtagaacaggtgactagagctaaactaccgacgaaatatggtatgtttgatattttaggatttgtcaataaaataaatggtgagcaccatgttgctttagttaaaggagatattggtgacggtcaagctattctttgccgcgttcactcagaatgcttaactagtgatgcttttggttctttgaaatgtgactgcggtggacaattagaagaagcattaaaaaaaataaatgatgaggggcgtggcgtgcttttatatcttcgacaagaaggacgtggaattggtttgattaataaacttcgtgcctactcacttcaagatgaaggacttgatacggttgaagctaatttagctttggggtttgaagaagatgagcgagaatattctattggagcacaaattttaaaaataattggggtgaaatcattgaaattaatgactaataatccgcaaaagattaatgattttcaaaaatatggtctagtagttgaagaaagagtagctctccaaatcaaagataacccctttgaccttgattatttaaaagtaaaacaaaataaaatgggacatttgtttgactaa

SEQ ID NO: 49211 - protein, 398 aa, Lactococcus lactis subsp. lactis Il1403
MFQYNKVEEALAALKAGEMIIVSDDENRENEGDLICAAEFISPEIINFMASEAKGLICAPLSETYAKNLQLEAMVEKNTDNHGTAFTVSVDHIETSTGISAFERALTIKKLVDAESLPSDFRRPGHVFPLIAKKNGLFERNGHTEATVDLLRLAGLKEVGVCVEIMDEDGTMMHKEKLKEKAQEWGLKYITIKAIQEYLKQNELQVEQVTRAKLPTKYGMFDILGFVNKINGEHHVALVKGDIGDGQAILCRVHSECLTSDAFGSLKCDCGGQLEEALKKINDEGRGVLLYLRQEGRGIGLINKLRAYSLQDEGLDTVEANLALGFEEDEREYSIGAQILKIIGVKSLKLMTNNPQKINDFQKYGLVVEERVALQIKDNPFDLDYLKVKQNKMGHLFD

SEQ ID NO: 49212 - DNA, 561 bp, Campylobacter jejuni subsp. jejuni NCTC 11168
  CDS (1)..(561): transl_table=11
atggaaataaaaatttcagaaattgcgaatttacctagcaaatggggaaatttccaaatgcaaagtttcaaagaaaacgataaagaacatttatgcatatttaaaaacactccaaaagatacactcaatctaagaattcattcagagtgcttaacaggagatgctttaggaagtttaaaatgcgactgcggagaacaacttgaattttcgctaaaatatatagaaaagaatggcggaatggtgatttatcttagacaagaaggaaggggtatagggctttttaacaaggttaatgcttatgctttacaagataaaggttttgatacgattaaagcaaatcatcagcttggctttaaagccgatgagagaacttatgaaattgtagaatttatactcaaacactatgaaatttctaaggttaatttactcacaaataaccctgaaaagctagattctatcaaagaaaaaatcatcacacgcataccgattttaatagaacctaatcgttttaatgtagagtatttaaacataaaacaaactcaaatgggacatcttaaataa

SEQ ID NO: 49213 - protein, 186 aa, Campylobacter jejuni subsp. jejuni NCTC 11168
MEIKISEIANLPSKWGNFQMQSFKENDKEHLCIFKNTPKDTLNLRIHSECLTGDALGSLKCDCGEQLEFSLKYIEKNGGMVIYLRQEGRGIGLFNKVNAYALQDKGFDTIKANHQLGFKADERTYEIVEFILKHYEISKVNLLTNNPEKLDSIKEKIITRIPILIEPNRFNVEYLNIKQTQMGHLK

SEQ ID NO: 49214 - DNA, 1215 bp, Deinococcus radiodurans R1
  CDS (1)..(1215): transl_table=11
atgagcgactccatcaccctctcgaccattcccgacctcctcgccgaactccgtgccggacgcccggtcatcctcgtggacgacgagaaccgcgagaacgagggcgacctgctgatgcccgccgcgactgccacgccgcagtgggtcaatttcatggcgcgcgagggccggggcctgatttgcgtgacgctcacgcccgagcgcgcccggcggctcgacctcacgccgatggtgggggccggagcttatggacagggcacggaccccaatggcaccgccttcaccgtcagtgtggatcacagcagcaactccaccggcatcagcgcctacgaccgcgccgcgacgatcgccgcgctgctggaggacacttcgcagccgaccgactttcgccggcctgggcacatctttccgctggtggcccgccccggcggggtgctgcgccgcgccgggcacaccgaggccgggtgcgacctcgcccgcctcgctggctttgcgcccgtcggggtcatctgcgaaatcatgggcgacgacggcgagatgagccgcctgcccgacctgctggccttcggcgagaagcacgggctgaaggtcggcagcatcgaggcgctgatcgcctaccgcatggagcacgaccccttcatggagccggtcgcggaggccgagctgccgacccgtttcggcgactttcgcctcatcggttttcaggacaccctcagcggcgccgagcatgtggcgctggtgatgggcgaggtcacgcccgagccgctgctggtgcgtgttcactccgagtgcttgaccggcgacgccttccactcgctgcgctgcgactgcggcccgcagctcgacgcggcgttgcaggcgattgccgaggaaggccggggcgccgtcatctacttgcggcaggaggggcgcggcatcggcctgctcaacaaaattcgcgcctacgccctgcaagacggcggggccgacacggtggacgccaacttgcaactcggcttgcccgccgacgcccgcgacttcggcatcggggcgcagatcctgcacctgctcggcgcccggaaactccgcatcatgacgaacaatccgcgcaaactgcacagtctctcgggcttcggcctcgaagtcgtggagcgcgtgccgctgcatgtgggcgaagacccgcacaacgccggctacctgcgaacgaaacgggagaagctggggcatctgcgttga

SEQ ID NO: 49215 - protein, 404 aa, Deinococcus radiodurans R1
MSDSITLSTIPDLLAELRAGRPVILVDDENRENEGDLLMPAATATPQWVNFMAREGRGLICVTLTPERARRLDLTPMVGAGAYGQGTDPNGTAFTVSVDHSSNSTGISAYDRAATIAALLEDTSQPTDFRRPGHIFPLVARPGGVLRRAGHTEAGCDLARLAGFAPVGVICEIMGDDGEMSRLPDLLAFGEKHGLKVGSIEALIAYRMEHDPFMEPVAEAELPTRFGDFRLIGFQDTLSGAEHVALVMGEVTPEPLLVRVHSECLTGDAFHSLRCDCGPQLDAALQAIAEEGRGAVIYLRQEGRGIGLLNKIRAYALQDGGADTVDANLQLGLPADARDFGIGAQILHLLGARKLRIMTNNPRKLHSLSGFGLEVVERVPLHVGEDPHNAGYLRTKREKLGHLR

SEQ ID NO: 49216 - DNA, 1197 bp, Xylella fastidiosa 9a5c
  CDS (1)..(1197): transl_table=11
atgaatactcccacacacactcacccacatccgttcggctccacggcaacgatccgttgcgaacgtgccgctgccgaactgcgtaccggtcgacccgtcctgttgattgatgctcatacgcgtcggcatgcggtcatggctctggatagcatgaccgctcaaagctttacgacatttgcgaacgctgtcggcaacactcactacctattcctgactccagcacgttccaacgtgctcggcctggaggctccccaaggcgcacgcatcccactggcgaccctgtcctacgacagcctggtcaagctcgcctacctgcgtcagccaacacacccaacaacatgggtgcctggagacatcatggatgcagcagcgaccgagatcactcgacttgcgctgcttctgccagcaatcgtcgccgccccattaacacaccataccgaacatgcctttgcagattgccaaacacttgatttaacagatctcgataccgctgccgcgggcgcctccacaacagagtacgaattggtcacacgtactccggtgccactccgtgatctaggcatgagcgaattcatcgtattccgtggtggcattgcacagcgcgaccaagttgcgatcttgatcggtcaacccgacctaagcagtgcagtccccgtacgcgtgcattcctcctgcctgaccggcgacctctttggctcgctcaagtgtgactgcggcgaccaattacgtcatggcttggccacactgaaagcccttggcggtggtgtgctgctgtacttggaccaagaaggacgtggtaacggcattgccgcaaaaatacgcgcctacggctaccaacacgtaggactggatacgatcgacgcggatgcacaactcggattcggcccggacgaacgccgctacaccggtgcagtgatgatgctacgcgcgctaggcatcacccggatacaactgctatccaataatcccaccaaagtagagcgtttacgcgcggcaggaatcatcgtcgagcaacgcatcccggtgataggacagatcaccgaacagaacgaatactacctgcgtaccaaagtcagccgtgccggccacgacctggacatagatgccttgatcatgacatcacagagacctcaagacccatcggagactgtcgacggcgagaccgtaaaatccatccccaaaaccggccacgcgtaa

SEQ ID NO: 49217 - protein, 398 aa, Xylella fastidiosa 9a5c
MNTPTHTHPHPFGSTATIRCERAAAELRTGRPVLLIDAHTRRHAVMALDSMTAQSFTTFANAVGNTHYLFLTPARSNVLGLEAPQGARIPLATLSYDSLVKLAYLRQPTHPTTWVPGDIMDAAATEITRLALLLPAIVAAPLTHHTEHAFADCQTLDLTDLDTAAAGASTTEYELVTRTPVPLRDLGMSEFIVFRGGIAQRDQVAILIGQPDLSSAVPVRVHSSCLTGDLFGSLKCDCGDQLRHGLATLKALGGGVLLYLDQEGRGNGIAAKIRAYGYQHVGLDTIDADAQLGFGPDERRYTGAVMMLRALGITRIQLLSNNPTKVERLRAAGIIVEQRIPVIGQITEQNEYYLRTKVSRAGHDLDIDALIMTSQRPQDPSETVDGETVKSIPKTGHA

SEQ ID NO: 49218 - DNA, 1308 bp, Mycobacterium leprae TN
  CDS (1)..(1308): transl_table=11
gtgggcccttttgatagcaaggtggcaaagatgacgaggttggactccgtcgagcgggcagttgccgacattgcggctggtaaagccgttgtcgtcatcgacgatgaggaccgcgagaacgaaggcgacctgatcttcgccgccgaaaaggcaacgctggagatggtggcctttatggtccgctatacctcgggatacttgtgcgcgccactggatggtgcgatctgcgaccggttgggacttttgccgatgtttgcggtgaatcaagacaaacatgggactgcctacacggtcactgtcgatgcgagaaacggtgtaggaaccgggatttcggcttctgatcgggctaccacaatgcgattattagctgacccggctagtgtcgctgacgatttcacccgccccggccatgtggttccgttgcgtgccaaggacggcggtgtgttgcgccggccgggtcacacagaggccgccgtcgacttggcccggctggcaggattgcagcccgcaggagcgatctgcgagatcgtcagtcagaaggacgaaggctcgatggcacagaccgacgagttgcgggtcttcgctgatgagcacgatctggcgctgatcaccattgccgatctgatcgcatggcggcgcaagcatgagaagcacatcgagcgggttgctgaagcgcggatcccaacccgtcatggagagtttcgtgctattggctatactagtatttacgacgacgttaagcatgtggcactggtccgcggcgaaattgccggatcaagcggtgacggcgatgacatattggtccgggtgcactccgagtgtttgacgggtgatgtgttcggctcacggcgttgcgattgtgggacccaactcgatgccgctatggctatggtggcgcgagaaggacgcggtgtggtgttatacatgcgcggccatgaaggtcgaggtatcgggctgatgcataaactgcaagcataccagctacaggatgctggcgcggacaccgtggacgctaacatcaagcttggattcccttctgatgcaagggattacggaattggtgcgcagatactcgtcgatctcggagtgcgctcgatgcgactgttaaccaacaatcccgccaagcgggttgggctggacgggtacggactgcagatcatcgagcgggtgccgcttccggtgcgggccaacgcggataacatccgttacttgatgaccaagcgtgacaagatgggtcacgacctgggcgggttggatgattttcatgaatcaaactattttccaggtgaattcggcggtgctttatga

SEQ ID NO: 49219 - protein, 435 aa, Mycobacterium leprae TN
MGPFDSKVAKMTRLDSVERAVADIAAGKAVVVIDDEDRENEGDLIFAAEKATLEMVAFMVRYTSGYLCAPLDGAICDRLGLLPMFAVNQDKHGTAYTVTVDARNGVGTGISASDRATTMRLLADPASVADDFTRPGHVVPLRAKDGGVLRRPGHTEAAVDLARLAGLQPAGAICEIVSQKDEGSMAQTDELRVFADEHDLALITIADLIAWRRKHEKHIERVAEARIPTRHGEFRAIGYTSIYDDVKHVALVRGEIAGSSGDGDDILVRVHSECLTGDVFGSRRCDCGTQLDAAMAMVAREGRGVVLYMRGHEGRGIGLMHKLQAYQLQDAGADTVDANIKLGFPSDARDYGIGAQILVDLGVRSMRLLTNNPAKRVGLDGYGLQIIERVPLPVRANADNIRYLMTKRDKMGHDLGGLDDFHESNYFPGEFGGAL

SEQ ID NO: 49220 - DNA, 1206 bp, Streptococcus pneumoniae TIGR4
  CDS (1)..(1206): transl_table=11
atggaatatcgaaaaatacaagaagcattagaagcattgcagaagggacgacttgttcttgttatagacgacaaggatagagaaaatgaaggagacttaatttgttctgcacaagcagctacaacagaaaatgttaattttatggctacttatgccaaaggattaatttgtatgcctatgagcgaaagtttagctaatcaattaatgctttcacctatggttgaaaacaatacagataatcataagactgcttttacagtttcaattgattataaagaaacgaccacaggtatttctgccgaggaaagaggactgaccgcacgtatgtgtgtagctgaagatataacaccctctgattttcgcaggccaggacacatgtttcctttaattgcaaaaaaaggtggtgtcctagaaagaaatggacacacagaagcaactgttgatttattaaaattagctggactaaaagagtgtggcctatgttgtgaaataatgaatcatgatggcaaaatgatgagaacagatgatttaattcagttctcgaaaaaacacaacattccactaattaccatcaaagaattacaagaatatagaaaagtatatgatcagctggtagaacgagtttcaactgtcaatatgcctactagatacggtaatttcaaagcaattagctatatagataaactaaatggggaacatcatcttgctcttattatgggaaatatagaggatgaagccaatgtattatgtcgggtccactccgaatgtttaacaggagatgttttaggctctttacgttgcgattgtggacagcaattcgataaggctatgaaaatgattgttgagaatggttcgggtgtcttactttacttgcgacaggagggacgaggaattggacttatcaataaattaaaagcctatcatttacaagatcaaggcatggatacgcttgatgccaatcttgcattaggctttgaaggtgatttaagagaatatcatattggagcaaaaatgcttaaagatctgggacttcagtcacttcatttactgacaaataatcctgacaaggttgaacagttagaaaaatatggaattaccatttccagtagaatatcaatcgaaatagaagccaatccttacgatagtttttatttagaaacaaagaaaaatcgaatgggtcacattttaaatatggaggaaaaataa

SEQ ID NO: 49221 - protein, 401 aa, Streptococcus pneumoniae TIGR4
MEYRKIQEALEALQKGRLVLVIDDKDRENEGDLICSAQAATTENVNFMATYAKGLICMPMSESLANQLMLSPMVENNTDNHKTAFTVSIDYKETTTGISAEERGLTARMCVAEDITPSDFRRPGHMFPLIAKKGGVLERNGHTEATVDLLKLAGLKECGLCCEIMNHDGKMMRTDDLIQFSKKHNIPLITIKELQEYRKVYDQLVERVSTVNMPTRYGNFKAISYIDKLNGEHHLALIMGNIEDEANVLCRVHSECLTGDVLGSLRCDCGQQFDKAMKMIVENGSGVLLYLRQEGRGIGLINKLKAYHLQDQGMDTLDANLALGFEGDLREYHIGAKMLKDLGLQSLHLLTNNPDKVEQLEKYGITISSRISIEIEANPYDSFYLETKKNRMGHILNMEEK

SEQ ID NO: 49222 - DNA, 1206 bp, Clostridium acetobutylicum ATCC 824
  CDS (1)..(1206): transl_table=11
atgaatttcaaatttaatactgtagaagaagcaattcttgatataagacaaggaaagatggttattgttgtagacgatgaagatagagaaaacgaaggagatttggtggcagcaggagcaacgataacaggagaaactataaattatatggcaaggtatgccagaggactcatatgtacgcctatggattcagatagcatggaaaggcttggaataaacaccatggtagaaaaaaatacagagtatttcggtacggattttggggtttctgtagatgctgcaaggactagaacaggaatttcagcatatgaaagagctgaaactataaagaaactttctgataaagatgccaaggaagaagattttgtaaaaccaggacacacatttcctctaagagctaaaaaaaatggagtattggatagaaatggacatacagaggctaccgttgatttagtaagacttgcaggtttctatccttcagttggagtatgctgtgaaattatgaatgaagatggcactatggcaagactaccaaagcttatggagttctcaagaaaaaatgatattaaaataataactgttgaaaaattgattgaatatagaaaaaagaatgaggcacttataaaaagagaagcagaggccaagcttccaacaaaatatggtgagttcaaaatagttggatataaaagcctgattgataataaggaaaatctagctatagttaagggagagcttaaagctgaagaagaggtgcttgtaagagttcattctaaatgccttacgggagatgtatttggatctctaagatgtgattgtggaaatcagctttcatatgcacttagtgcaatagaaaagcagggggcaggagttgttctttatatggatcaagagggaagagatataggacttttgaataagttaaaggcatatatgctccaagaaaagggtcttgatacagttgaagcaaatttgaaattaggatttgaagctgatttaagagaatattgggcggctgccgaaatgcttaaagatttaggtgttaaaaaagttaaattaatgacaaataatcctgaaaaaataaacgaattaaataaatatggaattgatgttgtaagcagagttcctattaatacagaacatgttaaagaaaatgaattttatctaagaactaaaaagcaaaaaatgggtcacttaattgaaatttaa

SEQ ID NO: 49223 - protein, 401 aa, Clostridium acetobutylicum ATCC 824
MNFKFNTVEEAILDIRQGKMVIVVDDEDRENEGDLVAAGATITGETINYMARYARGLICTPMDSDSMERLGINTMVEKNTEYFGTDFGVSVDAARTRTGISAYERAETIKKLSDKDAKEEDFVKPGHTFPLRAKKNGVLDRNGHTEATVDLVRLAGFYPSVGVCCEIMNEDGTMARLPKLMEFSRKNDIKIITVEKLIEYRKKNEALIKREAEAKLPTKYGEFKIVGYKSLIDNKENLAIVKGELKAEEEVLVRVHSKCLTGDVFGSLRCDCGNQLSYALSAIEKQGAGVVLYMDQEGRDIGLLNKLKAYMLQEKGLDTVEANLKLGFEADLREYWAAAEMLKDLGVKKVKLMTNNPEKINELNKYGIDVVSRVPINTEHVKENEFYLRTKKQKMGHLIEI

SEQ ID NO: 49224 - DNA, 1206 bp, Streptococcus pneumoniae R6
  CDS (1)..(1206): transl_table=11
atggaatatcgaaaaatacaagaagcattagaagcattgcagaagggacgacttgttcttgttatagacgacaaggatagagaaaatgaaggagacttaatttgttctgcacaagcagctacaacagaaaatgttaattttatggctacttatgccaaaggattaatttgtatgcctatgagcgaaagtttagctaatcaattaatgctttcacctatggttgaaaacaatacagataatcataagactgcttttacagtttcaattgattataaagaaacgaccacaggtatttctgccgaggaaagaggactgaccgcacgtatgtgtgtagctgaagatataacaccctctgattttcgcaggccaggacacatgtttcctttaattgcaaaaaaaggtggtgtcctagaaagaaatggacacacagaagcaactgttgatttattaaaattagctggactaaaagagtgtggcctatgttgtgaaataatgaatcatgatggcaaaatgatgagaacagatgatttaattcagttctcgaagaaacacaacattccattaattaccatcaaagaattacaagaatatagaaaagtatatgatcagctggtagaacgagtttcaactgtcaatatgcctactagatacggtaatttcaaagcaattagctatatagataaactaaatggggaacatcatcttgctcttattatgggaaatatagaggatgaagccaatgtattatgtcgggtccactccgaatgtttaacaggagatgttttaggctctttacgttgcgattgtggacagcaattcgataaagctatgaaaatgattgttgagaatggttcgggtgtcttactttacttgcgacaggagggacgaggaattggacttatcaataaattaaaagcctatcatttacaagatcaaggcatggatacgcttgatgccaatcttgcattaggctttgaaggtgatttaagaaaatatcatattggagcacaaatgcttaaagatctgggacttcagtcacttcatttactgacaaataatcctgacaaggttgaacagttagaaaaatatggaattaccatttccagtagaatatcaatcgaaatagaagccaatccttacgatagtttttatttagaaacaaagaaaaatcgaatgggtcacattttaaatatggaggaaaaataa

SEQ ID NO: 49225 - protein, 401 aa, Streptococcus pneumoniae R6
MEYRKIQEALEALQKGRLVLVIDDKDRENEGDLICSAQAATTENVNFMATYAKGLICMPMSESLANQLMLSPMVENNTDNHKTAFTVSIDYKETTTGISAEERGLTARMCVAEDITPSDFRRPGHMFPLIAKKGGVLERNGHTEATVDLLKLAGLKECGLCCEIMNHDGKMMRTDDLIQFSKKHNIPLITIKELQEYRKVYDQLVERVSTVNMPTRYGNFKAISYIDKLNGEHHLALIMGNIEDEANVLCRVHSECLTGDVLGSLRCDCGQQFDKAMKMIVENGSGVLLYLRQEGRGIGLINKLKAYHLQDQGMDTLDANLALGFEGDLRKYHIGAQMLKDLGLQSLHLLTNNPDKVEQLEKYGITISSRISIEIEANPYDSFYLETKKNRMGHILNMEEK

SEQ ID NO: 49226 - DNA, 1182 bp, Staphylococcus aureus subsp. aureus Mu50
  CDS (1)..(1182): transl_table=11
atgcaattcgataatattgacagtgctttaatggctttaaaaaatggagaaacaattattgtagtagatgatgagaatcgtgaaaatgaaggtgatttagtagcggttactgaatggatgaacgataataccattaattttatggcgaaagaagcaaggggattaatatgcgcaccagtgtctaaagatattgcacaacgtttggatttggtacaaatggttgatgataactccgacatctttggtacgcaatttacagtgagtattgatcatgtagatacaacaacaggaattagtgcttatgaacgtacattgactgccaaaaagctcattgatcctagtagtgaagctaaagattttaatcgtcctggtcatttatttccattagtagcacaagataaaggcgtattagctagaaatggacacacagaagcggctgttgatttagctaaacttactggtgccaagcccgctggtgtcatttgtgagattatgaatgatgacggcacgatggcgaaaggacaagatttacaaaattttaaagaaaaacatcaattaaagatgattacgattgatgatttaattgaatatcgtaaaaaattagaaccagaaattgaatttaaggcaaaagtgaaaatgcctacagatttcggaacatttgatatgtatggttttaaagcgacatacacagatgaagagatagttgtactgacaaaaggtgcaattcgacaacatgaaaatgtacgcttacattctgcgtgccttacaggcgatattttccatagtcaacgttgtgattgtggtgctcaacttgaatcgtctatgaagtatatcaatgaacatggtggcatgattatttatctacctcaagaaggtcgtggcataggattgttaaacaaattacgcgcatatgaattaattgagcaaggatatgatacagtaactgcaaatttagcattaggttttgatgaagatttacgagattatcatattgctgcacagattttaaaatattttaacatcgaacatatcaatttattaagtaataatccaagtaaatttgagggattaaaacaatatggcattgatattgcagaaagaattgaagttatcgtaccagaaacggtacataatcatgattatatggtaacgaaaaaaataaaaatgggtcatttaatatag

SEQ ID NO: 49227 - protein, 393 aa, Staphylococcus aureus subsp. aureus Mu50
MQFDNIDSALMALKNGETIIVVDDENRENEGDLVAVTEWMNDNTINFMAKEARGLICAPVSKDIAQRLDLVQMVDDNSDIFGTQFTVSIDHVDTTTGISAYERTLTAKKLIDPSSEAKDFNRPGHLFPLVAQDKGVLARNGHTEAAVDLAKLTGAKPAGVICEIMNDDGTMAKGQDLQNFKEKHQLKMITIDDLIEYRKKLEPEIEFKAKVKMPTDFGTFDMYGFKATYTDEEIVVLTKGAIRQHENVRLHSACLTGDIFHSQRCDCGAQLESSMKYINEHGGMIIYLPQEGRGIGLLNKLRAYELIEQGYDTVTANLALGFDEDLRDYHIAAQILKYFNIEHINLLSNNPSKFEGLKQYGIDIAERIEVIVPETVHNHDYMVTKKIKMGHLI

SEQ ID NO: 49228 - DNA, 588 bp, Thermoplasma acidophilum DSM 1728
  CDS (1)..(588): transl_table=11
atgatcgaactttactcaaacgcaaggttgccaactgaatttgggcttttcaggatatatacatttgtaaatgatgaaaacaaggaccatgccgttatcgtacggggagatccgaggggaaaggaggatgtacctgtaagaatacattccgaatgcctcaccggtgacgttctcggatcgctgagatgcgactgcagggatcagctgatacagtccctgagatacctcggcaggcaggattacggtatgctgatttatctgaggcaggagggcagaggcatcggactcctcaacaagatcaaggcatacagcctccaggacagcggtgctgacactgtcgaagcgaatctgaaactcggcctgccggtagacagcagggattattcatttgcttcagaggtgataaagttcttcgaaataaagtccatatacataatgacaaacaacccggaaaagatgaaggcgcttatcgaaagcggcattaacgtcaagggtagaataccgattttcagcgatccaacgccatacgacaaattctatcttgaaaccaagaagataaagcttgggcacgagatagagaacatatga

SEQ ID NO: 49229 - protein, 195 aa, Thermoplasma acidophilum DSM 1728
MIELYSNARLPTEFGLFRIYTFVNDENKDHAVIVRGDPRGKEDVPVRIHSECLTGDVLGSLRCDCRDQLIQSLRYLGRQDYGMLIYLRQEGRGIGLLNKIKAYSLQDSGADTVEANLKLGLPVDSRDYSFASEVIKFFEIKSIYIMTNNPEKMKALIESGINVKGRIPIFSDPTPYDKFYLETKKIKLGHEIENI

SEQ ID NO: 49230 - DNA, 1203 bp, Caulobacter crescentus CB15
  CDS (1)..(1203): transl_table=11
atgtcgcgcctatctgaagccctgacccgcctgaaggccggcggcatgatcgtgttggtcgatgacgaggatcgcgagaacgagggcgatctggtcatggccgccgagtttgcggacgctgcggccatcgccttcatggccaagcgggccagcggcctgatctgcctgaccctggaggcagagacgatcgatcgcctttgcctggcgccgatggtcagcgacaaccgcaccagccgccagaccgccttcaccgtctcgatcgaggccgccaccggcgtggacaccggcatctcggccttcgaccgcgcccgcaccatcgccgcggccatcgccccggacgcccaggctgcagacctggtttcgcccggacacgtgtttcccctgcgcgcccgacccggcggggttctggtccgcaacggccataccgaggcctcggtggatctgatgcggatggccggtctgcggccggccggcgtgatctgcgagatcatgaaggacgacgggtcgatggcgcggcggcctgatctggaggtcttctgccgcgagcacgatctgccgctgctgacgatcgccgagctggtggcccatcgcaaggcgaccgagctgctggtggacgaggtggccgccgcgcgcctgccgtcggaccacgccggccaggccttcagcgtccgggccttccgcagccggatcgacggcggcgagcatctggccatggtcgccggcccgctgaccggcgcgccgctggtgcgggtgcattccgaatgcctgaccggcgacgccctgggctcgcggcgctgcgactgcggcgaacaactgcgcgagagcctccggcagatcagcgacagcggcaacggcgccctgatctatctgcgcaatcatgaggggcggggcctgggcctggccaacaagatcgcggcctatgcgctgcaggaccagggactggacaccgtccaggccaatcacgccctgggcttcgccgacgaccagcgcgactacggcgtggcggcgcagatcctgcgggcgctcggcgtcggcgaggtcaagctcttgagcaacaatccgcgcaaggcggccggactgcgcgccaatggcgtgacggtgcggcgcgaggttccgctgctgatcccggccaatcccgacaacgccgcctatctcgaaaccaagcgcgacaagctgggccacagcctggcgcgcgcctcctga

SEQ ID NO: 49231 - protein, 400 aa, Caulobacter crescentus CB15
MSRLSEALTRLKAGGMIVLVDDEDRENEGDLVMAAEFADAAAIAFMAKRASGLICLTLEAETIDRLCLAPMVSDNRTSRQTAFTVSIEAATGVDTGISAFDRARTIAAAIAPDAQAADLVSPGHVFPLRARPGGVLVRNGHTEASVDLMRMAGLRPAGVICEIMKDDGSMARRPDLEVFCREHDLPLLTIAELVAHRKATELLVDEVAAARLPSDHAGQAFSVRAFRSRIDGGEHLAMVAGPLTGAPLVRVHSECLTGDALGSRRCDCGEQLRESLRQISDSGNGALIYLRNHEGRGLGLANKIAAYALQDQGLDTVQANHALGFADDQRDYGVAAQILRALGVGEVKLLSNNPRKAAGLRANGVTVRREVPLLIPANPDNAAYLETKRDKLGHSLARAS

SEQ ID NO: 49232 - DNA, 1764 bp, Nostoc sp. PCC 7120
  CDS (1)..(1764): transl_table=11
gtgtcacaacctaaaaatacacagcagtcctcaactaatcccctgaacggggagaaccctggcacgggtgttgttcctcagatatttgcctcttcaaccgaaaagtttatgtttgattctattgatgctgccttatcagatttaaaagccggtcgtgccattgtagtggtagatgatgaaaatcgagaaaatgaaggcgatttgatttgtgctgcccaatttgccacacctgacatgattaattttatggcggtggaagcaagagggttgatttgtttagcaatgacaggcgatcgcctcgatgaactcgatctaccattgatggtgacaaatatcaccgaccccaaccagacagcttttactgtcagtattgatgctagcccccatttgggagtatctactggtatatcagccgaagaccgggcgcgaacaattcagattacactcaacccagccaccaaaccttcagatttgcgtcgtcctggtcatatttttcctttacgggctaaagctggcggagtactgaaacgcgcagggcatacagaggcggcggttgatttatctcgcttggctggattgtacccggctggggtgatttgtgaaattcaaaaccccgatggttcaatggcgagattacaacagttaattgaatatgccaaacaccacaacctgaaaattattagtattgctgatttaattagttatcgcctgcaacacgatcgcctggtatatcgtgaagtagtcactaaactacccagtcaattcggtcagtttgacatctacgcctatcgccacaccctcgacaatacagaacacgtcgccattgtcaagggcaatcctgagaactttcgagatgaacctgtgatggtgcggatgcactcagaatgtttaacaggtgatgcgttgggttctttacgctgcgattgtcggatgcagttacaagctgccttgaaaatgattgaaactgctggtcaaggtgtggttgtctacctaaggcaagaaggacgaggaattggcttaattaacaaacttaaagcctattctttacaggatatgggactggatacagtggaagctaacgagcgcttgggtttccccgcagacttgcgtgattatggcatgggagcgcaaatgcttatggatttgggcgtgaaaaagattcgcctgattactaataatccccggaaaattgccggggtaaaagggtatgggttggaagtagttgaccgcctgccattactcattgaagccaacgattataattcctattacttggcgaccaaggcgaaaaaactcggtcatatgcttttgcagacttacctcgtaactgtagctattcactggcaagatgacccgcaattggtgacaaaacgctatgaacgtttagagaaactgcggcatttagttagaggctatgatttattgttacaggaagaagcccgaccattggcgatcgctcttttcgacaagccatctttgacagtacacttagggtttgaccaagaaaaagtcgctagttgtgattggtatagccaaagcggtcatccctacgtacaagcaattttgccaattctcgataacctagcaactctaccttacgtccagaaacttgaatttttgatttctcctggtagtgatcccctcagtaatttgcaagtccaactagacaggcaaacgatttcacctgataaattaccttcttctgtaagtaatgagttggagacacagaaaatttacagtttgagtaaagaattggaagattga

SEQ ID NO: 49233 - protein, 587 aa, Nostoc sp. PCC 7120
MSQPKNTQQSSTNPLNGENPGTGVVPQIFASSTEKFMFDSIDAALSDLKAGRAIVVVDDENRENEGDLICAAQFATPDMINFMAVEARGLICLAMTGDRLDELDLPLMVTNITDPNQTAFTVSIDASPHLGVSTGISAEDRARTIQITLNPATKPSDLRRPGHIFPLRAKAGGVLKRAGHTEAAVDLSRLAGLYPAGVICEIQNPDGSMARLQQLIEYAKHHNLKIISIADLISYRLQHDRLVYREVVTKLPSQFGQFDIYAYRHTLDNTEHVAIVKGNPENFRDEPVMVRMHSECLTGDALGSLRCDCRMQLQAALKMIETAGQGVVVYLRQEGRGIGLINKLKAYSLQDMGLDTVEANERLGFPADLRDYGMGAQMLMDLGVKKIRLITNNPRKIAGVKGYGLEVVDRLPLLIEANDYNSYYLATKAKKLGHMLLQTYLVTVAIHWQDDPQLVTKRYERLEKLRHLVRGYDLLLQEEARPLAIALFDKPSLTVHLGFDQEKVASCDWYSQSGHPYVQAILPILDNLATLPYVQKLEFLISPGSDPLSNLQVQLDRQTISPDKLPSSVSNELETQKIYSLSKELED

SEQ ID NO: 49234 - DNA, 1116 bp, Brucella melitensis 16M
  CDS (1)..(1116): transl_table=11
atgagctataatcagaaacaggtcgttgatgcgatttgcgcttttgaacgcggtgaaatcgtcgtggtcatggatgacgacggtcgcgaaaacgaaggcgatctgatcgtcgccgccgtgcattgcacaccggaaaagatggccttcatcgtgcgccatacgtccggcattgtctgcacgccgatgacgcgtgaggaagccaagcgcctcaacctgacgccgatggtggcggaaaacgaatccgctcacacgaccgcttttacggtcacggtcgattatcgccatggcaccacgaccggcatttcagccgaagaccgcacgctgaccgtgcgcaacctggccaatcccaatgccggtgcttcggatttcgtgcgccccggccatattttcccgctggttgcccgtgagggcggtgtgctgatgcgctccggccatacggaagccgccgttgatctgtgcaagctcgccaacctgccgcccatcggcgttatctgcgaactcgtcaacgatgacggcacggtcatgcgcggtcccgatgtggcggctttcgccgaggagcacaaattgcaccgcgtcacggttgccgatctcatcgcctatcgccagcgcaaggaaacgctggtcaggcgcattggcgatgcgcctgtcgaaacctgtgctggcaaggctcatgcctatagttatgaactgccgtgggagccgatgcagcatgtggcggttgtcttcggcgatattcgcgacggtgaggaagtgccggtccgtctccatcgcgaggatgtgctgaacgatgttttcggcaagggcggcagcaatctcgatgccatcatgcagcgcatggggcaagagggccggggcattctggtctatctgcgtgaaggctccgtcggcgtgcgttcggatcatcgcgatgcccgcgcccgtgaggcgctgcaaggcgagcatgaagcccatgcggaagccgttgcccgcgaggaagaatggcgccagatcggccttggcgcgcagattttgaaggatctcggcgtttcctccatcgtgcttctggcctcgcgtgagcgccactatgtcggccttgaaggtttcggcatttgcatcacgcgtacggaaattatctaa

SEQ ID NO: 49235 - protein, 371 aa, Brucella melitensis 16M
MSYNQKQVVDAICAFERGEIVVVMDDDGRENEGDLIVAAVHCTPEKMAFIVRHTSGIVCTPMTREEAKRLNLTPMVAENESAHTTAFTVTVDYRHGTTTGISAEDRTLTVRNLANPNAGASDFVRPGHIFPLVAREGGVLMRSGHTEAAVDLCKLANLPPIGVICELVNDDGTVMRGPDVAAFAEEHKLHRVTVADLIAYRQRKETLVRRIGDAPVETCAGKAHAYSYELPWEPMQHVAVVFGDIRDGEEVPVRLHREDVLNDVFGKGGSNLDAIMQRMGQEGRGILVYLREGSVGVRSDHRDARAREALQGEHEAHAEAVAREEEWRQIGLGAQILKDLGVSSIVLLASRERHYVGLEGFGICITRTEII

SEQ ID NO: 49236 - DNA, 1146 bp, Clostridium perfringens str. 13
  CDS (1)..(1146): transl_table=11
atggttattgttattgatgatgagggaagagaaaatgagggggatctagttatggctggagaacttgttactggagaaaaaataaattttatggctacttatggaaagggtttaatatgtgctccagtaagtgagagcatagctgaaaatttaggattgaatcctatggtttcacataatacagataatcatgaaactgcatttacagtatctatagattataaagatacaactacaggaatatcagcctttgaaagggctcatacaattaaagaattaataaatgaagaaagtaaagcagagtattttagaagaccaggacatgtattccctttaatagctaagaatggtggcgttttaaagagagatgggcatacagaggcagcaattgacttagcaaagttagctggattaaaagaagttggggtaatatgtgaaataatgaaagatgatggaactatggctagaactgatgaattattagaatttgcaaagattcataatatgaaaataataactatagaagatttaattgcttatagaacagaaagagataattttgtttatagagttgttgaaactaatatgccaactaaatatggagattttaaggctattgggtttatagataaacttacaggagagcatcatgtggctttagttaaaggagagataaaatcagaggagccagtattattaagagtgcattcagagtgtttaactggagatgtttttggatcaagaagatgtgattgtggagagcagtttcatagtgctatggaaaaaataaatgaagagggaaaaggaatattactttatatgagacaagaaggaagaggaataggtcttataaataagttgaaagcttataagcttcaagatgaaggattagatactgtagaagctaatatagccttgggatttccagaagatcttagagattatggcgttggagcacaaattctaaaagatttaggtgtaagggaaatcaggttaatgactaataatcctaaaaaaataactggcttagagggatatggacttaaaatagtagaaagagtacctatagaaataaagtgtaatgaggaaaatgagttttatttgaaaactaagaaagagaaaatgcaccatttaataatgcagtaa

SEQ ID NO: 49237 - protein, 381 aa, Clostridium perfringens str. 13
MVIVIDDEGRENEGDLVMAGELVTGEKINFMATYGKGLICAPVSESIAENLGLNPMVSHNTDNHETAFTVSIDYKDTTTGISAFERAHTIKELINEESKAEYFRRPGHVFPLIAKNGGVLKRDGHTEAAIDLAKLAGLKEVGVICEIMKDDGTMARTDELLEFAKIHNMKIITIEDLIAYRTERDNFVYRVVETNMPTKYGDFKAIGFIDKLTGEHHVALVKGEIKSEEPVLLRVHSECLTGDVFGSRRCDCGEQFHSAMEKINEEGKGILLYMRQEGRGIGLINKLKAYKLQDEGLDTVEANIALGFPEDLRDYGVGAQILKDLGVREIRLMTNNPKKITGLEGYGLKIVERVPIEIKCNEENEFYLKTKKEKMHHLIMQ

SEQ ID NO: 49238 - DNA, 1530 bp, Arabidopsis thaliana
  CDS (1)..(1530)
atgatggattctgctttatatcatcctcgaatctttttcgctcacagcttcatcaatggcttgtatagttctcctaggtttgctaatacttgctggagattggttagtcgttcaagttgggagatcaaggctagtgagaatagtgatcgcaatgtgttcgatgaaaatcctgttaggaaaaccgacgggtcgttgtttgattctgcttcgtttgagacagttgacgcggaaatcacgcctgagactgatgatttcttcgtgagtgacgcagagggtgatccagattgtcctactcaaggttattcctctattgaacttgctcttcaagctctacgcaaaggaaagtttgtgatcgttgttgacgatgaaaccggagatgttgaagggaatctgatcatggctgcaactcttacgagtccaaaagacatagcttttctgattaagaatggttcaggtattgtctcagttggtatgaagaaagaaaaccttgaaagattaagccttacacttatgtcacctgaaatggaagacgaagattcctctgctccaactttcaccatcactgtggatgcaaaatctggaacatcaactggagtatcagcttcagacagggcgatgacggttcttgcactttcgtctctcgatgctaaaccagatgatttcaggaggcctggtcatgtattccctctcaagtacagagatggtggagttttaaggagagctggtcacaccgaagcttcagtggatctaatgatattggctggtttacgtcccctctctgttctttcagctattcttgatcaagaagatgggtctatggcttcactgccgtatatgaaaaagcttgctacggaacatgatatccccattgtatcgttgactgatttaatcagatatcgaagaaagcgagataagcttgttgagagaatcacagtgtctcgtttgcctaccaaatggggtcttttccaagcttattgttatcgatctaaactcgatggaaccgaaaatatcgccctcgttaagggaaacgttggaaatggtgaggacattctggtgcgagtgcattcagagtgcttgacaggagacatttttggctcagcacggtgtgactgtggaaaccaattggacttagccatggagttaatcgagaaagagggaagaggagttgttgtgtatctccgtggccacgaaggaagaggcattggccttggtcacaagcttagagcttataacttgcaggacgaaggacacgacactgttcaggccaatgttgaacttggcctatccattgattctcgtgaatacggtatcggtgctcagatgctacgagacataggagtgagaacaatgagactaatgacgaataaccctgccaaattcactggtctgaaagggtacggactcgctgtagttggccgtgtgccggtggtgacaccaatcaccaaggagaacagaagatatatggagaccaaacgcaagaagatgggtcacatttatatctctgataacaacgatcagccattagcttga

SEQ ID NO: 49239 - protein, 509 aa, Arabidopsis thaliana
MMDSALYHPRIFFAHSFINGLYSSPRFANTCWRLVSRSSWEIKASENSDRNVFDENPVRKTDGSLFDSASFETVDAEITPETDDFFVSDAEGDPDCPTQGYSSIELALQALRKGKFVIVVDDETGDVEGNLIMAATLTSPKDIAFLIKNGSGIVSVGMKKENLERLSLTLMSPEMEDEDSSAPTFTITVDAKSGTSTGVSASDRAMTVLALSSLDAKPDDFRRPGHVFPLKYRDGGVLRRAGHTEASVDLMILAGLRPLSVLSAILDQEDGSMASLPYMKKLATEHDIPIVSLTDLIRYRRKRDKLVERITVSRLPTKWGLFQAYCYRSKLDGTENIALVKGNVGNGEDILVRVHSECLTGDIFGSARCDCGNQLDLAMELIEKEGRGVVVYLRGHEGRGIGLGHKLRAYNLQDEGHDTVQANVELGLSIDSREYGIGAQMLRDIGVRTMRLMTNNPAKFTGLKGYGLAVVGRVPVVTPITKENRRYMETKRKKMGHIYISDNNDQPLA

SEQ ID NO: 49240 - DNA, 1173 bp, Pyrococcus furiosus DSM 3638
  CDS (1)..(1173): transl_table=11
gtgagaaatatgaacatcgaagaaattaggaacagcttcctctcaggaagacctgcagttcttattgacgaggagagggagaatgaggctgatctagtatttcccgcagaaattgcaacccctaaagtcgtaaactttatgctttctgccaaaggcttgctctgcctagctctagatatggaagaaggaataaaacgaggattctttaaacttcccaataatggaggagagaccaactttctaatcccagttgactacaaagatgtattcactggcattaccgcggaagaaagagcactaaccgcaagaaaagtagcagaaggacttggaattgagaactttcgatatcctggccatcttccactcctgggaggattaggattaaataagcgaaaaggtcacacagaggcctcccttgaattagtagagatggcaggattcaagagatatgcactcattatagagatattagacgataaagggtattcccacaatttagattatgccttccattttgccaaggaacatgatcttcccctcattagaataagggagatttggaaggagttcgtaagaaggaagcaattaattcatgtttacagcaaggcaaagcttcccactaaatacggagactttgaaatttacagcttcaaaaacgacctagattttaaggatcatgttgcgctcgtgaaaaagccgtttaagggaacacctctcgtaagagttcactccaagtgcttaacaggggatacacttggatccctaaaatgtgactgtgggagccagctagagaatgcactccgaacgatatcccaggagggaggagtgttaatttacctagaccaagaagggagggggattggattaagagagaagataagagcctacgaatttcaagacaggggattagacaccgtagaagcaaacaaggcacttggttttgctcctgatgagaggacttatgaagttgcttttcaaattttaagagcccttggaattgaaaaaataaaacttctcacaaacaatccctcaaaagtcaaggctctaagagagcttgggattgaaattgaagatgtaatacctcttcctggggaaataaacagatacaacttcttctatcttaaaacaaaggttgaaaaacttggacataaaattccgggggtagaggtatga

SEQ ID NO: 49241 - protein, 390 aa, Pyrococcus furiosus DSM 3638
MRNMNIEEIRNSFLSGRPAVLIDEERENEADLVFPAEIATPKVVNFMLSAKGLLCLALDMEEGIKRGFFKLPNNGGETNFLIPVDYKDVFTGITAEERALTARKVAEGLGIENFRYPGHLPLLGGLGLNKRKGHTEASLELVEMAGFKRYALIIEILDDKGYSHNLDYAFHFAKEHDLPLIRIREIWKEFVRRKQLIHVYSKAKLPTKYGDFEIYSFKNDLDFKDHVALVKKPFKGTPLVRVHSKCLTGDTLGSLKCDCGSQLENALRTISQEGGVLIYLDQEGRGIGLREKIRAYEFQDRGLDTVEANKALGFAPDERTYEVAFQILRALGIEKIKLLTNNPSKVKALRELGIEIEDVIPLPGEINRYNFFYLKTKVEKLGHKIPGVEV

SEQ ID NO: 49242 - DNA, 981 bp, Schizosaccharomyces pombe 972h-
  CDS (1)..(981)
atggataaaaaagagggcgatcaagtgcatcatgacaaaacattgctccaggatttaagtcttcctgaaaatgttgcttctgaaaaacgtctgccaattgacgatgtacaatgtgtaaattcgcctatgttaagtcctgcgcttgatattgagcctaaacccaacgttgtcggtactgctgaaaggcttccaaaggttcgatgcgttgttagagcaagaattcctacagttaaggggacggagattttcctccatttatacaaaaacgattttgataataaagagcatttagcaattgtttttggtcaacaaattcgctcagatagtcttgatgctgtgcaagaaggcgaaacagaaatggaccgtatggtacgaggcgcatacgtggggacactttatcctggccgtaaaagctcttatattgatgttaactcttcaaaaactaccgaagagcagaaagaagaagcacggaagactaattttgtaccgctggttcgaattcattccgagtgctataccggtgaaactgcttggtcggctcgttgtgattgtggtgaacaacttgatgaagcagcccgtttaattagtgaagaagggaatggtgtcataatatatcttcgtcaagaaggtcgcggaattggtttgtccgagaaactcaaggcttataatcttcaggatttaggaaacgacaccgtccaagccaatttactgcttcaacatccagcagatggaagatcgtatgcagttgctactgctatgttgatggatcttggtcagcgtgatatcagacttttgacgaataatcctgaaaaggttaatagcattgaaggcccaaataaagaagttcgtgtagtagaacggatttcaatgatacccaagtcatggagaggtgaaaagggaattgaaagtgctgaagtagtcctttatctcaaaactaaaattgagaaaatgggacatttacttgacttaccagattcataa

SEQ ID NO: 49243 - protein, 326 aa, Schizosaccharomyces pombe 972h-
MDKKEGDQVHHDKTLLQDLSLPENVASEKRLPIDDVQCVNSPMLSPALDIEPKPNVVGTAERLPKVRCVVRARIPTVKGTEIFLHLYKNDFDNKEHLAIVFGQQIRSDSLDAVQEGETEMDRMVRGAYVGTLYPGRKSSYIDVNSSKTTEEQKEEARKTNFVPLVRIHSECYTGETAWSARCDCGEQLDEAARLISEEGNGVIIYLRQEGRGIGLSEKLKAYNLQDLGNDTVQANLLLQHPADGRSYAVATAMLMDLGQRDIRLLTNNPEKVNSIEGPNKEVRVVERISMIPKSWRGEKGIESAEVVLYLKTKIEKMGHLLDLPDS

SEQ ID NO: 49244 - DNA, 1269 bp, Corynebacterium glutamicum ATCC 13032
  CDS (1)..(1269): transl_table=11
gtgagtgaacatgagcaggcacacagccaattagattctgttgaagaggccatcgctgacatcgctgcgggtaaagccgtcgtggtggtagatgatgaagatcgtgaaaatgaaggcgacatcatctttgccgccgaattagccactccagaattagtcgctttcatggtgcgttattcctcgggatacatctgtgcgccattaaccgcaaaggatgcagatcgtcttgatctgcctccgatgaccgcgcacaatcaggatgcccgcggcaccgcttacaccgtgaccgttgatgccaacaccggcaccacaggcatttctgcaacagaccgcgcccacactttgcgcttgcttgctgatccagaagccgaccgcacggatttcacccgtcccggacacgttgtgccactgcgtgctcgtgaaggtggcgtcttggtgcgcgctggacacaccgaagcagctgtcgatttggctcgcgctgcaggcctgcgcccagcaggtgttatctgcgaagtggtcagtgaagaggaccccaccggcatggctcgggttcctgagctgcgccgcttctgcgatgagcacgatctgaagctgatctctattgagcagctcattgagtggcgtcgcaagaatgaaattttggtggagcgccaggtggaaactgtgctgcctaccgatttcggcacgttcaaggctgttggttaccgttccatcatcgatggcaccgagcttgttgccattgttgccggcgacgtggcatccgacggtggcgaaaacgtcctggttcgagtccactctgagtgcttgactggtgatgtttttggatcccggcgctgcgactgtggacagcagctgcacgagtctttgcgcctgatccaggaagctggtcggggagtagtggtgtacatgcgtgggcatgagggacgaggcattggtctgctcgccaagctacgcgcctaccaactccaggatgaaggtgccgacaccgtcgatgccaacctcgcacttggtcttccagccgatgcccgcgaatttggcaccagcgcccagattctctacgacttgggtgtgcgctcgctcaacttgatcagcaacaacccagccaagaaggtgggacttgaaggccacggcatttccattgccagccgaacccccatccctgttgctgttcatgaagacaatgttcgatacctgaaaaccaagcgtgaccgcatgggacatgacctcccagatgtcgcactgtgggaacaagagcacccagaaaactaa

SEQ ID NO: 49245 - protein, 422 aa, Corynebacterium glutamicum ATCC 13032
MSEHEQAHSQLDSVEEAIADIAAGKAVVVVDDEDRENEGDIIFAAELATPELVAFMVRYSSGYICAPLTAKDADRLDLPPMTAHNQDARGTAYTVTVDANTGTTGISATDRAHTLRLLADPEADRTDFTRPGHVVPLRAREGGVLVRAGHTEAAVDLARAAGLRPAGVICEVVSEEDPTGMARVPELRRFCDEHDLKLISIEQLIEWRRKNEILVERQVETVLPTDFGTFKAVGYRSIIDGTELVAIVAGDVASDGGENVLVRVHSECLTGDVFGSRRCDCGQQLHESLRLIQEAGRGVVVYMRGHEGRGIGLLAKLRAYQLQDEGADTVDANLALGLPADAREFGTSAQILYDLGVRSLNLISNNPAKKVGLEGHGISIASRTPIPVAVHEDNVRYLKTKRDRMGHDLPDVALWEQEHPEN

SEQ ID NO: 49246 - DNA, 1200 bp, Fusobacterium nucleatum subsp. nucleatum ATCC 25586
  CDS (1)..(1200): transl_table=11
atgatttacaaaattgaggatgtattagaagatattaagaatggtattcctctaataatagtagatgatgaaaacagagaaaatgaaggagacctttttgttgctgctgagaaagcaacttatgaaagtattaatcttatggcaacatttgcaagaggtttaacttgtacacctatgacaagcgaatatgcaatcagattaggtttagatccaatgactgcaagaaatactgatgcaaaatgtactgcctttactgtatctgttgatgcaaaagaaggaactacaactgggatttcaatagctgatagacttacaacaataaaaaaattagcaaataaaaattctgttccatcagattttacaaagcctggacatatttttccactgattgcaaaagataaaggtgtgttggaaagagaaggacatactgaggcaacagttgatttatgtaaaatttgtggactcacacctgtatctgttatctgtgaaattttaaaagatgatggtactatggcaagaatggatgatttagaaatttttgctaaagagcataatttaaaaattattacaatagctgatttaatcaaatacagaaaaaagactgaacaacttatgaaaattgatgttgttgctaatatgccaactgatagtggcacatttaaaattgtaggttttgataatctcattgatggtaaagaacatattgcccttgtcaaaggtgatgttgctggtaaagaaaatgttacagttagaatacactctgaatgtttcacaggagatattttaggttctttaagatgtgattgtggttctcaattaaaaactgcaatgagaagaattgataaacttggagaaggaattattctttatctaagacaagaaggtaggggtataggacttttaaataaattaagagcctataatcttcaagaagaaggtatggacacactagatgcaaatttacatcttggttttggtgcagatatgagagattacgctgttgctgcacagatgttaaaagcattaggagtaaaatctataaaacttttaacaaataacccattaaaaataaatgggcttgaagaatatggaattcctgttgttaaaagagaagaaattgagattgaagctaataaaattaataaagtatacttaaaaactaaaaaagaaagaatgggacatcttttaaaaattaaataa

SEQ ID NO: 49247 - protein, 399 aa, Fusobacterium nucleatum subsp. nucleatum ATCC 25586
MIYKIEDVLEDIKNGIPLIIVDDENRENEGDLFVAAEKATYESINLMATFARGLTCTPMTSEYAIRLGLDPMTARNTDAKCTAFTVSVDAKEGTTTGISIADRLTTIKKLANKNSVPSDFTKPGHIFPLIAKDKGVLEREGHTEATVDLCKICGLTPVSVICEILKDDGTMARMDDLEIFAKEHNLKIITIADLIKYRKKTEQLMKIDVVANMPTDSGTFKIVGFDNLIDGKEHIALVKGDVAGKENVTVRIHSECFTGDILGSLRCDCGSQLKTAMRRIDKLGEGIILYLRQEGRGIGLLNKLRAYNLQEEGMDTLDANLHLGFGADMRDYAVAAQMLKALGVKSIKLLTNNPLKINGLEEYGIPVVKREEIEIEANKINKVYLKTKKERMGHLLKIK

SEQ ID NO: 49248 - DNA, 1290 bp, Streptomyces coelicolor A3(2)
  CDS (1)..(1290): transl_table=11
atgagcacggcacccatcctctacagccccgacggccccgaggacctcgtcctcgaccccgtcgagcaggccgtcgcggacatcgccgcgggccgccccgtcgtggtcgtcgacgacgagaaccgcgagaacgagggcgacctcgtcatcgccgccgagaaggcgaccgaggagatcgtcgccttcatgatgaccgagtgccgcggcctgatctgcgcccccatggagggcgaggaactggaccggctccggctcccgcagatggtcgacgacaacaccgagtcgatgaagaccgccttcaccgtctccgtggacgccggtgccgcccacggcgtcaccaccggcatctccgccgccgaccgcgccaccaccctccggctcctggcgggcggcaccgccgagcccggcgacctggtccgccccgggcacgtcttcccgctgcgcgcccgccccggcggcgtactcgtccgcaacggccacaccgaggccgccgtcgacctggcccgcctcgcgggactgcgcccggccggcgccatcgtggagatcgccggtgaggacgggcgcatgctgcggctgcccgagctgatcccgttcgcccgcaagcacggcctgacgatcatctccatcgaggacctcatcgcctaccggcgcagcgcggaacccaccgtccgccgcgaggccgaggtacggctgcccacgaagcacggcgagttcacggcgtacggctaccgctccaccgtcgacggcgtcgagcacatcgccctcgtgcacggcgagatcggcgacggcgaggacgtcctggtccgcgtccactccgagtgcctcaccggcgacgtcttcggctcccagcgctgcgactgcggcccccagctcgacgcctccctggaccgcatccaggccgagggccggggagtcgtcgtctacctgcgcggccacgaggggcgcggcatcggcctgatgtccaagctgcgcgcctacgaactccaggagcgcggccgggacaccctcgacgccaacctggaactcggcctgcccgccgacgcccgcgactacggcgcaggcgcgcagatcctcgccgacctcggcgtgcgagccgtccgcctcctgaccaacaacccggacaagagcgacgccctcgaacggcacggcatcacggtcaccggccgcgagcccatgcccgtccaggccggcgagcacaacctccgctacctgcgcaccaagcgggaccggatgggacacgacctgccctggctggacacgacccccgtgtccacctgcggcaaccagtaa

SEQ ID NO: 49249 - protein, 429 aa, Streptomyces coelicolor A3(2)
MSTAPILYSPDGPEDLVLDPVEQAVADIAAGRPVVVVDDENRENEGDLVIAAEKATEEIVAFMMTECRGLICAPMEGEELDRLRLPQMVDDNTESMKTAFTVSVDAGAAHGVTTGISAADRATTLRLLAGGTAEPGDLVRPGHVFPLRARPGGVLVRNGHTEAAVDLARLAGLRPAGAIVEIAGEDGRMLRLPELIPFARKHGLTIISIEDLIAYRRSAEPTVRREAEVRLPTKHGEFTAYGYRSTVDGVEHIALVHGEIGDGEDVLVRVHSECLTGDVFGSQRCDCGPQLDASLDRIQAEGRGVVVYLRGHEGRGIGLMSKLRAYELQERGRDTLDANLELGLPADARDYGAGAQILADLGVRAVRLLTNNPDKSDALERHGITVTGREPMPVQAGEHNLRYLRTKRDRMGHDLPWLDTTPVSTCGNQ

SEQ ID NO: 49250 - DNA, 645 bp, Streptomyces coelicolor A3(2)
  CDS (1)..(645): transl_table=11
atgcgcaccgaagagaacgaagacgtgatcgtcgcaccctcccccgccgtgcaggtgagggcccgggtggaagtccccatcgatgtccccggcctgggaccccgggcgagcaccatggtcagtttcgacggactgcacgacggtcgcgagcacgtcgcgctccttatgccgggctgggaaaagaagagcgatccactggtgcgggttcattccgaatgcctcaccggtgacgtcttcggatctcagcgctgcgactgcggtccccaacttcacgaggcactcgccatgtgctcccacgaaggcggcatcatcctgtatctgcgacaggaggggcgcggtatcgggctgtacaacaagttcgacgcctacctgctgcaggacgggggcctggacaccttcgaagcgaatgcagtgctcaatttcagccatgatctgcgggactaccgggtggcggccgagatgctgagcgctctgggcgtgcccagaatccgtctgctgtccaacaacccggagaagggaaaccagctccgttcgcacggcgttgtcatatcggacgtcgtcgcgacggggaccttcgtcaatgagaacaaccaggcctacctgacggccaagcgcgaacgagccggtcatgcactcgaggtctga

SEQ ID NO: 49251 - protein, 214 aa, Streptomyces coelicolor A3(2)
MRTEENEDVIVAPSPAVQVRARVEVPIDVPGLGPRASTMVSFDGLHDGREHVALLMPGWEKKSDPLVRVHSECLTGDVFGSQRCDCGPQLHEALAMCSHEGGIILYLRQEGRGIGLYNKFDAYLLQDGGLDTFEANAVLNFSHDLRDYRVAAEMLSALGVPRIRLLSNNPEKGNQLRSHGVVISDVVATGTFVNENNQAYLTAKRERAGHALEV

SEQ ID NO: 49252 - DNA, 1131 bp, Xanthomonas campestris pv. campestris str. ATCC 33913
  CDS (1)..(1131): transl_table=11
atgaatttcgcgcctgtccccgaattgatcgaagagctgcgcgccggccgcatggtggtgatcgtcgatgacgaagaccgcgaaaacgaaggcgatctgatcatggcggccgagttggtcaagccgtcggacatcaacttcatggtcacccacgcacgtggcctggtgtgcctgtcgctgacccgcgagcgctgcacgcagctcggtctggcaccgatggtgcgcaacaacaccgcgcagttccataccaacttcaccgtcagcattgaggcggccgaaggggtcaccaccgggatttccgcctacgaccgcgcgcataccgtgcgcaccgcggtgcggccggatgccaaaccgcacgatctcagccagccggggcacattttcccgctgattgcgcagccgggtggcgtgctgacgcgcgccgggcacaccgaggcggccagcgatctgccgatgctggccgggctggaaccggccggtgtactggtggaagtactcaaccccgacggcagcatggcgcgccgcccgcagctggaggtgttcgcgcgcgagcatgggctgaagatgggctcgatcgccgatctgatcgcctaccggctggccaacgaacacaccgtcgagcgcgtggatgaacgtgagatcgaaaccgagttcgggccgttccatctggtgacctaccgcgaccgcatcgcgcacgacctgcatttcgcgctggtgcgtggcaccccggatccgaccacgccaaccctggtccgcgtgcaggtggaaaacccgctggccgatctgctgcactggcagcgcgatgatttcggcgtggccgccaccgatgcgctgcgcgcgattgctgccgaagggcagggcgtgatggtggtgctgtcggccccgcgcgacagcgaatcgctgctggcacgcctgcgccaacagccggaggtggccgccaacgccaaggatgtgagccagtggcgccgcaacggtgctggcgcgcagatcctggccgacctgggcctgggcaagctgcgcgtgctgggtacgccgcggcggcaggtcggcctggccggcttcggcctggaggtggtggagtttctggaatgccatccgggcgccgcctcgcgcgtggccgccgcgccctga

SEQ ID NO: 49253 - protein, 376 aa, Xanthomonas campestris pv. campestris str. ATCC 33913
MNFAPVPELIEELRAGRMVVIVDDEDRENEGDLIMAAELVKPSDINFMVTHARGLVCLSLTRERCTQLGLAPMVRNNTAQFHTNFTVSIEAAEGVTTGISAYDRAHTVRTAVRPDAKPHDLSQPGHIFPLIAQPGGVLTRAGHTEAASDLPMLAGLEPAGVLVEVLNPDGSMARRPQLEVFAREHGLKMGSIADLIAYRLANEHTVERVDEREIETEFGPFHLVTYRDRIAHDLHFALVRGTPDPTTPTLVRVQVENPLADLLHWQRDDFGVAATDALRAIAAEGQGVMVVLSAPRDSESLLARLRQQPEVAANAKDVSQWRRNGAGAQILADLGLGKLRVLGTPRRQVGLAGFGLEVVEFLECHPGAASRVAAAP

SEQ ID NO: 49254 - DNA, 1134 bp, Xanthomonas campestris pv. campestris str. ATCC 33913
  CDS (1)..(1134): transl_table=11
atgagcagtccctctcccttccccagcgcgcaacccttcggtgacccggccgcgatccgctgcgagcgcgccgcctccgaactgcgtgccggccgcccggtcctcatcaccgatgcgcaggggcacacccgcgccgtgctcgggctggacagcagcacggcgcagtcgtacacggccttcgcgcgcgccgcgcagggccggcattacctgttcgtgacccccacccgcgcacaggtgctgggcctggtggccccgcagggtgcgcgtgtggcgctggccagccacgattacgaccagctcgccgcactcgcctatctgcgcgataccccagtgccctcgcagtggaccccgggcgatgcgctggacgccggcgcggtggagatcgcacggcttgggctgctgctgccggcgatgctggcggtggagctgcccggcgagcaagaccgcgccgccttcgccggctgccagtcactggcgctggacgacctggacagcggctgcgccacctcggcggcggctggctacgaattggtcacccgcagcccggtgccgttgcgcggcttgggcatgagcgagttcgtggtgttccgcggtggcgtggcgcagcgcgatcaggtggcgattgtggtgggtcagccggatctgggcagtgcggtgccggtgcgcgtgcattcgtcctgcctcaccggcgacctgttcggctcgctcaagtgcgactgcggcgaccagctgcggcacgggctggccaagctcaaggagctcggcggcggcgtgttgctgtatctggatcaggaaggccgcgggacgggcatcgcctcgaagatgcgtgcgtacggctatcagcacgccgggctggacaccatcgatgccgatgcgcagctgggctttggcccggatgagcgccgctacggcagtgcggtggcgatgttgcgcggcctgggcatcagccggatccgcctgctgaccaacaacccgaccaaggccgagcggctgcgcgccgccggcatcgtggtggaagaccgcatcccggtcaccggcgacatcacgccggagaacgagcagtacctgcgcaccaaggcggcccgcgccggccatgcgctggatgtcgacgcgctgatcctggcggcccagtaa

SEQ ID NO: 49255 - protein, 377 aa, Xanthomonas campestris pv. campestris str. ATCC 33913
MSSPSPFPSAQPFGDPAAIRCERAASELRAGRPVLITDAQGHTRAVLGLDSSTAQSYTAFARAAQGRHYLFVTPTRAQVLGLVAPQGARVALASHDYDQLAALAYLRDTPVPSQWTPGDALDAGAVEIARLGLLLPAMLAVELPGEQDRAAFAGCQSLALDDLDSGCATSAAAGYELVTRSPVPLRGLGMSEFVVFRGGVAQRDQVAIVVGQPDLGSAVPVRVHSSCLTGDLFGSLKCDCGDQLRHGLAKLKELGGGVLLYLDQEGRGTGIASKMRAYGYQHAGLDTIDADAQLGFGPDERRYGSAVAMLRGLGISRIRLLTNNPTKAERLRAAGIVVEDRIPVTGDITPENEQYLRTKAARAGHALDVDALILAAQ

SEQ ID NO: 49256 - DNA, 1140 bp, Xanthomonas axonopodis pv. citri str. 306
  CDS (1)..(1140): transl_table=11
atgaatttcgcgcccgttccggaactgatcgaagaactgcgcgccggacgcatggtggtcatcgtcgatgacgaagaccgcgaaaacgaaggcgatctgatcatggccgccgagttggtgaagccgtcggacatcaacttcatggtcacccacgcgcgcgggctggtgtgcctgtcgctgacccgcgagcgctgcgcgcagctgggtctggcgccgatggtgcgcaacaacaccgcgcagttccagaccaacttcactgtcagcatcgaagcggccgaaggggtgaccaccggcatttcggcctacgaccgcgcgcacaccgtgcgcaccgcagtccgcccggatgcccggccacaggatttgagccagcccgggcatatcttcccgttgatctcccagcccggtggcgtgctgacccgtgccggccacaccgaagcggccagcgatctgccgatgctggccggactggaaccggccggtgtgctggtggaagtgctcaacccggacggcagcatggcgcgtcgcccgcagctggaagtgttcgcgcgcgagcatgggctgaagatgggctcgatcgccgacctgatcgcatatcggcttgccaatgagcacaccgtcgagcgcgtggacgagcgcgagatcaccaccgaattcggtccgttcaagctggtgacctaccgcgaccgcatcgcgcacgacctgcactttgcgctgttgcgcgggcgcgccgatccgcagacgccgacgctggtgcgcgtacaggtggaaaacccattggccgacctgctgcactggcagcgcgatgacttcggcgtggcagccactgatgccttgcgcgcgatcgccgccgaggggcagggcgtgatggtggtgctgtcggcgccacgcgacagcgaatcgctgctggcacggctgcgccagcagcccgaagccgccgccaatgccaaggacgtgagtcagtggcggcgcaacggcgccggtgcgcagatcctggccgacctcggcctgggcaagttgcgcgtgctgggcaccccccggcgccaggtggggttggccggattcgggctggaggtggtcgagtatttggagtgccatgccggtgaaggcgtgcgctcggtgccgccgtctgccgttccctga

SEQ ID NO: 49257 - protein, 379 aa, Xanthomonas axonopodis pv. citri str. 306
MNFAPVPELIEELRAGRMVVIVDDEDRENEGDLIMAAELVKPSDINFMVTHARGLVCLSLTRERCAQLGLAPMVRNNTAQFQTNFTVSIEAAEGVTTGISAYDRAHTVRTAVRPDARPQDLSQPGHIFPLISQPGGVLTRAGHTEAASDLPMLAGLEPAGVLVEVLNPDGSMARRPQLEVFAREHGLKMGSIADLIAYRLANEHTVERVDEREITTEFGPFKLVTYRDRIAHDLHFALLRGRADPQTPTLVRVQVENPLADLLHWQRDDFGVAATDALRAIAAEGQGVMVVLSAPRDSESLLARLRQQPEAAANAKDVSQWRRNGAGAQILADLGLGKLRVLGTPRRQVGLAGFGLEVVEYLECHAGEGVRSVPPSAVP

SEQ ID NO: 49258 - DNA, 1134 bp, Xanthomonas axonopodis pv. citri str. 306
  CDS (1)..(1134): transl_table=11
atgagcagccccctcccctcccccagcacacaggccttcggcgatccggcggcgattcgctgtgagcgcgccgcttccgaactgcgtgccgggcgcccggtcttgctgacggcggcgaatgggcaggcgcgtgcggtgctggcgctggatagcagcacggcacagtcgtatgcggcgttcgcccgtgccgcacggggccgccactatctctttgtgacgcccactcgcgcccaggtgctggggctgagcgcgccgcagggtgcgcgcgtgggcttgatcgatcacagctacgaccagctcgccgcgttggcctacctgcgcgacaccccggtgcctgcgcagtggacggccggcgatgcgctggatgccggcggcgtggagatcgcgcggcttggcctgctgctgccggcgttgctggcggtggagctgcgcgatgtgcacgaccatgccgcgttcgccggctgccagtcgctggcgctggacgatttgctgcgcggctgtgccacctccgcggctgccggctacgagctggtgacccgcaccccggtgccgctgcgcggcctgggcatgagtgagttcgtggtgtttcgcggcggtgtggcgcagcgcgatcaggtggcgatcgtggtcggccagccggacctgggcactgccgtcccggtgcgcgtgcattcgtcgtgcctcaccggcgacctgttcggctcgctcaaatgcgattgcggcgaccagctgcggcacggcctggccaagttgaaggagctcggtggcggcgtcctgctgtatctggaccaggaaggtcgcggcaccggcatcgccgccaagatgcgcgcctacggctatcagcatgcgggcctggacaccatcgacgccgatgcgcaattgggctttggtccggacgagcgccgctacggcagtgcggtggcgatgttgcgcgggctgggcatcggccggatccggttgttgaccaacaacccggccaaggccgagcgcctgcgcgcggccggcatcgtggtcgaagaccgcatcgcgatcaccggcgacatcaccgccgaaaacgagcagtacctgcgcaccaaggccgcacgcgccggccacgcgctggatgtggatgcgttgatcctggccgcgcaataa

SEQ ID NO: 49259 - protein, 377 aa, Xanthomonas axonopodis pv. citri str. 306
MSSPLPSPSTQAFGDPAAIRCERAASELRAGRPVLLTAANGQARAVLALDSSTAQSYAAFARAARGRHYLFVTPTRAQVLGLSAPQGARVGLIDHSYDQLAALAYLRDTPVPAQWTAGDALDAGGVEIARLGLLLPALLAVELRDVHDHAAFAGCQSLALDDLLRGCATSAAAGYELVTRTPVPLRGLGMSEFVVFRGGVAQRDQVAIVVGQPDLGTAVPVRVHSSCLTGDLFGSLKCDCGDQLRHGLAKLKELGGGVLLYLDQEGRGTGIAAKMRAYGYQHAGLDTIDADAQLGFGPDERRYGSAVAMLRGLGIGRIRLLTNNPAKAERLRAAGIVVEDRIAITGDITAENEQYLRTKAARAGHALDVDALILAAQ

SEQ ID NO: 49260 - DNA, 1182 bp, Staphylococcus aureus subsp. aureus MW2
  CDS (1)..(1182): transl_table=11
atgcaattcgataatattgacagtgctttaatggctttaaaaaatggagaaacaattattgtagtagatgatgagaatcgtgaaaatgaaggtgatttagtagcggtcactgaatggatgaacgataataccattaattttatggcgaaagaagcaaggggattaatatgcgcaccagtgtctaaagatattgcacaacgtttggatttggtacaaatggttgatgataactccgacatctttggtacgcaatttacagtaagtattgatcatgtagatacaacaacaggaattagtgcttatgaacgtacattgactgccaaaaagctcattgatcctagtagtgaagctaaagattttaatcgtcctggtcatttatttccattagtagcacaagataaaggcgtattagctagaaatggacacacagaagcggctgttgatttagctaaacttactggtgccaagcccgctggtgtcatttgtgagattatgaatgatgacggcacgatggcgaaaggacaagatttacaaaagtttaaagaaaaacatcaattaaagatgattacgattgatgatttaattgaatatcgtaaaaaattagaaccagaaattgaatttaaggcaaaagtgaaaatgcctacagatttcggaacatttgatatgtatggttttaaagcgacttacacagatgaagagatagttgtactgacaaaaggtgcaattcgacaacatgaaaatgtacgcttacattctgcgtgccttacaggcgatattttccatagtcaacgttgtgattgtggtgctcaacttgaatcgtctatgaagtatatcaatgaacatggtggcatgattatttatctacctcaagaaggtcgtggcataggattgttaaacaaattacgcgcatatgaattaattgagcaaggatatgatacagtaactgcaaatttagcattaggttttgatgaagatttgcgagattatcatattgctgcacagattttaaaatattttaacatcgaacatatcaatttattaagtaataatccaagtaaatttgagggattaaaacaatatggcattgatattgcagaaagaattgaagttatcgtaccagaaacggtacataatcatgattatatggaaacgaaaaaaataaaaatgggtcatttaatatag

SEQ ID NO: 49261 - protein, 393 aa, Staphylococcus aureus subsp. aureus MW2
MQFDNIDSALMALKNGETIIVVDDENRENEGDLVAVTEWMNDNTINFMAKEARGLICAPVSKDIAQRLDLVQMVDDNSDIFGTQFTVSIDHVDTTTGISAYERTLTAKKLIDPSSEAKDFNRPGHLFPLVAQDKGVLARNGHTEAAVDLAKLTGAKPAGVICEIMNDDGTMAKGQDLQKFKEKHQLKMITIDDLIEYRKKLEPEIEFKAKVKMPTDFGTFDMYGFKATYTDEEIVVLTKGAIRQHENVRLHSACLTGDIFHSQRCDCGAQLESSMKYINEHGGMIIYLPQEGRGIGLLNKLRAYELIEQGYDTVTANLALGFDEDLRDYHIAAQILKYFNIEHINLLSNNPSKFEGLKQYGIDIAERIEVIVPETVHNHDYMETKKIKMGHLI

SEQ ID NO: 49262 - DNA, 1344 bp, Rhizobium etli
  CDS (1)..(1344): transl_table=11
ttgtcgacagagagctcgatgccgcgcgtcgcgccgtcagcccataataaggaggaggattccatgtctttttcgagcatagatgaggcgatcgaggcgatcgaagcgggcgagatggttatcgtggtcgacgacgaaaaccgggagaatgaaggcgacctagtcgttgctgccgaaaaaataacagctgagcacatcgctttcatgatgaaatatgcgagaggccttatctgcgtgccacttccagccgaacgtctcgacaaactcgagatccccctgatggtcacacgtaattcggactcactgcagacggcatttaccgtttccgtcgattgcaaacacggcacaacgacagggatttcagccgaagatcgagcagcaaccgtcaagtcgctcatcgatccgcagacgcggccggaagacctatcgcgaccgggtcacatttttcctttgcgtgcaaatcgtctcggtgtcctgggccgtcctggccacaccgaagctgccgtggatcttgcacgacttgccggcctggcgccggctggcgtaatctgcgagatcgccaatgacgacggaaccatgtctcgactgccagatctcgagaagttcgcaatcgaacatggcctgcacatagtaacgatcgacgctttgattgagtactgcaggagtcgtgatacgagggtaaagcgttacgcgcagtcctttatgccaacgcggtttggggatttcaaggcaattgcttatcgcgatagtttgacgggaacggaacacttagctttgacacttggcgagttgtgcgagaaggaagacgttctggtacgggtgcattctgaatgtctgacaggtgaggcgttccggtccatgcgatgcgactgcggtcaacagctcgaaatggctcttcgggcggtccagttagcgggcgctggttgcgtgatctacatgcgtgggcaagaggggcgtggcattggcttaggaaacaaaattgcggcttacagcctgcaggatcatggtcgtgatactcttgaggcaaatcgggaactcggcttcgcatctgattcccgcgaatataacgcagcggcggatatcatccgcgacctcggtatcggcagcgttcggcttctgaccaacaatcctacaaaaatagaggcgctgcgaacgtcaggcgtcatcgtgtcgtctcgccagagtctgatcgccgcatctagcgcgtccaacatcacttattttaagacaaagcgcgatcggtttggccacctgttggaccaggacacgtcagctgaacacgtcggccggagcaacgtcttttcagtgtttggcgcgcaggtgttctctggaccccttggataa

SEQ ID NO: 49263 - protein, 447 aa, Rhizobium etli
MSTESSMPRVAPSAHNKEEDSMSFSSIDEAIEAIEAGEMVIVVDDENRENEGDLVVAAEKITAEHIAFMMKYARGLICVPLPAERLDKLEIPLMVTRNSDSLQTAFTVSVDCKHGTTTGISAEDRAATVKSLIDPQTRPEDLSRPGHIFPLRANRLGVLGRPGHTEAAVDLARLAGLAPAGVICEIANDDGTMSRLPDLEKFAIEHGLHIVTIDALIEYCRSRDTRVKRYAQSFMPTRFGDFKAIAYRDSLTGTEHLALTLGELCEKEDVLVRVHSECLTGEAFRSMRCDCGQQLEMALRAVQLAGAGCVIYMRGQEGRGIGLGNKIAAYSLQDHGRDTLEANRELGFASDSREYNAAADIIRDLGIGSVRLLTNNPTKIEALRTSGVIVSSRQSLIAASSASNITYFKTKRDRFGHLLDQDTSAEHVGRSNVFSVFGAQVFSGPLG

SEQ ID NO: 49264 - DNA, 1284 bp, Chlorobium tepidum TLS
  CDS (1)..(1284): transl_table=11
gtgatgagcaacaatcagttcgattccatagaatcagccatcgaagacattaaaaacggcaagctgatcatcgtcgtcgatgacgaagatcgggaggatgaaggcgattttattgccgctgccgagcatgtgacccccgagatggtgaacttcatcaccaaagaggcgcgcggcctgctctgcgtggctattcccatggagcgcgcccgcgagttgcagcttgaaccgatggtgcagcgcaacacctcccagcacgaaacaaacttcaccgtttcaatcgacgcgatcgccgaaggggtgaccaccggcatttcggcctacgaccgatacatgacgctcaagatgcttgccgatccgtcctccacggcggacgacttctcacgccccggccacatcttcccgctccgggcgatggatggcggtgtgctacgcagggttggtcacaccgaggccgcggtcgatctctgtcgtcttgccggatgccagccagccggtttgctctgcgaaatcctgcacgacgacggcagcatggcgcgtgtgcccgaactgctgaagctcaaagagaagctcggcatgaagctcatcacgatcaaagatctcgtggcttaccggatgcagcggtcgaagctcgtgcaccgcgccgtcgagtcgaagctaccgaccgcgtatggcgagttcaagctcattgcctacgaaaccatcgtcgatcagcagaatcacatggccttcgtcaagggcgatgttggcaacggcgagccggtgcttgcccgggtgcactcgcagtgcgccacgggcgataccttcggttcgttgcgttgcgactgcggtcaccagctcgaaaccgctctgcgcatgattgaaaaggaggggcgtggcgtcctgatttacctcatgcaggaggggcgaggcatcggcctcatcaacaagctcaaggcctacaaccttcaggacgaagggttcgacacggtcgaggccaacgagaagctcggtttcaaacccgaccttcgcgactacggcatcggtgcgcagattcttcaggaccttggtgtcaggaagatgcggttgatgaccaacaacccgaaaaagattgtcggtctggaaggctatggtcttgaaatcgtcgaacgcgtaccgctcgaaatcgagccgaacgaggtgaaccgccactacctgcagaccaagcgcgacaagcttggtcacatgattcaaatggcttcgggcaatgaacggattctcttcgagcgccttgccgatgagcagttgaaacagcacaaaaaagattaa

SEQ ID NO: 49265 - protein, 427 aa, Chlorobium tepidum TLS
MMSNNQFDSIESAIEDIKNGKLIIVVDDEDREDEGDFIAAAEHVTPEMVNFITKEARGLLCVAIPMERARELQLEPMVQRNTSQHETNFTVSIDAIAEGVTTGISAYDRYMTLKMLADPSSTADDFSRPGHIFPLRAMDGGVLRRVGHTEAAVDLCRLAGCQPAGLLCEILHDDGSMARVPELLKLKEKLGMKLITIKDLVAYRMQRSKLVHRAVESKLPTAYGEFKLIAYETIVDQQNHMAFVKGDVGNGEPVLARVHSQCATGDTFGSLRCDCGHQLETALRMIEKEGRGVLIYLMQEGRGIGLINKLKAYNLQDEGFDTVEANEKLGFKPDLRDYGIGAQILQDLGVRKMRLMTNNPKKIVGLEGYGLEIVERVPLEIEPNEVNRHYLQTKRDKLGHMIQMASGNERILFERLADEQLKQHKKD

SEQ ID NO: 49266 - DNA, 603 bp, Yersinia pestis KIM
  CDS (1)..(603): transl_table=11
atgaacaatgatatgcagctaaaacgtgtagcagaagcaaagttacccactccttggggtgactttttaatggtcggttttgaagagttggccaccgggcatgaccacctggccttgatattcggtgatatctccggtgataaaccggttctgtcccgtgtacattctgaatgcctgactggtgatgctttatttagcctgcgttgtgactgtggttttcagttagaggttgcactgacgcgtatcgcggaagaaggccgtggtgtgctgatttatcatcgtcaggagggccgtaatattggcttgctgaataaaattcgtgcttatgcattgcaggatttaggggctgatacggtagaagccaatcatcagcttggttttgctgcggatgaacgtgatttcacactctgttctgatatgtataaattattaggcatcaaagcggttcgtctgctgaccaacaaccctaaaaaggtcgagatcctcacccaagcggggatcaatatcgtcgaacgtgtgccactgatcgtgggcgaaaacccaaaaaacgaacattatctggcaaccaaagcggccaaaatggggcatttactcaccaaataa

SEQ ID NO: 49267 - protein, 200 aa, Yersinia pestis KIM
MNNDMQLKRVAEAKLPTPWGDFLMVGFEELATGHDHLALIFGDISGDKPVLSRVHSECLTGDALFSLRCDCGFQLEVALTRIAEEGRGVLIYHRQEGRNIGLLNKIRAYALQDLGADTVEANHQLGFAADERDFTLCSDMYKLLGIKAVRLLTNNPKKVEILTQAGINIVERVPLIVGENPKNEHYLATKAAKMGHLLTK

SEQ ID NO: 49268 - DNA, 1644 bp, Thermosynechococcus elongatus BP-1
  CDS (1)..(1644): transl_table=11
gtgcctgtgtttgactccattgaatcagcattagaagccctgcggcgcggcgaagtgattgtggtcgtcgatgatgaaaatcgcgagaatgagggggatctgattggtgctgccgagcgggtgacccccgccatgattaacttcatggctgttcatgcacggggactgatttgccttgccatggagggcgatcgcctcgatgaattggatttgcccttaatggtaacaacaaataccgatagcaaccaaactgcctttacggttagcgttgatgccggtgcccgttggggcgtgaccacaggtatttccgccgaggatcgcgcccgcacgattcaagcgttaattgatccgagcacgcaacctcaagatctccgtcgccctggccatgttttccccctgcgatcgcgccctgggggagttcttaagcgagctggccacaccgaggccgcagtggatctgacacggctggcgggtctttacccagcgggtgtgatctgtgaaattcaaaatcccgacggcaccatgtcgcggctgccccaactcatggagtatgcccgcacccaccaactcaaaatcattagcattgccgacctcattagctaccgtctccagcatgagcgctttgtgcgccgcgaggccgtcgccaagctaccgacggagttcggtgaatttcaaatctatggctaccgcaattccctcgatcaatcggagcacgtcgccattgtcaaaggggatcccgctacatttggggagcaacccgtgctggtgcgcgtccattctgaatgcttgacgggcgatgcccttggttccttgcgctgtgattgtcggatgcaactgcaggcagctctgaaaatgattaacgccgccggtcggggtgtagtggtttacctacggcaggaggggcgggggattgggctggtcaacaagctgcgtgcttattccctgcaggatttaggcatggatacggtggaggccaatgagcacctgggctttccagcggatttgcgcaattatggcgtcggtgcccagatactcaatgatttgggggtgaagcagattcgcctgattaccaataacccccgcaaaattgctggcctcaagggctatggccttgaagtggtggatcgggtgcccctgttgattgaagcaaccccctacaacaccccctacttgacgaccaaggcagaaaaactggggcatctgctgctgcaaacgtacctgattacggtggcttttcgctggcaggggtcgcaattggctgcgggcgatcgctatgaacgactggaaaaactgcgtcatctggccgcaggcgtccatttgctggtgcgcgaagaagctcggcccgttgctcaggccatctttgggcatcctgacctcattgttcactttggctttgaccagccccatgtggccgatcgccagtggtataagcagccagaacatccctatgtgcttgcggtgcaaaccctgctgcggcaattttgccaatggccaacgctaaaaggatttgagtttctggtggccacgggcaccgatccaatgctcaacctaccgatggatttggatcgccaagcctacacccaacagtctcccagtgaatggcggcctcatctcatctattcctggtctgcagcagcaggttaa

SEQ ID NO: 49269 - protein, 547 aa, Thermosynechococcus elongatus BP-1
MPVFDSIESALEALRRGEVIVVVDDENRENEGDLIGAAERVTPAMINFMAVHARGLICLAMEGDRLDELDLPLMVTTNTDSNQTAFTVSVDAGARWGVTTGISAEDRARTIQALIDPSTQPQDLRRPGHVFPLRSRPGGVLKRAGHTEAAVDLTRLAGLYPAGVICEIQNPDGTMSRLPQLMEYARTHQLKIISIADLISYRLQHERFVRREAVAKLPTEFGEFQIYGYRNSLDQSEHVAIVKGDPATFGEQPVLVRVHSECLTGDALGSLRCDCRMQLQAALKMINAAGRGVVVYLRQEGRGIGLVNKLRAYSLQDLGMDTVEANEHLGFPADLRNYGVGAQILNDLGVKQIRLITNNPRKIAGLKGYGLEVVDRVPLLIEATPYNTPYLTTKAEKLGHLLLQTYLITVAFRWQGSQLAAGDRYERLEKLRHLAAGVHLLVREEARPVAQAIFGHPDLIVHFGFDQPHVADRQWYKQPEHPYVLAVQTLLRQFCQWPTLKGFEFLVATGTDPMLNLPMDLDRQAYTQQSPSEWRPHLIYSWSAAAG

SEQ ID NO: 49270 - DNA, 1194 bp, Streptococcus agalactiae 2603V/R
  CDS (1)..(1194): transl_table=11
atggcctttagtccaataaaaaaacttttacaagacatcaaatcagggaaaatggtagtgttgatggatgacgaaaatagagagaatgaaggagaccttatttgtgcggctgaaatggtgacaaaagagtcgattaattttatggctaaatttgggaaaggattaatttgcttacctctgtctaattactatgctgaaaagttagaattagctcaaatggctagccataatactgataatcatgaaacagcttttaccatatctattgatcatctatcaactagtactgggatttctgcggaagatagagctttgacagctaagatggttgctaacgacagtagcaaagctaaagactttagacgtcctgggcacttatttcccttgttagccaaggaaggaggtgttttagctagaaatggacatactgaagcaaccgttgatctatgtcgtttagctggattaaaggaatgtggactttgttgtgaaataatggctgaagatggtagtatgatgagaaaggatgagttattagcatttgctcaaaagcacgatttagctatcgctaccataaaacaattgcaagactatagacgtcaagaagagggaggggtggttagagaaattgagattcagctaccaacgcaattcggtcattttacggcttatggatatagcgaagttgtggcaaataaggaacatgttgcccttgttaaaggggatattagtagtggtgaagatgttttatgtcgtttacactcagaatgtttgacaggtgatgtctttcattccttgagatgtgattgtggggaacaactggctaatgccctccaacaaatagaggctgaaggtcgtggagtccttctttatatgagacaggaaggtcgaggaattggtttgattaataagttaaaagcttatcatttgcaagaagaaggcttagatactttagaagctaatttggctttaggttttgaaggagatgagagagactatggagttagtgctcaacttttaaaagatttaggtataaattctataaacttactaaccaataatccagataaaatccaacaacttgaagcagaaggaatttgcgtcaaaaacagagtgccattacaggtggcagtaacagcttatgaccttaattatttaaaaactaaaaaagaaaaaatgggacatcttttagattaa

SEQ ID NO: 49271 - protein, 397 aa, Streptococcus agalactiae 2603V/R
MAFSPIKKLLQDIKSGKMVVLMDDENRENEGDLICAAEMVTKESINFMAKFGKGLICLPLSNYYAEKLELAQMASHNTDNHETAFTISIDHLSTSTGISAEDRALTAKMVANDSSKAKDFRRPGHLFPLLAKEGGVLARNGHTEATVDLCRLAGLKECGLCCEIMAEDGSMMRKDELLAFAQKHDLAIATIKQLQDYRRQEEGGVVREIEIQLPTQFGHFTAYGYSEVVANKEHVALVKGDISSGEDVLCRLHSECLTGDVFHSLRCDCGEQLANALQQIEAEGRGVLLYMRQEGRGIGLINKLKAYHLQEEGLDTLEANLALGFEGDERDYGVSAQLLKDLGINSINLLTNNPDKIQQLEAEGICVKNRVPLQVAVTAYDLNYLKTKKEKMGHLLD

SEQ ID NO: 49272 - DNA, 756 bp, Oceanobacillus iheyensis HTE831
  CDS (1)..(756): transl_table=11
atgttaaatacgaaactagaatcagaggcttttgcccttttaaaagataaaattcaacttattcaacaaaatgatcatgctatatatttggttggaccaatccaacttcccataaatttagatggagagacaacagtgtttcaatggtattgttggttaaattttgatgagataacagaagactatgaaaatatgattgaaaagttatcctcagcaaacctggctgaatatcaacaatctagtgtcttggtatatggagattttgctcatgcagaagaagcacttattcgtatgcattcgatttgccacactggtgacatatttggtagcaaacgttgtgactgtggttttcaattaaaggaatccatgaagaaaattagagaacatggcactggagccttattctatttagcaaatcacgaaggacgtggcataggattattcagtaaagcgatggcctatgtactgcaagagaatggctatgacaccgtggaggcaaatgaaagtcttggatacgtaaatgatgctagagattatgaagatgcaatctccgttttacgtacacttcgcagcaaacccgttaccctgatcacaaataatcctttgaaagtagatgcgcttgaaaatgccggactacagctttctggaagaaccccactatggggagatcgctcagaatataacaaaaaatatctagacacgaaggtgataaaatctggtcacttacgagaggatggtaaatgcagtaatgactga

SEQ ID NO: 49273 - protein, 251 aa, Oceanobacillus iheyensis HTE831
MLNTKLESEAFALLKDKIQLIQQNDHAIYLVGPIQLPINLDGETTVFQWYCWLNFDEITEDYENMIEKLSSANLAEYQQSSVLVYGDFAHAEEALIRMHSICHTGDIFGSKRCDCGFQLKESMKKIREHGTGALFYLANHEGRGIGLFSKAMAYVLQENGYDTVEANESLGYVNDARDYEDAISVLRTLRSKPVTLITNNPLKVDALENAGLQLSGRTPLWGDRSEYNKKYLDTKVIKSGHLREDGKCSND

SEQ ID NO: 49274 - DNA, 1116 bp, Brucella suis 1330
  CDS (1)..(1116): transl_table=11
atgagctataatcagaaacaggtcgttgatgcgattcgcgcttttgaacgcggtgaaatcgtcgtggtcatggatgacgacggtcgcgaaaacgaaggcgatctgatcgtcgccgccgtgcattgcacaccggaaaagatggccttcatcgtgcgccatacgtccggcattgtctgcacgccgatgacgcgtgaggaagccaagcgcctcaacctgacgccgatggtggcggaaaacgaatccgctcacacgaccgcttttacggtcacggtcgattatcgccatggcaccacgaccggcatttcagccgaagaccgcacgctgaccgtgcgcaacctggccaatcccaatgccggtgcttcggatttcgtgcgccccggccatattttcccgctggttgcccgtgagggcggtgtgctgatgcgctccggccatacggaagccgccgttgatctgtgcaagctcgccaacctgccgcccatcggcgttatctgcgaactcgtcaacgatgacggcacggtcaagcgcggtcccgatgtggcggctttcgccgaggagcacaaattgcaccgcgtcacggttgccgatctcatcgcctatcgccagcgcaaggaaacgctggtcaggcgcattggcgatgcgcctgtcgaaacctgtgctggcaaggctcatgcctatagttatgaactgccgtgggagccgatgcggcatgtggcggttgtcttcggcgatattcgcgacggcgaggaagtgccggtccgtctccatcgcgaggatgtgctgaacgatgttttcggcaagggcggcagcaatctcgatgccatcatgcagcgcatggggcaggagggccggggcattctggtctatctgcgtgaaggctccgtcggcgtgcgttcggatcatcgcgatgcccgcgcccgtgaggcgctgcaaggcgagcatgaagcccatgcggaagccgttgcccgcgaggaagaatggcgccagatcggccttggcgcgcagattttgaaggatctcggcgtttcctccatcgtgcttctggcctcgcgtgagcgccactatgtcggccttgaaggtttcggcatttgcatcacgcgtacggaaattatctaa

SEQ ID NO: 49275 - protein, 371 aa, Brucella suis 1330
MSYNQKQVVDAIRAFERGEIVVVMDDDGRENEGDLIVAAVHCTPEKMAFIVRHTSGIVCTPMTREEAKRLNLTPMVAENESAHTTAFTVTVDYRHGTTTGISAEDRTLTVRNLANPNAGASDFVRPGHIFPLVAREGGVLMRSGHTEAAVDLCKLANLPPIGVICELVNDDGTVKRGPDVAAFAEEHKLHRVTVADLIAYRQRKETLVRRIGDAPVETCAGKAHAYSYELPWEPMRHVAVVFGDIRDGEEVPVRLHREDVLNDVFGKGGSNLDAIMQRMGQEGRGILVYLREGSVGVRSDHRDARAREALQGEHEAHAEAVAREEEWRQIGLGAQILKDLGVSSIVLLASRERHYVGLEGFGICITRTEII

SEQ ID NO: 49276 - DNA, 1206 bp, Leptospira interrogans serovar Lai str. 56601
  CDS (1)..(1206): transl_table=11
atgattcaacccattgaaaatgcaatcgaagaaattaagtccggtaaaatgattatacttgtggattcggaagaccgggaaaacgaaggagaccttgtagttgcggccgaatttgcggataaagaaaaaatcaactttatggctgcttttgggcgtggtctgatttgtatacctatggaagtagaacgtcttaaaaaattaggactgaatcggatggtagacgattattccctaggagacaaacatggaactgcgtttactgtttcagtggacgccaaacacggaacttcgaccggaatttctgcacaggatagggcggttacggtccaagtccttttagatgataaaaccgtttctgccgatttgatgcgccctggccatttatttcctctacaagcggtacccggtggagttttaagaagggctgggcataccgaagctgctgtagatctgtcaaaacttgctggtttgtatccggcgggtgtaatttgcgaaattatgaacgacgatgggactatggcccgtttgcccgatttagaaaaatttgcagagaaacacggactgaatatttatacgatcgaagatttgatccgttatcgaagagccaaagaaaatttaattcgtttagaagtagaatctaaactaccgactgaatacggagagtttaccatccgagcgtattctactctgatagacgataagattcatatcgccttgatcaaaggagatattaaaaaagaagaaactataatggttcgggtgcatagcgaatgtttgactggagatattttttcgagtaatcgttgtgattgtggaccacagcttcatgccgctttggaaatgatttctaaagaagggaggggggttcttctttatatgagacaggaaggaagaggaattggtctgatcaataaattaaaagcttataatattcaagataagggatatgatacggtcgaagccaatgaaaaattaggctttgcaccggatcttagagattatggaattggagcccaaattttgagagaaataggtgtaggtaaaatgaagattttaacgaataatcctcgtaaaatcgtaggtttagatggttacggtttagaagtggtagaaagagttccgatcgaaattcaacccggttccgacaaccatgattatttgatgactaaaaaattaaagcttggtcatatgttaggtcttggttga

SEQ ID NO: 49277 - protein, 401 aa, Leptospira interrogans serovar Lai str. 56601
MIQPIENAIEEIKSGKMIILVDSEDRENEGDLVVAAEFADKEKINFMAAFGRGLICIPMEVERLKKLGLNRMVDDYSLGDKHGTAFTVSVDAKHGTSTGISAQDRAVTVQVLLDDKTVSADLMRPGHLFPLQAVPGGVLRRAGHTEAAVDLSKLAGLYPAGVICEIMNDDGTMARLPDLEKFAEKHGLNIYTIEDLIRYRRAKENLIRLEVESKLPTEYGEFTIRAYSTLIDDKIHIALIKGDIKKEETIMVRVHSECLTGDIFSSNRCDCGPQLHAALEMISKEGRGVLLYMRQEGRGIGLINKLKAYNIQDKGYDTVEANEKLGFAPDLRDYGIGAQILREIGVGKMKILTNNPRKIVGLDGYGLEVVERVPIEIQPGSDNHDYLMTKKLKLGHMLGLG

SEQ ID NO: 49278 - DNA, 1104 bp, Shewanella oneidensis MR-1
  CDS (1)..(1104): transl_table=11
atggcgctgcacagtatagaagagatcatcgaggatattcgtcaaggcaaaatggttattttgatggatgacgaggacagagaaaacgaaggcgatctgattttggcggccgaaatggtgacgccagaagcgattaactttatggcgaaatacggccgcgggttaatctgccaaacgatgaccaaggcccgttgccagcagttaaatctgcccttgatggtaaccaataacaatgcgcagttctcgaccaactttacggtatcgattgaagctgccgaaggcgtaaccacagggatttcggcccacgatcgcgctgtaaccgttaaagcggccgtagcaaaagatgctaaagcgtcggacttagttcagcctgggcatatcttcccgttaatggcgcaggatggtggcgtattaacccgcgcaggtcacactgaagcgggctgtgatttagcccgtttagcagggcttgaaccatcgggggtgattgttgaaattttgaacgaagacggcactatggcccgtcgcccagatttagagattttctctgaaaaacatggcattaaaatcggcactattgcggccctgattgaataccgtaataccaaagaaacgaccgttgtgcgtgaagccaaatgcaaactgccaacccgtttcggtgagttcgatatggtgacctttagggatactatcgacaatcaattgcactttgccttagtgaaaggcgaggtgaagcctgactgtttagtacgggtacatttacagaatacctttaacgatctacttcactctgagcgtgatcagcaacgtagctggccgctcgaaaaagcgatggcgcggatttctgccgaaggtggtgtattagtactgcttggcaatcaggaacattccagtgaaatcctcgccaaagtcaaagcctttgaagcggaagatcaaggtcagaccccagtatcggctaaatggcaaggcacctcacgccgtgtaggtgtgggttcgcaaatcctcgccagtttaggcgtgacaaaaatgcgactcttaagctcgcccaaacgttatcactcactttcaggctttggccttgaagtgaccgaatgcgtagctgagtaa

SEQ ID NO: 49279 - protein, 367 aa, Shewanella oneidensis MR-1
MALHSIEEIIEDIRQGKMVILMDDEDRENEGDLILAAEMVTPEAINFMAKYGRGLICQTMTKARCQQLNLPLMVTNNNAQFSTNFTVSIEAAEGVTTGISAHDRAVTVKAAVAKDAKASDLVQPGHIFPLMAQDGGVLTRAGHTEAGCDLARLAGLEPSGVIVEILNEDGTMARRPDLEIFSEKHGIKIGTIAALIEYRNTKETTVVREAKCKLPTRFGEFDMVTFRDTIDNQLHFALVKGEVKPDCLVRVHLQNTFNDLLHSERDQQRSWPLEKAMARISAEGGVLVLLGNQEHSSEILAKVKAFEAEDQGQTPVSAKWQGTSRRVGVGSQILASLGVTKMRLLSSPKRYHSLSGFGLEVTECVAE

SEQ ID NO: 49280 - DNA, 1194 bp, Streptococcus agalactiae NEM316
  CDS (1)..(1194): transl_table=11
atggcctttagtccaataaaaaaacttttacaagacatcaaatcagggaaaatggtagtgttgatggatgacgaaaatagagagaatgaaggagaccttatttgtgcggctgaaatggtgacaaaagagtcgattaattttatggctaaatttgggaaaggattaatttgcttacctctgtctaattactatgctgaaaagttagaattagctcaaatggctagccataatactgataatcatgaaacagcttttaccatatctattgatcatctatcaactagtactgggatttctgcggaagatagagctttgacagctaagatggttgctaacgacagtagcaaagctaaagactttagacgtcctgggcacttatttcccttgttagccaaggaaggaggtgttttagctagaaatggacatactgaagcaaccgttgatctatgtcgtttagctggattaaaggaatgtggactttgttgtgaaataatggctgaagatggtagtatgatgagaaaggatgagttattagcatttgctcaaaagcacgatttagctatcgctaccataaaacaattgcaagactatagacgtcaagaagagggaggggtggttagagaaattgagattcagctaccaacgcaattcggtcattttacggcttatggatatagcgaagttgtggcaaataaggaacatgttgcccttgttaaaggggatattagtagtggtgaagatgttttatgtcgtttacactcagaatgtttgacaggtgatgtctttcattccttgagatgtgattgtggggaacaactggctaatgccctccaacaaatagaggctgaaggtcgtggagtccttctttatatgagacaggaaggtcgaggaattggtttgattaataagttaaaagcttatcatttgcaagaagaaggcttagatactttagaagctaatttggctttaggttttgaaggagatgagagagactatggagttagtgctcaacttttaaaagatttaggtataaattctataaacttactaaccaataatccagataaaatccaacaacttgaagcagaaggaatttgcgtcaaaaacagagtgccattacaggtggcagcaacagcttatgaccttaattatttaaaaactaaaaaagaaaaaatgggacatcttttagattaa

SEQ ID NO: 49281 - protein, 397 aa, Streptococcus agalactiae NEM316
MAFSPIKKLLQDIKSGKMVVLMDDENRENEGDLICAAEMVTKESINFMAKFGKGLICLPLSNYYAEKLELAQMASHNTDNHETAFTISIDHLSTSTGISAEDRALTAKMVANDSSKAKDFRRPGHLFPLLAKEGGVLARNGHTEATVDLCRLAGLKECGLCCEIMAEDGSMMRKDELLAFAQKHDLAIATIKQLQDYRRQEEGGVVREIEIQLPTQFGHFTAYGYSEVVANKEHVALVKGDISSGEDVLCRLHSECLTGDVFHSLRCDCGEQLANALQQIEAEGRGVLLYMRQEGRGIGLINKLKAYHLQEEGLDTLEANLALGFEGDERDYGVSAQLLKDLGINSINLLTNNPDKIQQLEAEGICVKNRVPLQVAATAYDLNYLKTKKEKMGHLLD

SEQ ID NO: 49282 - DNA, 1305 bp, Corynebacterium efficiens YS-314
  CDS (1)..(1305): transl_table=11
ttgatgactgtgaccgagaacgccgtgactgagaacgccgcacagaacatccagctggacacagtggaggaagccatcgccgagatcgccgccggccgggcggtggttgttgtcgatgatgagaaccgggagaacgaaggcgatatcatcttcgccgccgaactcgccaccccggagctggtggccttcatggtccgttactcctccggttatatctgcacgccgatgacctcagaggacgcggaccgcctggacctgccgccgatgaccgcgcacaaccaggatgcccgcggcaccgcctacaccgtgaccgtggacgccaacaccggatccaccggtatctccgcaaccgaccgtgcgcacaccatccggctgctcgccgaccccaactccgaccgcaccgacttcacccggcccggacacgtggtgcccctgcgcgcccgcgagggcggtgtcctcgtgcgcgccgggcacaccgaggccgcggtggacctggcacgggccgccggtctgcgccccgccggtgtgatctgtgaggtggtcagtgaggaggaccccaccggcatggcccggctcccggagctgcgccggttctgtgacacccacggtctcaagctgatctccattgagcagctcatcgcctggcgacgccagaacgagatcctcgtcgagcgtgtcgtggagacgaaactccccaccgagatcggggagttcaccgcggtgggttaccgctccaaggtggatggcaccgaactcatggccatcgtcgagggtgacccatcctccgatggtggggagaacgtcctggtccgggtccattccgaatgcctcaccggtgatgtcttcggctcccgccgctgtgactgcgggcagcagctcaacgaatccctgcgcatgatccatgaggcaggtcgcggcgtggtggtctacatgcgcggacatgagggccgcggcatcggcctgctggccaagctgcgcgcctaccagcttcaggatgagggtgccgacaccgtcgatgccaacctttccctcggactgccggcggatgcccgggaattcggcaccggggcgcagatcctctacgacctgggtgtgcgctccatcaacctgatgagcaacaaccccaccaagcgcatgggactggagggccacggcatctccatcgccggccggacccccatccctgttcaggtgcatgaggacaatatccgttacctgcgcaccaaacgcgaccgcatggggcacatcctgcccgcgatcgatgaatgggacgcggcccacggtaacaccgacaagacgacctag

SEQ ID NO: 49283 - protein, 434 aa, Corynebacterium efficiens YS-314
MMTVTENAVTENAAQNIQLDTVEEAIAEIAAGRAVVVVDDENRENEGDIIFAAELATPELVAFMVRYSSGYICTPMTSEDADRLDLPPMTAHNQDARGTAYTVTVDANTGSTGISATDRAHTIRLLADPNSDRTDFTRPGHVVPLRAREGGVLVRAGHTEAAVDLARAAGLRPAGVICEVVSEEDPTGMARLPELRRFCDTHGLKLISIEQLIAWRRQNEILVERVVETKLPTEIGEFTAVGYRSKVDGTELMAIVEGDPSSDGGENVLVRVHSECLTGDVFGSRRCDCGQQLNESLRMIHEAGRGVVVYMRGHEGRGIGLLAKLRAYQLQDEGADTVDANLSLGLPADAREFGTGAQILYDLGVRSINLMSNNPTKRMGLEGHGISIAGRTPIPVQVHEDNIRYLRTKRDRMGHILPAIDEWDAAHGNTDKTT

SEQ ID NO: 49284 - DNA, 1110 bp, Pseudomonas putida KT2440
  CDS (1)..(1110): transl_table=11
ttgagaagggggtgccgcgtggcgctcaacagcatcgaagaactggtcgaagacatccgccagggcaaaatggtcatcctgatggatgacgaagatcgcgagaacgaaggcgacatcatcatggcggccgaatgctgccagccggagcacatcaacttcatggccaagcacgcccgtggcctgatctgcatgccgatgacccgcgagcgttgcgaaacgctgaagctgccgttgatggcgccgcgcaacggctcgggcttcggcaccaagttcaccgtgtcgatcgaggccgccgagggcgtcaccaccggtatttccgccgccgaccgcgcacgcactgtgcaggctgctgctgccaaggacgccaaggccgaagacattgtcagccctggtcacatcttcccgctgatggcccagccaggcggtacgctggcgcgtgccggccacaccgaagccgcctgtgacctggcgcgcatggccggtttcgagccaagcggcgtgatctgcgaagtgatgaacgacgacggcaccatgtcgcgccgcgccgaactggaagtgttcgccgccgagcacggcctgaagatcggcaccattgccgacctgatccactaccgcatgatccacgagcgcaccgtgcagcgtgtttccgagcaatcggtggagagcgagctgggtgagttcaacctggtcacctaccgtgatgcggtcgaaggcgacgtgcacatggccttgaccctgggcaagatctgcgcggaagaaccgaccctggtgcgcgtgcacaacatggacccgctgcgcgacctgctgctggtcaagcagccaggccgctggagcctgcgcgcggccatggccgcagtggccgaggccggcagtggtgtggtgttgctgctggggcacccgctggacggcgacgtgctgctggcgcacatccgcgaaagcgcgggcgatgcgccggccaaggcaccgaccacctacagcactgtgggtgccggttcgcagatcctgcgtgacctcggtgtgcgcaagatgcgcctgatgagttcgccgatgaagttcaacgcgatatccggattcgatctggaagttgtagaatacgtgccctccgagtga

SEQ ID NO: 49285 - protein, 369 aa, Pseudomonas putida KT2440
MRRGCRVALNSIEELVEDIRQGKMVILMDDEDRENEGDIIMAAECCQPEHINFMAKHARGLICMPMTRERCETLKLPLMAPRNGSGFGTKFTVSIEAAEGVTTGISAADRARTVQAAAAKDAKAEDIVSPGHIFPLMAQPGGTLARAGHTEAACDLARMAGFEPSGVICEVMNDDGTMSRRAELEVFAAEHGLKIGTIADLIHYRMIHERTVQRVSEQSVESELGEFNLVTYRDAVEGDVHMALTLGKICAEEPTLVRVHNMDPLRDLLLVKQPGRWSLRAAMAAVAEAGSGVVLLLGHPLDGDVLLAHIRESAGDAPAKAPTTYSTVGAGSQILRDLGVRKMRLMSSPMKFNAISGFDLEVVEYVPSE

SEQ ID NO: 49286 - DNA, 1122 bp, Pseudomonas putida KT2440
  CDS (1)..(1122): transl_table=11
atggctttcaacaccatcgaggaacttctcgaggactaccggcaaggcaagatggtcctgctggtggatgacgaggaccgggaaaacgagggcgatctgctgatcgccgccgagcgctgcgacgcccaggccatcaacttcatggctcgcgaggcgcgcgggctgatctgcctgaccttgaccgacgatcactgccagcgcctgggcctggagcagatggttccggccaacggtagcgtgttcagcaccgcgttcaccgtgtcgatcgaggcggccaccggggtcaccaccggcatttccgccgctgaccgggcacgcaccgtggcagcggccatggcccccaacgcccgccccgaagacctggtgcaacctggccacatcttccccctgcgcgcccgcgaaggcggcgtgctgacccgtgccggccacaccgaagcaggctgcgacctggcacgcctggccggcttcagcccggcctcggtcatcgttgaagtgctgaacgacgacggcaccatggctcgccgccccgacctggaagtgttcgccgcccggcatggcatcaagattggcaccatcgccgacctgatccactaccgcctgagcaccgagcagaccgtcaagcgcatcggcgagcgcgagctgccgacggtgcatggcaccttccgcctggtcacctatgaagaccgcatcgaaggtggcgtgcacatggccatggtcatgggcgacattcgccgcgaacagccgaccctggtgcgggtgcatgtgattgacccgctgcgcgacctggtgggcgccgagtacgccggccccgccaactggacgctgtgggcggcgctgcagaaggtggctgaggaaggtactggcgtggtggtgatcctggccaaccacgaatcctcccaggccttgcttgagcgtgtgccacaactgacccaccctgtgcggccctatcaacgtggccagtccaaggtgtattccgaagtgggtaccggggcgcagattctgcaggaccttggcgtgggcaagctgcgtcacctggggccgccgctgaaatacgcggggctggcgggctatgagctggaggtggtgcagagcatcccgttcgacccggggatggatggctga

SEQ ID NO: 49287 - protein, 373 aa, Pseudomonas putida KT2440
MAFNTIEELLEDYRQGKMVLLVDDEDRENEGDLLIAAERCDAQAINFMAREARGLICLTLTDDHCQRLGLEQMVPANGSVFSTAFTVSIEAATGVTTGISAADRARTVAAAMAPNARPEDLVQPGHIFPLRAREGGVLTRAGHTEAGCDLARLAGFSPASVIVEVLNDDGTMARRPDLEVFAARHGIKIGTIADLIHYRLSTEQTVKRIGERELPTVHGTFRLVTYEDRIEGGVHMAMVMGDIRREQPTLVRVHVIDPLRDLVGAEYAGPANWTLWAALQKVAEEGTGVVVILANHESSQALLERVPQLTHPVRPYQRGQSKVYSEVGTGAQILQDLGVGKLRHLGPPLKYAGLAGYELEVVQSIPFDPGMDG

SEQ ID NO: 49288 - DNA, 1110 bp, Vibrio vulnificus CMCP6
  CDS (1)..(1110): transl_table=11
atgccaatcagtacaccccaagagatcattgaagacattcgtttgggcaaaatggtcatcttaatggacgatgaagaccgcgaaaacgaaggtgatttgattatggcggcggagcacattacgccagaagccatcaattttatggccaaatatggtcgcggtttgatctgtttgactatgaccaaagagcgttgccagcgtcttggattaccaccaatggtgcaagataacaacgcgcaatacactaccaacttcaccgtttccattgaagcggcggaaggcgtgacaaccggtatttcagcagcggatcgtgctcgtaccgtgcaagcggcagtcgcaaaagaagctaaagcggcagacttggtgcaaccggggcacattttcccattagccgcgcaagatggtggcgtgttgactcgcgcggggcatactgaggcgggctgcgaccttgctcgtttggcgggtttcgaaccagcctctgttatcgttgaaattctgaatgacgatggcaccatggcgcgccgccctgatttggaagtgtttgctgagcagcatggtctcaaacttggcaccattgccgatttgattgagtatcgaaacaacacggaaaccacgattgagcgcgttgctgagtgcaagctacccactgagtttggtgagtttgatctcgtgacctaccgcgacaccattgataatcaaattcactttgctttgcgtaaaggtacgatgggtgatcaaacaccactggttcgtgttcacttacaagacacctttaccgatttactgcgcagcgatcgcaatgctgagcgcagttggacgcttgataaagcgatgaagcgtattggccaagaagggggcgttttggtgattctagggaatgaagagtcgcctgagctgctgatccatcgcgtcaaaatgtttgaagctcaagacaaagaagaggcgcctaaattggctaagaagcagggcacttcacgtcgtgttggtgtcggctcgcaaattcttgcagacttaggtgtgcacgacatgcgtctactttcttccagcaacaagaaataccatgcccttggcggttttggtttgaatgttgttgagtatgtgtgtgaataa

SEQ ID NO: 49289 - protein, 369 aa, Vibrio vulnificus CMCP6
MPISTPQEIIEDIRLGKMVILMDDEDRENEGDLIMAAEHITPEAINFMAKYGRGLICLTMTKERCQRLGLPPMVQDNNAQYTTNFTVSIEAAEGVTTGISAADRARTVQAAVAKEAKAADLVQPGHIFPLAAQDGGVLTRAGHTEAGCDLARLAGFEPASVIVEILNDDGTMARRPDLEVFAEQHGLKLGTIADLIEYRNNTETTIERVAECKLPTEFGEFDLVTYRDTIDNQIHFALRKGTMGDQTPLVRVHLQDTFTDLLRSDRNAERSWTLDKAMKRIGQEGGVLVILGNEESPELLIHRVKMFEAQDKEEAPKLAKKQGTSRRVGVGSQILADLGVHDMRLLSSSNKKYHALGGFGLNVVEYVCE

SEQ ID NO: 49290 - DNA, 1056 bp, Vibrio vulnificus CMCP6
  CDS (1)..(1056): transl_table=11
atggagcaaccgatttatttctatgagccagatgaaaatcatggctttctcgccaacttctatccatgctcgatcaccgtttctgggacgtgctggccgagcagtgaacattactaccaagcacaaaaattcgacgatgtccggctacaggaaaaagtgttgagggcagaagatgctgcacaagcttttcggctttcacgcgaatatcagcagtggcaaaggcatgactggtatgacattcgagtagaagtgatgagattcattgtgcgcgagaaatttttgcaaaacacgcccctagcgcatcaactgcttgcgacgggagatactgaactgaaagaacattcgcataaggatgccttttggggggatgggggcgatgggcatggacgcaatgagctcgggcgtattttgatgatggttcgagaggagttgcaagagcacgcgccatacaatctggtgcagtttattgacagtgcgaagttgcctacccagtgggggacatttcaaatgtatggtttcattgaaaaagccaccgggaaagagcatttggcgctcgtgtatggggatattgaacaacaggcagcgcctttgattcgtctgcactctgagtgtttaacaggcgatgcgctgtttagtgcccgctgtgattgcggttttcagctcgccaaagccttgcaaaacatcgtggcagaaggggcgggcgtgttgctctatttgcggcaggaagggcgggggataggccttatcaataaaattcgcgcttatcacttacaagatgacggggccgacacggtggaagctaacgagcaacttggctttggcgccgatatgcgcgattacgcgttttgtcgcggcattctcagttttctcggcattgaacgtgtgaggctgatgaccaacaacccacgcaaggtgaaggcactgcaattggccaatattgaggtgacggagcgcgtgccgctgcaagaaggcaataatccgcacaatcatcagtatttaagaaccaaagccgataagctaggccacatgtttgatcgcaacttcgttaaaccttag

SEQ ID NO: 49291 - protein, 351 aa, Vibrio vulnificus CMCP6
MEQPIYFYEPDENHGFLANFYPCSITVSGTCWPSSEHYYQAQKFDDVRLQEKVLRAEDAAQAFRLSREYQQWQRHDWYDIRVEVMRFIVREKFLQNTPLAHQLLATGDTELKEHSHKDAFWGDGGDGHGRNELGRILMMVREELQEHAPYNLVQFIDSAKLPTQWGTFQMYGFIEKATGKEHLALVYGDIEQQAAPLIRLHSECLTGDALFSARCDCGFQLAKALQNIVAEGAGVLLYLRQEGRGIGLINKIRAYHLQDDGADTVEANEQLGFGADMRDYAFCRGILSFLGIERVRLMTNNPRKVKALQLANIEVTERVPLQEGNNPHNHQYLRTKADKLGHMFDRNFVKP

SEQ ID NO: 49292 - DNA, 1182 bp, Staphylococcus epidermidis ATCC 12228
  CDS (1)..(1182): transl_table=11
atgcaattcgatacaattgagttggctatagaggctttaagaaatggagagagcattattgtagttgacgatgaagatagagaaaatgaaggagatcttgtagctgttacggaatggatggatgataataccattaattttatggctaaagagggtcgtggtctgatttgtgcaccaattgataaatctatagctgaaagattaaaactacaatctatggagcaaaataacactgatatttatggcacacattttactgtaagcattgatcattataaaactactacaggaatcagtgcacatgaacgtacacaaacggctagagcactcatagatgaaaatactaatcctgaagattttcatcgtccggggcacttatttccacttatagcaaaagagaatggtgtgttaacacgtaatggtcatactgaagctgccgtagatttggcacggttaacaggagcacaaccagctggagtaatctgcgaaattatgaatgatgatgggacaatggctaagggtgaagatctccagtcatttaaagaacgccaccatttaaaaatgattactataaaaagtttggttgcttttcgtaaggctgttgaacttaatgttaatcttaaggcaaaggtcaagatgccaactgattttggtcattttgatatgtatggatttacaacggattatagcgatgaagaaatcgtagctattgttaaaggagatttaaaaagcaatcctaatgtacgtatgcattctgcttgtctgactggggatatttttcatagtcaaagatgtgattgcggggcacaacttgaagcgtcaatgaaatatattgacgaacatggtggaatgattatttatttacctcaagaaggtagaggaatagggttaattaataagttgcgcgcatatgagttgatagaaaaaggttatgatacagttactgcaaatcttgctcttggttttgatgaggatttgagagattatcatgttgcagctgaaatattaaagtattttgatataagtgaaattaacttgctcagcaataatcctaaaaaatttgaaggtttagaagattacggcattgagatcgtagatagaattgaacttatcgttccagaaacacaatataaccatagttatatggaaactaaaaaaaataaaatgggacatttaatatag

SEQ ID NO: 49293 - protein, 393 aa, Staphylococcus epidermidis ATCC 12228
MQFDTIELAIEALRNGESIIVVDDEDRENEGDLVAVTEWMDDNTINFMAKEGRGLICAPIDKSIAERLKLQSMEQNNTDIYGTHFTVSIDHYKTTTGISAHERTQTARALIDENTNPEDFHRPGHLFPLIAKENGVLTRNGHTEAAVDLARLTGAQPAGVICEIMNDDGTMAKGEDLQSFKERHHLKMITIKSLVAFRKAVELNVNLKAKVKMPTDFGHFDMYGFTTDYSDEEIVAIVKGDLKSNPNVRMHSACLTGDIFHSQRCDCGAQLEASMKYIDEHGGMIIYLPQEGRGIGLINKLRAYELIEKGYDTVTANLALGFDEDLRDYHVAAEILKYFDISEINLLSNNPKKFEGLEDYGIEIVDRIELIVPETQYNHSYMETKKNKMGHLI

SEQ ID NO: 49294 - DNA, 1257 bp, Bradyrhizobium japonicum USDA 110
  CDS (1)..(1257): transl_table=11
atgagccgcgcgaaccgtaccgatcacatccgcctgacctcccatccggagccgggcaggaaggccgcttttccgatccattggggcgcagccgatgcgcgcacccgcgggccgatcatcgggacggtgtcgcgcgctggggatcgcaacgtgatcggcagccatggcggctcctacgcgatgtaccgcgcgctcgccgtctccgccggggcgctcgatcccatcaggcgtcccgacctcaccaacacgtttccggcagccaccatcgggccgtttccgcaatggaacgatccggccaagatcgtcgcgctcgacccctgggggcatctcgtcgccgagaattttggcaaggagatcgccgagggctccgacatccggccgagcatcgcggtgacgcgcgcccggctcgacctgcccgagatccgcgaggcgctggccgcaaaacggctgcgcgccgacggcgaggtcgtgcatgccaatggcagcgtgtcggtggtgaagatcgcgatcgatccggtctggtatctgccgggcctcgccacgcgcttcggcaccggcgagaccgagctgcgccgcacgctgttcgagcagaccgccggcatgttcccggagctggtgacgcggccggacatgaaggtgttcctgccgccgatcggcggcaccacagtctacatgttcggcgacgtcagcaagctgcccgaccatcgcaccaagatcacctgccgcgtccatgacgagtgcaacggctccgacgtgttcggctccgacatctgcacctgccggccctatctcatccacggcatcgaggaatccgcgcgcggcgcgcaggagggcgggctcgggctcgtcgtctacaaccgcaaggaaggccgcgcgcttggcgaggtcacgaaattcctggtctacaacgcccgcaagcgccaggaggacggcgatgccgccgccgcctatttcgagcggaccgaatgcgtcgccggcgtgcaggacgcgcgcttccagcaattgatgccggataccatccactggctggggctgaagcgcatcgaccgcttcctgtcgatgagcgacatgaagcacgacgcgctgacctcgcagggcatcgacatcgtcgagcgcgtgccgatcccgccggagctgattccagccgacgcctatgtcgagatcgcggccaagaaggctgccggctactactcgaccgacatcgcgccggagaaggacgtcaacggcgtggtcgggcgttcgctggaaaaatactga

SEQ ID NO: 49295 - protein, 418 aa, Bradyrhizobium japonicum USDA 110
MSRANRTDHIRLTSHPEPGRKAAFPIHWGAADARTRGPIIGTVSRAGDRNVIGSHGGSYAMYRALAVSAGALDPIRRPDLTNTFPAATIGPFPQWNDPAKIVALDPWGHLVAENFGKEIAEGSDIRPSIAVTRARLDLPEIREALAAKRLRADGEVVHANGSVSVVKIAIDPVWYLPGLATRFGTGETELRRTLFEQTAGMFPELVTRPDMKVFLPPIGGTTVYMFGDVSKLPDHRTKITCRVHDECNGSDVFGSDICTCRPYLIHGIEESARGAQEGGLGLVVYNRKEGRALGEVTKFLVYNARKRQEDGDAAAAYFERTECVAGVQDARFQQLMPDTIHWLGLKRIDRFLSMSDMKHDALTSQGIDIVERVPIPPELIPADAYVEIAAKKAAGYYSTDIAPEKDVNGVVGRSLEKY

SEQ ID NO: 49296 - DNA, 1197 bp, Xylella fastidiosa Temecula1
  CDS (1)..(1197): transl_table=11
atgaatactcccacacacactcacccacatccgttcggctccacggcaacgatccgctgcgaacgtgccgctgccgaactgcgtactggtcggcctgtcctgttgattgatgctcatgcgcgtcggcatgcggtcatggctctggatagcatgaccgctcaaagctttgcgacatttgcgaacgctgtcggcaacactcactacctattcctgactccagtacgctccaacgtgctcggcctggaggctccccaaggcgcacgcatcccactggcgaccctgtcctacgacagcctggccaagctcgcctacctgcgtcagccaacacgcccaacagcatgggcgcctggagacatcatggatgcagcagcgacagagatcactcgacttgccctgctcctgccagcaatcgtcgccgccccattaacccagcataccgaacatgcctttgcagattgccaaacacttgacttagcagatctcgataccgctgccgcgtgcgcctccacaacagagtacgaattggtcacacgtactccggtgccactacgtgatctaggcatgagcgaattcatcgtattccgtggtggcattgcacagcgcgaccaagttgcgatcctgatcggtcgacccgacctaagcagtgcagtccccgtgcgcgtgcattcctcctgcctaaccggtgacctctttggctcgctcaagtgtgactgcggcgaccaattgcgtcatagcttggccacactaaaagcccttggcggtggtgtgctgctgtacttggaccaagaaggacgtggaaacggaattgccgcaaaaatacgcgcctacggctaccaacatgtaggactggatacgatcgacgcagatgcacagctcggattcggtccggacgaacgccgctacaccggtgcagtgatgatgctacgcgcgctaggcatcacccggatacaactgctatccaataatcccgcaaaagcagagcgcttacgcgcggcaggaatcatcgtcaagcaacgcatctcggtgataggacagatcaccaaacagaacgaacactacctgcgcaccaaagtcagccgtgccggccacgacctggacatagatgccttaatcatgacatcacagagacctcaagacccatcggaaactgtcgatggagagaccgtaaaacccatcgcaaaaaccggccacgcataa

SEQ ID NO: 49297 - protein, 398 aa, Xylella fastidiosa Temecula1
MNTPTHTHPHPFGSTATIRCERAAAELRTGRPVLLIDAHARRHAVMALDSMTAQSFATFANAVGNTHYLFLTPVRSNVLGLEAPQGARIPLATLSYDSLAKLAYLRQPTRPTAWAPGDIMDAAATEITRLALLLPAIVAAPLTQHTEHAFADCQTLDLADLDTAAACASTTEYELVTRTPVPLRDLGMSEFIVFRGGIAQRDQVAILIGRPDLSSAVPVRVHSSCLTGDLFGSLKCDCGDQLRHSLATLKALGGGVLLYLDQEGRGNGIAAKIRAYGYQHVGLDTIDADAQLGFGPDERRYTGAVMMLRALGITRIQLLSNNPAKAERLRAAGIIVKQRISVIGQITKQNEHYLRTKVSRAGHDLDIDALIMTSQRPQDPSETVDGETVKPIAKTGHA

SEQ ID NO: 49298 - DNA, 1209 bp, Clostridium tetani E88
  CDS (1)..(1209): transl_table=11
gtggtaaaaatgtttaagtttaatagtattgaagaggctattgctgatataaaagaaggaaaaatggttattgtggtagatgatgaggatagggaaaatgagggggatcttttaatggcagcagaaaaagtaactcctgaaaatattaattttatgattaaatatggaagaggattagtgtgcatgcctataattggagaaagattaaaggaattaaaccttaatcaaatggtagatataaatacagatacaaatggaacagcttttacagtctccatagacttcatagatactactacaggtatttcagcttatgaaagggctcataccatatcaaaagtattagatagcagtgtaaagggagaggactttaaaagaccaggacatgtttttccattagaagcaaaagaaggtggggtattaaaaagagcaggacatactgaagcttctgtagatctagcaaggcttgcaggattttatccagcaggagtaatttgtgagattgtaggggaagatggaaagatggcaagactccctcaattaatggagtattctaaggaacataatttaaaaattataaatatagcagatttaatagcttatagaagaaagaaagaaactctagtaaaaagagttgtagaagctaaaatgccaacaagatggggagaatttaaaataataggctatgaaaacaaaataaatggtgagcaccatgtagcccttgtaatgggagatatagaaaatggagaagatgtattagttagaatgcattcagaatgtcttacaggagatgctctaggctctgtaagatgtgattgtgggtatcaatatgaagcagctatgaaagctataagtgaagagagaagaggagtactagtatacatgcgccaagaaggaagaggtatagggcttattaacaaattaaaggcttataatcttcaagacaagggcatggatactgtggaagctaatattgccttaggttttccacctgatttaagagattatggaataggagctcaaatattaaatgatttaggaattaaaaagataaatcttatgacaaacaatcctaaaaaaataacttcattatctggttatggaataaaaatagtaaaaagagttccactagaaattcatgaaaatgaggaaagtgaattttacctaaaaactaaaaaagaaaaaatgggtcatttattacatttttaa

SEQ ID NO: 49299 - protein, 402 aa, Clostridium tetani E88
MVKMFKFNSIEEAIADIKEGKMVIVVDDEDRENEGDLLMAAEKVTPENINFMIKYGRGLVCMPIIGERLKELNLNQMVDINTDTNGTAFTVSIDFIDTTTGISAYERAHTISKVLDSSVKGEDFKRPGHVFPLEAKEGGVLKRAGHTEASVDLARLAGFYPAGVICEIVGEDGKMARLPQLMEYSKEHNLKIINIADLIAYRRKKETLVKRVVEAKMPTRWGEFKIIGYENKINGEHHVALVMGDIENGEDVLVRMHSECLTGDALGSVRCDCGYQYEAAMKAISEERRGVLVYMRQEGRGIGLINKLKAYNLQDKGMDTVEANIALGFPPDLRDYGIGAQILNDLGIKKINLMTNNPKKITSLSGYGIKIVKRVPLEIHENEESEFYLKTKKEKMGHLLHF

SEQ ID NO: 49300 - DNA, 1215 bp, Lactobacillus plantarum WCFS1
  CDS (1)..(1215): transl_table=11
atggatacaatgaaaaaggtagcagcggccttggccgcattaaaacggggcgaattgattattgttgcggatgatgagacgcgtgaagcggaaggagacatggttggcctagccgctaaagcaaccactgcgacagtgaatcggatgattacatcagcgcggggactactctgtgttccgatggcgccaagtatcgccacgcgactacatttgacaccgatgactagtgaacacgatgcgtttggaacggcatttacagtctcaacggatcaccatacgacgtccacgggaatctcggcagctgatcgggcgaccacgattcaagcgttagccaatcccaatagtcaggccgctgatttctatcatcccgggcacgtttttccattgattgcgcggactggtggattgttagcgcggcgtggtcatactgaagcggccgtcacgttagcacaattagcaggtgtgacccccgcggcctatatttgtgaagttatcaagaaaaatggcttaatggcgcggcgccgtgatctcaaagctttggcagagggcttacaattaccgctaatcaccattgaagatattaccacctacgtgattcaaacgggtgccgcccagctaacaacgaccccgagtgtcaacttaccgaccaaggatggtcagttcacgatgactggtttcgaagtccccggtcatacggcgttgccagtggcactgcaagctggtgatatcagtggcgatgaaccagtgttagtgcggttacactctgaatgttttacgggcgatgttttaggatcgcggcggtgtgactgtggtgatcaattacacgctgcactccaaaaaatcagtcaagctcagcgcggtgttttcgtctatttacggcaagagggtcgcggtattggcttggctaacaaactagcagcttacgcactccaagaacacggggttgatacgtatgatgcgaacgtgcagttgggctttcaaccggatgagcgccggtatgatattgcggcattagtgctacgccaaatggggattacacgggttcgtttgctgactaataatcctgacaaggttgagcagttacgtgcagcggggattgatgttgttgaacgggtccccttagaaataccagccaatcagtacgatcaagcttacttaaaaacaaaacgtgatcgatttcatcatcaactcacactaacggagggacacgaatga

SEQ ID NO: 49301 - protein, 404 aa, Lactobacillus plantarum WCFS1
MDTMKKVAAALAALKRGELIIVADDETREAEGDMVGLAAKATTATVNRMITSARGLLCVPMAPSIATRLHLTPMTSEHDAFGTAFTVSTDHHTTSTGISAADRATTIQALANPNSQAADFYHPGHVFPLIARTGGLLARRGHTEAAVTLAQLAGVTPAAYICEVIKKNGLMARRRDLKALAEGLQLPLITIEDITTYVIQTGAAQLTTTPSVNLPTKDGQFTMTGFEVPGHTALPVALQAGDISGDEPVLVRLHSECFTGDVLGSRRCDCGDQLHAALQKISQAQRGVFVYLRQEGRGIGLANKLAAYALQEHGVDTYDANVQLGFQPDERRYDIAALVLRQMGITRVRLLTNNPDKVEQLRAAGIDVVERVPLEIPANQYDQAYLKTKRDRFHHQLTLTEGHE

SEQ ID NO: 49302 - DNA, 636 bp, Tropheryma whipplei str. Twist
  CDS (1)..(636): transl_table=11
atgatggggaatatggataagggtctagattcgcaaaaacaagaaactgctcgcagctgcagatttgaggttgaaacaaatcttccaacaaaatttggaaccctcagggtacgtggctatcgggatataaaaaataacgagcatatcgcactgattacaaagcaaattaagagtgaggatgttttgctcagaattcactcagaatgtataacgggagaagtatttatgtctctgaagtgtgattgtcatgggcaattgcacaaagcccttgagcggatcagtgcagaaggcggacttgttatatatatgagggggcacgaaggtcgcggtataggtatcttgaataaattgcgagcatacagattgcaagagcagggccttgatacattcgactcaaacgtgaagctgggccttcctgttgatgccagggattatggacctgctgcagaaatactgcacgatctgggtgtgcgctcagtaaggcttctaagtaataatccagataaacagctgcaacttgaacaatccgggatacgcgtcacgggggtgctgccctggcaagttgggcttggtaaatgcaatcatgaataccttaaagtaaaacgcgacaaaatgggtcataaaatcgagttatag

SEQ ID NO: 49303 - protein, 211 aa, Tropheryma whipplei str. Twist
MMGNMDKGLDSQKQETARSCRFEVETNLPTKFGTLRVRGYRDIKNNEHIALITKQIKSEDVLLRIHSECITGEVFMSLKCDCHGQLHKALERISAEGGLVIYMRGHEGRGIGILNKLRAYRLQEQGLDTFDSNVKLGLPVDARDYGPAAEILHDLGVRSVRLLSNNPDKQLQLEQSGIRVTGVLPWQVGLGKCNHEYLKVKRDKMGHKIEL

SEQ ID NO: 49304 - DNA, 1092 bp, Pseudomonas syringae pv. tomato str. DC3000
  CDS (1)..(1092): transl_table=11
gtggcgctcaataatatcgaagaactggttgaagacatccgccagggcaagatggtcatcctcatggatgacgaagaccgcgagaacgaaggcgacctgatcatggccgccgaatgcgtcaagcctgagcacatcaacttcatggcgcgtttcgcccgtggcctgatctgcatgccgatgacccgcgagcgctgcgaaaccctcaagctgccgctgatggcgccgcgcaacggctccggtttcggcaccaagttcaccgtctccatcgaagctgccgaaggcgtgaccaccggtatttccgcagccgaccgtgcgcgtaccgtgcaggccgccgctgccaaagaagccaaagccgaagacatcgtcagcccggggcacatcttcccgctgatggctcaggccggtggcactctggctcgcgccgggcataccgaagcggcgtgcgatctggcgcgcatggccgggttcgagccgacggggctgatctgcgaagtcatgaacgacgacggcaccatgtcgcgtcgcgccgaacttgaagaatttaccctgcaacacgacatcaagatcggcaccatcgccgacttgatccactaccggatgatccacgaacgtaccgttcagcggattgccgagcagccgatggacagcgaactgggcagtttcaacctggtgacctaccgtgattcggtcgagggcgatgtgcatctggcgctgaccctgggcaagatctgcgcagaagagccgaccctcgtacgcgtccacaatatggacccgttgcgcgacctgctgatggtcaaacagcccggccgctggagcctgcgcgccgccatgcgtgcggttagcgaggcgggcagcggtgttgtgctgttgcttggtcaccccctggatggcgatgtattgctggctcatatccgcgaaaccgcagggcagcaaccgatcaagacgccgaccacttacagcacggtgggtgccggttcgcagatccttcgtgacctcggtgtgcgcaaaatgcgcctgatgagttcgccaatgaagttcaatgcgatatccggtttcgatctggaagttgtagaatacgtgccctccgaataa

SEQ ID NO: 49305 - protein, 363 aa, Pseudomonas syringae pv. tomato str. DC3000
MALNNIEELVEDIRQGKMVILMDDEDRENEGDLIMAAECVKPEHINFMARFARGLICMPMTRERCETLKLPLMAPRNGSGFGTKFTVSIEAAEGVTTGISAADRARTVQAAAAKEAKAEDIVSPGHIFPLMAQAGGTLARAGHTEAACDLARMAGFEPTGLICEVMNDDGTMSRRAELEEFTLQHDIKIGTIADLIHYRMIHERTVQRIAEQPMDSELGSFNLVTYRDSVEGDVHLALTLGKICAEEPTLVRVHNMDPLRDLLMVKQPGRWSLRAAMRAVSEAGSGVVLLLGHPLDGDVLLAHIRETAGQQPIKTPTTYSTVGAGSQILRDLGVRKMRLMSSPMKFNAISGFDLEVVEYVPSE

SEQ ID NO: 49306 - DNA, 666 bp, Pseudomonas syringae pv. tomato str. DC3000
  CDS (1)..(666): transl_table=11
atgcaaatcttgcgaatttccagtcttcatactgatcaggagcacacggtgcccgtcgtatttgtcgccgcttccaaactgcccacaccctttgcagaatttgccatgcacggctttatcgagtcagcaaccggccgtgaacacgttgtcctgagcctgggcgatgtagcggatggcgctccggttcttggccgggtgcactccgaatgcctgaccggtgatgcactgttcagtcagcgttgcgattgcggctctcaactggaagccgccatgcgcgccattgctaccgaggggcgcggcgtattgctgtatctgcgtcaggaagggcgcggcatcggcctgatgaacaagatccgcgcctacgagctgcaggacggcggggccgatacggtcgaagccaacgagcgtcttggttttgccgccgaccagcgcgactacgccatctgcctgccgatgcttcagcatctgggtgtgcagtcgctgcgcttgatgaccaacaacccgcgtaaagtcaaagcgctgaccgacatgggcatcaatgtcgccgagcgtgtgccgctgcacactgggcaaaacccgcacaatcgcctttatctggcgaccaaggccggcaagttggggcacatgatgggtaacgaacaccaaagcgaggtcggccccgcgtga

SEQ ID NO: 49307 - protein, 221 aa, Pseudomonas syringae pv. tomato str. DC3000
MQILRISSLHTDQEHTVPVVFVAASKLPTPFAEFAMHGFIESATGREHVVLSLGDVADGAPVLGRVHSECLTGDALFSQRCDCGSQLEAAMRAIATEGRGVLLYLRQEGRGIGLMNKIRAYELQDGGADTVEANERLGFAADQRDYAICLPMLQHLGVQSLRLMTNNPRKVKALTDMGINVAERVPLHTGQNPHNRLYLATKAGKLGHMMGNEHQSEVGPA

SEQ ID NO: 49308 - DNA, 1110 bp, Vibrio parahaemolyticus RIMD 2210633
  CDS (1)..(1110): transl_table=11
atgccaatcagtacaccacaagaaattattgatgatattcgcgcaggcaaaatggtcatcctaatggatgatgaagaccgtgagaatgaaggtgacttgatcatggctgccgagcatattacgccggaagcgatcaactttatggcgacttacggtcgtggcttgatctgtctgaccatgactaaagcgcgttgtgaaaatctcggcttgccgccaatggtgcaagacaacaacgcgcagtacaccactaactttactgtttctattgaagctgctgaaggcgtaaccacgggtatttcagcggctgaccgcgcacgtaccgttcaagctgcggttgcgccaaacgcaaaagcggcagacttggttcaaccggggcatattttccctcttgctgcgcaagatggtggtgtattgactcgcgctggtcacaccgaagcgggttgtgatttagctcgccttgcggggcttgagcctgcttctgtgattgttgagattctaaacgacgacggcaccatggctcgccgccctgatcttgaaatctttgctgaaaaacacggcttgaagttaggcactattgcggaccttatcgaataccgcaacaacacagaaacgaccattgagcgtgtagcagaatgcaaactgccaactgaacacggtgagttcactttggtgacttacaaagacaccatcgatagtcaagtgcattacgcgatgtgtaaaggtgatttggccggcgaagcgccgctggttcgtgtgcatctacaagacgtattcaccgatgtattacgcagtgaccgcaatgcagagcgcagctggacacttgataaagcgatgaagcgtatcggtgaagaaggcggtgttctggttgtacttggcaatgaagaatcaaccgagttgctcatccaccgcgtgaaaatgttcgaagcgcaagataaaggcgaagcacctactttagcgaaaaagcagggcacgtctcgccgcgtgggagtggggtcgcaaattctcgcagaccttggtgttcacgatatgcgtcttctgtcttcgaccaacaaaaaataccatgcattgggcggtttcggcctgaacgtggttgaatacgtttgcgaataa

SEQ ID NO: 49309 - protein, 369 aa, Vibrio parahaemolyticus RIMD 2210633
MPISTPQEIIDDIRAGKMVILMDDEDRENEGDLIMAAEHITPEAINFMATYGRGLICLTMTKARCENLGLPPMVQDNNAQYTTNFTVSIEAAEGVTTGISAADRARTVQAAVAPNAKAADLVQPGHIFPLAAQDGGVLTRAGHTEAGCDLARLAGLEPASVIVEILNDDGTMARRPDLEIFAEKHGLKLGTIADLIEYRNNTETTIERVAECKLPTEHGEFTLVTYKDTIDSQVHYAMCKGDLAGEAPLVRVHLQDVFTDVLRSDRNAERSWTLDKAMKRIGEEGGVLVVLGNEESTELLIHRVKMFEAQDKGEAPTLAKKQGTSRRVGVGSQILADLGVHDMRLLSSTNKKYHALGGFGLNVVEYVCE

SEQ ID NO: 49310 - DNA, 1107 bp, Vibrio parahaemolyticus RIMD 2210633
  CDS (1)..(1107): transl_table=11
atgccttttgttgactatccatatcatctaagcaggagcgcgaatatggttgatcagatccttttctacgagcccgatgagccgcacggcttcctctccaacttctgtcatgcccccgtcgaaatatcttcccaatcttggcccaccagcgaacactactatcaagctcagaaatttgttgatgcccaactgcaaaccaaaattcagaaagcccaatcgccggatgaagcgttcgcgttaagccgtcagtacgagcatctcgttcgcagcgattgggacaacatgaagctctcagttatggcgttcattgtgcgagaaaaattcctccaaaacccgaaacttgctcagaaactgatgcgcacgggcaatgcttgccttaccgagcattcgcacaaggacgcattttggggagatggaggagacggtaaaggtttgaatcacctaggagaaattctgatgaacgtacgcgcagagctgcgacatgtcgagccttacaatttggttaagttcatcgacaaagctaagctgccaactcagtggggcacattcatgatgcacggcttcatcgagacggctacagggaaggagcatctcgcgctggtgtatggcgacccgacgtctcagcctgcgccattgattcggctccattctgaatgtctcactggggacgcactatttagcacccgctgcgattgcggttttcagttaaatcgtgcgttgcaaaacatcgtcgaagagggctgcggcgtgctgctctatttgcgtcaggagggacgtggcatcggtttaatcaacaaaattcgcgcctatcacttgcaggatgatggtgcggataccgttgaggcgaatgagcgtttagggtttgctgctgatatgcgagactatgcgttttgcaaagggatgttagagcatttagggattgacgaagtgcgtctgatgaccaacaacccccgtaagcttgcggctttgaaaaacgcacacatcaatgtcgttgagcgtgtgccactgcaagaaggtcgcaatccaagcaaccaacactatctaaaaaccaaagcaaacaaattagggcacatgtttgatccccattttgttgatcaaacggaatga

SEQ ID NO: 49311 - protein, 368 aa, Vibrio parahaemolyticus RIMD 2210633
MPFVDYPYHLSRSANMVDQILFYEPDEPHGFLSNFCHAPVEISSQSWPTSEHYYQAQKFVDAQLQTKIQKAQSPDEAFALSRQYEHLVRSDWDNMKLSVMAFIVREKFLQNPKLAQKLMRTGNACLTEHSHKDAFWGDGGDGKGLNHLGEILMNVRAELRHVEPYNLVKFIDKAKLPTQWGTFMMHGFIETATGKEHLALVYGDPTSQPAPLIRLHSECLTGDALFSTRCDCGFQLNRALQNIVEEGCGVLLYLRQEGRGIGLINKIRAYHLQDDGADTVEANERLGFAADMRDYAFCKGMLEHLGIDEVRLMTNNPRKLAALKNAHINVVERVPLQEGRNPSNQHYLKTKANKLGHMFDPHFVDQTE

SEQ ID NO: 49312 - DNA, 1215 bp, Bacteroides thetaiotaomicron VPI-5482
  CDS (1)..(1215): transl_table=11
atggaagagattaaaatggatagaatagaagatgcgattgccgatttcaaagaaggcaagtttgtcattgtagtggatgatgaagatcgtgaaaacgaaggtgatttaatcatagctgccgaaaagataactcctgagaaagttaactttatgttgaaacatgcgcgtggtgtgctctgtgcgcctatcacggtgtcgcgttgtaaagaactggatttgccgcatcaggtcagtgataatacttctgtattgggcactccttttacagtgacaattgacaaactggaaggttgtagtaccggagtttctgcttccgaccgtgctgccactattcaggcgttggccgatcctgcttctacaccggctactttcggacgtcccggacatattaatccgctgtatgcacaggaaaaaggagtacttcgtcgtgccggacatacagaagctaccatcgatatggcacgccttgccggactttaccctgcaggtgctctgatggaaataatgagcgatgacggtacgatggcacgtctgccggaacttcgtgcaatggccgatgaacatggactgaaactgatttccattcatgacttgattgcttatcgtctgaaacaggagtcaatcgtagaaaaaggcgttgaggtaaatatgccgaccgaacatggtatgttccgtctgattcctttccgtcagaaatcgaatggactggagcatatggctatatttaaaggtacatggaatgaagacgaacctatcttggtgcgtgtccattcatcttgcgctactggtgatattcttggctcacaccgttgtgactgtggcgagcaactgcataaagcgatggaaatgattgaaaaagaaggaaaaggtgtggtggtttatctgaatcaggaaggccgtggtatcggtttgatggaaaagatgaaagcatataaacttcaggaagacggtatggataccgttgacgccaacctttgcttaggacacctggcagacgaacgcgactatggagtaggagcccagattctgcgtgaactgggagtgcacaaaatgaaacttctgacaaataatcccgtgaaacgtgtagggctggaagcctatggactggaaattgtagaaaatgtacctgttgaaacagttcctaatccatataatgagcgatatctgagaacaaagaaagaaagaatgggacatacattacattttaataagtaa

SEQ ID NO: 49313 - protein, 404 aa, Bacteroides thetaiotaomicron VPI-5482
MEEIKMDRIEDAIADFKEGKFVIVVDDEDRENEGDLIIAAEKITPEKVNFMLKHARGVLCAPITVSRCKELDLPHQVSDNTSVLGTPFTVTIDKLEGCSTGVSASDRAATIQALADPASTPATFGRPGHINPLYAQEKGVLRRAGHTEATIDMARLAGLYPAGALMEIMSDDGTMARLPELRAMADEHGLKLISIHDLIAYRLKQESIVEKGVEVNMPTEHGMFRLIPFRQKSNGLEHMAIFKGTWNEDEPILVRVHSSCATGDILGSHRCDCGEQLHKAMEMIEKEGKGVVVYLNQEGRGIGLMEKMKAYKLQEDGMDTVDANLCLGHLADERDYGVGAQILRELGVHKMKLLTNNPVKRVGLEAYGLEIVENVPVETVPNPYNERYLRTKKERMGHTLHFNK

SEQ ID NO: 49314 - DNA, 1221 bp, Coxiella burnetii RSA 493
  CDS (1)..(1221): transl_table=11
atgcaaaaaccatttgataatattgaaacggcgattgtcgctttacgtcaaggtaaaatgattattttggtcgatgatgagtcgcgtgaaaatgaaggcgatttaatcattgcggcggaacatgccacaccagaacacattaatttcatgacgctttatggacggggtcttatttgtttacccatgtgctccagcgattttgagcggttaaatattcccatgatgaccagccgaaatgggtcgcgttatgagaccccttttggcgtatccattgaagctgcttacgatgttacgacgggtatttcagcccacgaccgcgcgcgcaccattcaaatagctatcgatgagaaaagtacgcctgaagacatcatcatgcccgggcatatgttcccattaaaagccaacgacgcaggtgtgctcgcgcgagccggccacacggaaggcagtgtggatttatgccgtctggcagggctaaaaccggcggctgttttatgcgaaattttaaataaagacggaagcatggcgcgattgcccgatttacaacttctggctaaacaattccgtttgccgttagtgagtattcaggaccttattacttatcggattaatcatgaaacgctcattgatgaggtttcagaatcgcttctgccaattaaaaatcgaggccgatttaccattaaaacttttcgcagtcgggtggatcacttagaacatgttgctttggttaatcagaaaatcgaggaagataaaccgtgtttagtgcgtgttcattctgaatgtttaacgggcgatgtatttggttccgcgcgctgtgattgcggcggtcagttggaagcagccttggatgaaattgcaacgcaagggggcgttttgctttacttgcgccaagagggacggggcattggtttagcgaataaaataaaagcctatgctttacaggaagccggtttagacacggtggaagccaatcatcatctcggttttggagctgatttaagggattatggtttggccgcgcaaatgttgcgagttttagggattcgggaaattcgattgttaacgaataatcccaataaagtagaaagcttaacgcggtatggcatttctgttgctgaacgggtggcgttggaaaccgcgcccacatgcgataatattcgttatctgaaagcaaagcgggaaaagctgggccatttgttgaacctcataggagaagcaaaatga

SEQ ID NO: 49315 - protein, 406 aa, Coxiella burnetii RSA 493
MQKPFDNIETAIVALRQGKMIILVDDESRENEGDLIIAAEHATPEHINFMTLYGRGLICLPMCSSDFERLNIPMMTSRNGSRYETPFGVSIEAAYDVTTGISAHDRARTIQIAIDEKSTPEDIIMPGHMFPLKANDAGVLARAGHTEGSVDLCRLAGLKPAAVLCEILNKDGSMARLPDLQLLAKQFRLPLVSIQDLITYRINHETLIDEVSESLLPIKNRGRFTIKTFRSRVDHLEHVALVNQKIEEDKPCLVRVHSECLTGDVFGSARCDCGGQLEAALDEIATQGGVLLYLRQEGRGIGLANKIKAYALQEAGLDTVEANHHLGFGADLRDYGLAAQMLRVLGIREIRLLTNNPNKVESLTRYGISVAERVALETAPTCDNIRYLKAKREKLGHLLNLIGEAK

SEQ ID NO: 49316 - DNA, 678 bp, Streptomyces avermitilis MA-4680
  CDS (1)..(678): transl_table=11
atgcgcgactcacgcaacgccaccgcatccagtgacagcaggaatccgacaggcctgtcggcaaccacggtgcgcacccgcgtgacggtcccactccgcttcggcgacggctgtacagtgaccgccgacctcgccaccttccaccacctcgccgacgggcaggaacacgtggccgtcatcctcggcgaacccgccgctggccggcccccgctggtgcgcctgcactccgagtgcctgaccggcgacgtcttcggctcggcccgctgcgactgcggcccccagctgcgcgaggcgctcgagcgcatcgccgaccgcggaggcgtcctgctctacctccgccaggagggacgcggcatcggcctctacaacaagctcgacgcctacgccctccaggaccagggcctcgacacctacgaggccaacacgaccctcggcctccccgaggacgcccgcgactacaccgccgccgcgcagatgctcgccgccctaggcatctttgagctggacctgctgtccaacaatccggacaaggcggcccagctgcgcaccctgggcctaacggtgacccagcacgttcccacgggcgtgttcaccacggcccacaacatccgctacctccgtaccaaggtggtccgcactcagcacacactgccgctgacggaactgacggtgggctga

SEQ ID NO: 49317 - protein, 225 aa, Streptomyces avermitilis MA-4680
MRDSRNATASSDSRNPTGLSATTVRTRVTVPLRFGDGCTVTADLATFHHLADGQEHVAVILGEPAAGRPPLVRLHSECLTGDVFGSARCDCGPQLREALERIADRGGVLLYLRQEGRGIGLYNKLDAYALQDQGLDTYEANTTLGLPEDARDYTAAAQMLAALGIFELDLLSNNPDKAAQLRTLGLTVTQHVPTGVFTTAHNIRYLRTKVVRTQHTLPLTELTVG

SEQ ID NO: 49318 - DNA, 693 bp, Streptomyces avermitilis MA-4680
  CDS (1)..(693): transl_table=11
atgacagaaaactttggcgtactcggcgggactgcgcatctctcaggtgtcgaacgagtcgtgaatgcccccctgcccaccgtgtacggcgatttccatgccgtcggttacctcgaccacgatcgcggagaggagcaagtggccctggtgtacggcgagatcggtgacatcgggggcctcggcggtgtgcgtggcgccggggaggagggggtgctcacccggctccattcggaatgcctgacaggggacgccttcgggtccaggcactgcgagtgcggcccccaactcaccaccgccctgcgggagatcgtcgccgcggggcgcggcatcctcgtctacctccgcggccacgagggccgggggatcggcctgctcgccaagctgcgcgcgatgaagctccaggcggaggggctggacaccgtggaggcgaacctcgccctcggcctcccggtggacgcccgtgactacggggtggcggcgaagatcctgcacgacctcggggtgaggtccgtacgcctgctctccaacaacccgcgcaaactggagtcgctgctccagcacggcatcaacgtcgtcgaacaggttccgctgctgataccgccgtgcgaggagaacatcacctatctgcgcaccaagcgggagcggctcgaccacatcctgccgcacctggacgccgtggcccgctcctcctga

SEQ ID NO: 49319 - protein, 230 aa, Streptomyces avermitilis MA-4680
MTENFGVLGGTAHLSGVERVVNAPLPTVYGDFHAVGYLDHDRGEEQVALVYGEIGDIGGLGGVRGAGEEGVLTRLHSECLTGDAFGSRHCECGPQLTTALREIVAAGRGILVYLRGHEGRGIGLLAKLRAMKLQAEGLDTVEANLALGLPVDARDYGVAAKILHDLGVRSVRLLSNNPRKLESLLQHGINVVEQVPLLIPPCEENITYLRTKRERLDHILPHLDAVARSS

SEQ ID NO: 49320 - DNA, 708 bp, Streptomyces avermitilis MA-4680
  CDS (1)..(708): transl_table=11
atgcgtgatcttccgagcgccaccgtgcgcacccgcgtcaccgtcccgctgcgtttcggcgacggctacacggtcaccggcgaactggtgaccttccacggcctggccgacggccaggaacacgtggccgtcgtactcggcgagcccggcccgaacccattggtgcgactgcactccgaatgcctgaccggagacgtcttcggctcggcccgctgcgactgcggcccgcagctgcgcgaggcggtggagcggatagccgaccgcggcggtgtcctgctctacctccgccaggaaggccggggcatcggcctctacaacaagctcgacgcgtacgccctccaggaccagggcctggacacgtacgaggcgaacgcggccctcggcctgcccgaggacggccgcgactacacggcggccgcgcagatgctcggcgccctcggcatcgacgccctcgacctgctctccaacaaccccgacaaggcgggccaactgcgcgacctgggcctcacggtcaccgaccgcgtcccgacgggcgtcttcaccaccgcccagaacgtccgctatctgcgcgccaaggtcgtccacacccagcacacactgccgctgacggaactgacggagctcaccgagcgcgcggagcgggccggactggcgaagctcaccgaacggacgggcctgacggagatgacggaactgacggcaggctga

SEQ ID NO: 49321 - protein, 235 aa, Streptomyces avermitilis MA-4680
MRDLPSATVRTRVTVPLRFGDGYTVTGELVTFHGLADGQEHVAVVLGEPGPNPLVRLHSECLTGDVFGSARCDCGPQLREAVERIADRGGVLLYLRQEGRGIGLYNKLDAYALQDQGLDTYEANAALGLPEDGRDYTAAAQMLGALGIDALDLLSNNPDKAGQLRDLGLTVTDRVPTGVFTTAQNVRYLRAKVVHTQHTLPLTELTELTERAERAGLAKLTERTGLTEMTELTAG

SEQ ID NO: 49322 - DNA, 1290 bp, Streptomyces avermitilis MA-4680
  CDS (1)..(1290): transl_table=11
atgaccacggcgccgatcctgtacagcacggacaacatcgaggacttcgcgctcgacccggtcgagcgggccatcgccgacatcgcggccggccgcccggtcgtggtcgtcgacgacgaggaccgggagaacgagggcgacctcgtcatcgccgccgagaaggcgacccccgaaatcgtcgccttcatgatgagcgagtgccgcggcctgatctgcgcgcccatggagggcggcgaactggaccgcctccagctgccgcagatggtcgaccacaacaccgagtcgatgcggacggcgttcaccgtgtcggtcgacgcgagcggcgcgcacggggtcaccaccgggatctccgccgccgaccgcgcgaccacgctccggctgctcgcccagggagaggcgggggccgccgacttcgtccgccccggccacatcttcccgctgcgcgccaagcccggcggggtcctcgtccgcaacggccacaccgaggccgccgtcgacctcgcccgcctcgcgggtctgcgaccggccggcgcgatcgtcgagatcgccggcgaggacggccacatgctgcggctgccggagctgatcccgttcgcccgcaagcacggcctgacgatcatctccatcgaggacctgatcgcctaccgccagagctccgagcccaccgtccggcgcgaggccgaggtccatctgcccaccgccttcggcgagttcacggcctacggctaccgctccaccgtcgacggcgtcgaacacgtcgccctggtccacggcgagatcggcgacggcgagggcgtactcgtccgcgtccactccgaatgcctcaccggcgacgtcttccactcgctgcgctgcgactgcggcccccagctggaggcctccctggagcgcatccgcagcgagggccgcggcgtcgtggtctacctccgcggacacgagggacgcggcatcgggctggtgtccaagctgcgcgcgtacgagctccaggagcgcggccgcgacaccctcgacgccaacctggaactcggcctgcccgccgacgcccgcgactacgcggccggtgcgcagatcctggaggacctcggcgtccgcagcctgcggctgatgaccaacaaccccgacaagaccgacgcgctcctgaggcacggcctcaaggtcaccgggcgcgagccgatgcccgtacaggcgggcgagcacaacctccggtacctgaccaccaagcgggaccggatgggccacgatctgccctggctggacacggtccccgtgtccacctgcggcaaccagtaa

SEQ ID NO: 49323 - protein, 429 aa, Streptomyces avermitilis MA-4680
MTTAPILYSTDNIEDFALDPVERAIADIAAGRPVVVVDDEDRENEGDLVIAAEKATPEIVAFMMSECRGLICAPMEGGELDRLQLPQMVDHNTESMRTAFTVSVDASGAHGVTTGISAADRATTLRLLAQGEAGAADFVRPGHIFPLRAKPGGVLVRNGHTEAAVDLARLAGLRPAGAIVEIAGEDGHMLRLPELIPFARKHGLTIISIEDLIAYRQSSEPTVRREAEVHLPTAFGEFTAYGYRSTVDGVEHVALVHGEIGDGEGVLVRVHSECLTGDVFHSLRCDCGPQLEASLERIRSEGRGVVVYLRGHEGRGIGLVSKLRAYELQERGRDTLDANLELGLPADARDYAAGAQILEDLGVRSLRLMTNNPDKTDALLRHGLKVTGREPMPVQAGEHNLRYLTTKRDRMGHDLPWLDTVPVSTCGNQ

SEQ ID NO: 49324 - DNA, 1260 bp, Chlamydophila caviae GPIC
  CDS (1)..(1260): transl_table=11
atgatgaaatccgaaggtgatgcatctgcatcatgttttgtcccaatagaaaaggcgatagcagatatctctgaggggaaatttgttattgttgttgacgaagcttcgcgagaagatgaaggggatcttatcatcgcaggtgagaagataaccgtagaaaagatggcttttcttcttaaatatacgacaggaatcgtttgtgcttctttagaacaggaaagaataagagatttagaattcccccctatggttgaagacaatcgctgtcgttatcgtacagcgtttaccgtctcagtagatgctgcaaaaggcataacgacaggggtgtcagcagcagatagaacgaaagtcgtagaattattatccaatcctaatagccgtcccgaagattttgtccgtccgggacatttctttcccttggcaggtacgccggggggggtattgaaacgagctggacataccgaggctgctttagatcttatgcgtttagcaaatatgcagccttgtggcgtcctttcagaacttgttaatgaagaccataccatgatgcgtcttgctcaaattatagaatttgctaaggaacatgaaatctcagtaatctccatatctgatttgatagcctaccggatgctctccgaaaggttagttattcctgtttcctcagcgcgtcttcctacagaatatggagatttcaatattcatgtttacgagtctcttctcgatggtattcaacacatcgctttagtgaaaggtgatgttagcggcaaagagaacgttcttgtccgagtgcattccgaatgtcttacaggagatattatggggtcgatgcgctgtgactgtgggcatcagctgcgttctgctatggaatatatcggattagaaggggaaggtgttattgtttatctacgtggtcaggaaggacgtggtattggattaggtcataaggttcgtgcttacgccttacaagatcgcgggtatgacactgtcgatgctaatttagaaataggcttccctgtcgattctagagagtatgggataggggcgcagattttggttgatctaggattgacaaagataaaattgattactcataatcctcacaagtatttcggtctgcaagggtttgggttggaaattgttgataggatcgcgcttccaattcatgtttctgaagagaacgaacattatctgcgcacaaaaaaagagcgtatggggcactggatagacctcccctatgctgaggaagtaaacataagataa

SEQ ID NO: 49325 - protein, 419 aa, Chlamydophila caviae GPIC
MMKSEGDASASCFVPIEKAIADISEGKFVIVVDEASREDEGDLIIAGEKITVEKMAFLLKYTTGIVCASLEQERIRDLEFPPMVEDNRCRYRTAFTVSVDAAKGITTGVSAADRTKVVELLSNPNSRPEDFVRPGHFFPLAGTPGGVLKRAGHTEAALDLMRLANMQPCGVLSELVNEDHTMMRLAQIIEFAKEHEISVISISDLIAYRMLSERLVIPVSSARLPTEYGDFNIHVYESLLDGIQHIALVKGDVSGKENVLVRVHSECLTGDIMGSMRCDCGHQLRSAMEYIGLEGEGVIVYLRGQEGRGIGLGHKVRAYALQDRGYDTVDANLEIGFPVDSREYGIGAQILVDLGLTKIKLITHNPHKYFGLQGFGLEIVDRIALPIHVSEENEHYLRTKKERMGHWIDLPYAEEVNIR

SEQ ID NO: 49326 - DNA, 738 bp, Bacillus cereus ATCC 14579
  CDS (1)..(738): transl_table=11
atggttacaacagatacaattcatatgttagaagataaaattcaatttatacatcaagatggaaaggatatttatttagtaggacctatcaaattgccaattaatttatatggggagactaaaattttccaatggtattcttggttacaatgtagtgaggttacaaatagtgtagaaggaattatcaaaaaactctcatctattaatttagctgatatgcagcaatctagtgtgcttgtatatggtgattttgagaattctgaagatgccctaattcgtatgcatagtatttgtcacaccggtgatatctttggtagtaaacgttgtgactgtggattccaattaaagcagtctttacaaatgattacagaacatggttcaggtgctttattttacttagcgaatcatgaaggaagaggaattggtttgtttagtaaagcaatgacgtacctcttgcaagaaaatgggttagatacagtagaagctaatctgaacctaggctttgaagatgatgttcgaaactatgatgatacaattgaagtattaaaagcgctacgctcaaaacctgtaaaacttattacaaataatccgaaaaaattagaagcgttacaaaaagctggattaaatgttacgagtcgtgaaccgttatggggtgatatctcagagtttaatgagaaatatttgcaaacgaagattcagcgttctggacattttgaagggggacacttacatgcttga

SEQ ID NO: 49327 - protein, 245 aa, Bacillus cereus ATCC 14579
MVTTDTIHMLEDKIQFIHQDGKDIYLVGPIKLPINLYGETKIFQWYSWLQCSEVTNSVEGIIKKLSSINLADMQQSSVLVYGDFENSEDALIRMHSICHTGDIFGSKRCDCGFQLKQSLQMITEHGSGALFYLANHEGRGIGLFSKAMTYLLQENGLDTVEANLNLGFEDDVRNYDDTIEVLKALRSKPVKLITNNPKKLEALQKAGLNVTSREPLWGDISEFNEKYLQTKIQRSGHFEGGHLHA

SEQ ID NO: 49328 - DNA, 1194 bp, Bacillus cereus ATCC 14579
  CDS (1)..(1194): transl_table=11
atgtttcatcgtattgaagaagctctagaagatttaaaaaaaggtaaagtcgttatcgtatgtgatgatgaaaaccgagaaaatgaaggcgattttattgctttagcagagtacattacaccagaaacaataaattttatgattacacatggccgtggtctcgtttgtgtaccgattacggaaggatacgcagaacgtctacaattagaaccaatggtatctcataatacagattcacatcatactgcgtttacagtgagcattgaccatgtctctacaacaacagggattagcgctcacgaacgtgcaactacgatacaagaattgttaaaccccgcatcaaaaggtgctgatttcaatcgacctggacatatctttccattaattgcgaaagaaggcggtgtcctgcgtcgtgcaggtcatacagaagctgctgttgatttagcaaagctatgcggtgccgaaccagctggagttatttgcgagattataaatgaggacggcacgatggcacgtgtacctgatttaatagaatgcgcaaaacaatttgatataaaaatgattacaatagaagatttaattgcttaccgccgccatcatgaaacacttgtgacgagagaagcggaaattacattacctacagatttcggtactttccacgcaattggctattctaactcattagatacgaaagaacatatcgcacttgtaaaaggtgatatttcaacaggtgaaccggtacttgtacgtgttcattctgaatgcttaacaggagatgtattcggttcacatcgctgcgattgcggaccacaactccatgcagcacttgctcaaattgagcgtgaaggaaaaggtgttcttctttatatgaggcaagaaggaagaggcattgggcttcttaataagcttcgtgcttataaattacaagaagaaggattcgatactgtagaagcaaatgaaaaactcggcttccctgctgatcttcgtgattacggtatcggtgctcaaatattaaaagatttaggtttacagagtttacgattattaacgaataacccaagaaaaattgctggcttacaaggttacgatttagaagtagtcgagcgtgtaccgttgcaaatgccagcaaaagaagagaataaatcgtatttacaaacgaaagtaaacaaattaggacacttactaaacttataa

SEQ ID NO: 49329 - protein, 397 aa, Bacillus cereus ATCC 14579
MFHRIEEALEDLKKGKVVIVCDDENRENEGDFIALAEYITPETINFMITHGRGLVCVPITEGYAERLQLEPMVSHNTDSHHTAFTVSIDHVSTTTGISAHERATTIQELLNPASKGADFNRPGHIFPLIAKEGGVLRRAGHTEAAVDLAKLCGAEPAGVICEIINEDGTMARVPDLIECAKQFDIKMITIEDLIAYRRHHETLVTREAEITLPTDFGTFHAIGYSNSLDTKEHIALVKGDISTGEPVLVRVHSECLTGDVFGSHRCDCGPQLHAALAQIEREGKGVLLYMRQEGRGIGLLNKLRAYKLQEEGFDTVEANEKLGFPADLRDYGIGAQILKDLGLQSLRLLTNNPRKIAGLQGYDLEVVERVPLQMPAKEENKSYLQTKVNKLGHLLNL

SEQ ID NO: 49330 - DNA, 1194 bp, Bacillus anthracis str. Ames
  CDS (1)..(1194): transl_table=11
atgtttcatcgtattgaagaagctctagaagatttaaaacaaggaaaagtcgttatcgtatgtgatgatgaaaaccgtgaaaacgaaggcgattttatcgctttagcagagtatattacgcccgaaacaattaactttatgattacacatggacgcggtctcgtttgtgtaccgattacggaaggatacgcagaacgtctacaattagaaccaatggtatctcataatacagattcgcatcatactgcatttacagtgagcattgaccatgtttctacaacaacaggcattagcgctcacgaacgtgcaactacaatacaacaattgttaaatcctgcatcaaaaggtgctgatttcaatcgacctggacatatctttccattaatcgcgaaagaaggcggtgtcctgcgtcgtgctggtcatacagaagctgctgtcgatttagcacagctttgcggagcagaaccagctggagtcatttgcgagattatcaatgaggacggtacgatggcacgcgtccctgatttactacagtgtgcaaaacaatttgatataaaaatgattacaatagaagatttaattgcttatcgccgccatcatgaaacacttgtgacgagagaagtggaaattacattacctacagatttcggtacttttcaagcaattggctattctaactcattagatacgaaagaacatattgcactcgtaaaaggtgatatttcaacaggtgagcctgtacttgtacgcgttcattcagagtgcttaacaggagatgtatttggctcgtgccgctgtgattgcggaccacaactccatgctgcacttgctcaaattgaacgtgaaggaaaaggcgttcttctttatatgagacaagaaggacgaggcattggccttcttaataagcttcgcgcttataagttacaagaagaaggcttcgatactgtagaagcaaacgaaaaacttgggtttcccgctgaccttcgtgattacggtatcggcgctcaaatattaaaagatttaggtttacaacatttacgattattaacgaataatccaagaaaaatcgctggcttacaaggttacgatttaaccgttacggagcgcgtaccgttgcaaatgccagcaaaagaagagaataaaacgtatttacaaacgaaagtaaacaaattaggacatttattaaacttataa

SEQ ID NO: 49331 - protein, 397 aa, Bacillus anthracis str. Ames
MFHRIEEALEDLKQGKVVIVCDDENRENEGDFIALAEYITPETINFMITHGRGLVCVPITEGYAERLQLEPMVSHNTDSHHTAFTVSIDHVSTTTGISAHERATTIQQLLNPASKGADFNRPGHIFPLIAKEGGVLRRAGHTEAAVDLAQLCGAEPAGVICEIINEDGTMARVPDLLQCAKQFDIKMITIEDLIAYRRHHETLVTREVEITLPTDFGTFQAIGYSNSLDTKEHIALVKGDISTGEPVLVRVHSECLTGDVFGSCRCDCGPQLHAALAQIEREGKGVLLYMRQEGRGIGLLNKLRAYKLQEEGFDTVEANEKLGFPADLRDYGIGAQILKDLGLQHLRLLTNNPRKIAGLQGYDLTVTERVPLQMPAKEENKTYLQTKVNKLGHLLNL

SEQ ID NO: 49332 - DNA, 585 bp, Helicobacter hepaticus ATCC 51449
  CDS (1)..(585): transl_table=11
atgaaatatgaaatatcagaacaagccaaacttcctacgcgttttggtaacttttttactaaaagttttcgtgaatatgggaaaaataacactctttttgaacatcttgtagtttttacacatacacttggagaaactcctcttgtaaggattcactctgaatgtctcacaggcgatgtttttggttcaaaaaaatgtgattgtggtaatgaacttgccttagcaatggaacaaattgcgcacaataccgaaggtggaatgcttatttatttgcgtcaagaaggacgtggtattggattatttaataaaattaatgcttatgccctgcaagataaaggctatgacacagtggaggcaaatcaacaactcggatttgcaggtgatatgcgtagttacgaaattgtgggagaaatttttaaacattttcatattacacacatcaatcttcttacaaataatccgcgtaaaatagacgcattagcaccttatgcaaaagttgtgcgtcatagcattatcacgccaagcaatccccataatcaagcatatttggaagtcaaaaaacaaaagcttgggcacttgctctaa

SEQ ID NO: 49333 - protein, 194 aa, Helicobacter hepaticus ATCC 51449
MKYEISEQAKLPTRFGNFFTKSFREYGKNNTLFEHLVVFTHTLGETPLVRIHSECLTGDVFGSKKCDCGNELALAMEQIAHNTEGGMLIYLRQEGRGIGLFNKINAYALQDKGYDTVEANQQLGFAGDMRSYEIVGEIFKHFHITHINLLTNNPRKIDALAPYAKVVRHSIITPSNPHNQAYLEVKKQKLGHLL

SEQ ID NO: 49334 - DNA, 1221 bp, Rhodopirellula baltica SH 1
  CDS (1)..(1221): transl_table=11
atgtcatcctcgattgagttgaacacgattcccgaagccgtcgaagccatcgcgcgaggcgaagtcatcatcgtgatcgacgcggaagaccgtgaaaacgaaggtgacttcatttgtgcaggcgaaaaagccacgcctgagttaatcaatttcatcctgggcgggcgtggacagttgtgtgtttcggttctgccggaagtctgcaaacgcttggaattgaccccggttgtgccgcaaaacaatgccccgctgcagacggcattcatgactccaatcgacatcgcaaccgcgaaaacggggatcaccgcggccgaacgtagcgaaacgattcgtcggttgaccgacttggaagccacccaagaagacttcgtgcgtcccggtcacgtgtacccgttattggccaaagaaggcggcgtgctgcggcgggccggccacaccgaagccgcaatcgacctgtctcgcatggccgggttggctcccgtcggtgttctgtgcgaggtcttgaacgaaaccggcgaccgcgcctcccgcgacgatctggctcgactggccaaacaacacgatttgaaaatcatcagcatcgaacacttgatcgcacatcggcgagttagcgaaaaactcgtcagccgcgccgccacgtcaaaactgccgacccgatatggcgactttgaagtcatcgtttacgaagtcaactacgaagctcaagaaccgatcgcgttggtgtacggcgacctgaccgcacccggcacaccaccgctggttcgaatgcacagcagttgcttcaccggcgatttaatccaatccctgcgttgcgattgcggcgaccagcttcacatggcactggacatgatcagtcgcgaaggccgtggtgcgttgatctacttgcctcaagaaggtcgcggcattggtttggcgcaaaagattcgtgcgtatgcattgcaagacaaaggcatggacaccgtcgaagccaaccacgctcttggattcaaagccgatatgcgtgactacggtgtgggtcttcagatcctcaaagaccttggtttgtcagaagtccgtctgctcaccaacaatccaaagaaaacgaaggcattcaacctccgtggctttgacctgaaagttgtcgaccaagtgccgatcgttccaccaaccaacgaacacaatgttcgctatttggaaacgaaacgtgaaaaaatgggtcaccagttgcctccgttgtcgtga

SEQ ID NO: 49335 - protein, 406 aa, Rhodopirellula baltica SH 1
MSSSIELNTIPEAVEAIARGEVIIVIDAEDRENEGDFICAGEKATPELINFILGGRGQLCVSVLPEVCKRLELTPVVPQNNAPLQTAFMTPIDIATAKTGITAAERSETIRRLTDLEATQEDFVRPGHVYPLLAKEGGVLRRAGHTEAAIDLSRMAGLAPVGVLCEVLNETGDRASRDDLARLAKQHDLKIISIEHLIAHRRVSEKLVSRAATSKLPTRYGDFEVIVYEVNYEAQEPIALVYGDLTAPGTPPLVRMHSSCFTGDLIQSLRCDCGDQLHMALDMISREGRGALIYLPQEGRGIGLAQKIRAYALQDKGMDTVEANHALGFKADMRDYGVGLQILKDLGLSEVRLLTNNPKKTKAFNLRGFDLKVVDQVPIVPPTNEHNVRYLETKREKMGHQLPPLS

SEQ ID NO: 49336 - DNA, 1206 bp, Haemophilus ducreyi 35000HP
  CDS (1)..(1206): transl_table=11
atgtttcaattttcaacagtagatgaagccttagcagcaattgcggcgggcaaaattattttagtttctgatgatgaaaaccgtgagaatgaaggcgatttcatttgtgccttagaatttgctacaccagaaaatattaattttatggcgacttatggcaaaggtttgatttgtacgccaatttcacaagcgctagcggataaattaagttttcatccaatggtaacaaataatacggataatcatgaaacagctttcactgtatccgttgatcatattaatacgggcaccggtatttcagcctttgaacgctcactgaccgcattaaaaatgcttgagcaaaatgcacaagcggctgattttcgtcgcccagggcatatgttcccactgattgctaaagaggggggcgtgttggtacgtaatggccatacagaagcaacagtcgatttagcgcgcttagcaggcttaaagcctgcaggcttatgttgtgaaatcatggctgatgatggcactatgatgactatgccacaattgcaagccttagccgttaaacataatatgccttttattaccattgcgcagctacaagaatatcgccgtaaatatgacagcttggttaaattggtttcagttgtgaaaatgccgactaaatatggtgaatttatggcgcatagttttgttgaagtgatttcaggcaaagaacatatcgctttagtaaaaggcgagattggtgatggtcaagccgtattagcacgtatccattcagaatgcttaaccggcgatgcctttggttctcaacgttgtgattgtggccaacaatttgctgcagcaatgacgcaaattgagaaagaagggcgaggcgttgtattatatttacgccaagaaggtcgcggtattggtttaattaataaattacgtgcctatgaactacaagataaaggtatggatacggttgaggcaaaccttgcgctaggttttaaggaagatgaacgcgaatactatattggtgcgcagattttccaagccttaggcgtgaaatccactcgcttattgaccaataatccagccaaaattagtggcttaaaacaacaaggcttaaatattatcgcacgtgagccaattattgttgaaccaaaccaaaatgatattgattacttgaaagtaaaacagatcaaaatggggcatatgtttaactttgaacaatag

SEQ ID NO: 49337 - protein, 401 aa, Haemophilus ducreyi 35000HP
MFQFSTVDEALAAIAAGKIILVSDDENRENEGDFICALEFATPENINFMATYGKGLICTPISQALADKLSFHPMVTNNTDNHETAFTVSVDHINTGTGISAFERSLTALKMLEQNAQAADFRRPGHMFPLIAKEGGVLVRNGHTEATVDLARLAGLKPAGLCCEIMADDGTMMTMPQLQALAVKHNMPFITIAQLQEYRRKYDSLVKLVSVVKMPTKYGEFMAHSFVEVISGKEHIALVKGEIGDGQAVLARIHSECLTGDAFGSQRCDCGQQFAAAMTQIEKEGRGVVLYLRQEGRGIGLINKLRAYELQDKGMDTVEANLALGFKEDEREYYIGAQIFQALGVKSTRLLTNNPAKISGLKQQGLNIIAREPIIVEPNQNDIDYLKVKQIKMGHMFNFEQ

SEQ ID NO: 49338 - DNA, 1641 bp, Prochlorococcus marinus subsp. marinus str. CCMP1375
  CDS (1)..(1641): transl_table=11
ttgacagcaacaaattccctaaatatagcctttgatcagatagcagatgctttagctgctattcgcaatggagagtgtgttgtagttgttgatgatgaaagcagggagaacgaaggagatttaatttgcgctgcacagtttgccactccacaacaaataaattttatggccactgaagcaagaggattgatttgtcttgctatggatggggaaagattagaccaacttgatcttccacttatggttgatagaaatacagattccaatcaaacagcattcactgtaagcatagatgcagggcctgaatatggagtatcaacaggtatttcagctgaagatagggcaagaacgattcaagtggctataaaccctcaaacaaagccaaataggttaagaagacccggacatgtttttcctttgagagcaaataaaggaggcgttttaaaaagggcaggacatacagaagcagctgtagatctttcacttttatctgggttatcagcggcgggggttatttgtgaaattcaaaatgcagatggttctatggctcggttaccagaactaacaaaatatgcaaaaacatggggtctaaaaataataagcattgcagacttaataagattcagattagaaaatgaaagatttgtctataggaaagcaaaaacaagattgccaagtatattcggtgacttccaagcaataggctataccaatgaactagatggcacagaacatattgcactagtgaaaggcaacataaatgaattgaaagaaccagttttagtaagaatgcactctgaatgtttaacaggagatgcttttggctcgcttaggtgtgactgtcgaccacaactagaagctgctctaaatcttatatctgaagaaggagaaggcgtcgttgtttacttacggcaagaaggtagaggtattggactaataaataaacttaaggcatatagtcttcaagatggaggattagatactgttgaagcaaatttaaaacttggctttgctgcagatttgcggaactatggagttggcgctcaaatactcaccgatcttggtatcaatagacttagattattgacaaacaatcctcgaaagattgctgggctaggaggatacgggttacgcgtggaaagtagggagccattagttattaatcctactgattataatgctaattatttagcaattaaaagaactaaacttggccactatatcggtaatgatgatgattcggggaaatattatgttatctactggaaaggaatagtttcttctaatatgttgtcagcctataaaaacaaagcagagcaaatagcctcagataataaagtagagttaaatccagagtcctcatccagattactggcattactccaaaggcctcagtttgtttggagggtacaaaattgtattgattttgaatctataattaatctattaaaagaaattataaaatgggacggtactaaaagtataggtatctttataacaaatagcaaagaacaagctattcatccttcacaagatgtagaaactatacttgaaaatatatccaatttaaaagatactaattacaaaaatatagctaatatcaatgataaggatctaccatttattatgacttggcaataa

SEQ ID NO: 49339 - protein, 546 aa, Prochlorococcus marinus subsp. marinus str. CCMP1375
MTATNSLNIAFDQIADALAAIRNGECVVVVDDESRENEGDLICAAQFATPQQINFMATEARGLICLAMDGERLDQLDLPLMVDRNTDSNQTAFTVSIDAGPEYGVSTGISAEDRARTIQVAINPQTKPNRLRRPGHVFPLRANKGGVLKRAGHTEAAVDLSLLSGLSAAGVICEIQNADGSMARLPELTKYAKTWGLKIISIADLIRFRLENERFVYRKAKTRLPSIFGDFQAIGYTNELDGTEHIALVKGNINELKEPVLVRMHSECLTGDAFGSLRCDCRPQLEAALNLISEEGEGVVVYLRQEGRGIGLINKLKAYSLQDGGLDTVEANLKLGFAADLRNYGVGAQILTDLGINRLRLLTNNPRKIAGLGGYGLRVESREPLVINPTDYNANYLAIKRTKLGHYIGNDDDSGKYYVIYWKGIVSSNMLSAYKNKAEQIASDNKVELNPESSSRLLALLQRPQFVWRVQNCIDFESIINLLKEIIKWDGTKSIGIFITNSKEQAIHPSQDVETILENISNLKDTNYKNIANINDKDLPFIMTWQ

SEQ ID NO: 49340 - DNA, 600 bp, Candidatus Blochmannia floridanus
  CDS (1)..(600): transl_table=11
atgcaattaaaacgcgtagcagaagcaaaactaccaacattttggggagactttttaataataggatttaaagaaaatcaaacagaacacaatcatattgctttaacatatggtgatcttacaggatcaaatccagtactaacacgcatacattctgaatgtttaacaggtgatgcactatttagttctagatgtgattgtggtattcaattaagtacagcattacgttatattacggaagaaggccaaggtatattgatatatcatcgacaagaaggacgtaatattggtctactcaataaaattcgtgcttattccttacaagatcatggagcagatactgtagaagcaaatcaatgcttaggttttaatgcagatgaaagagatttcacagtatgtgcagatattttaaaattattgaacatacaaactattcgccttttgacaaataatcctcaaaaaatagaaatattaaataaatcccatatcatagttacggaaagagttccgctaatagtaggaagaaatcctaaaaattcaaaatatctagatacaaaagcactaaaattaggacatttattttcttcctactacaaataa

SEQ ID NO: 49341 - protein, 199 aa, Candidatus Blochmannia floridanus
MQLKRVAEAKLPTFWGDFLIIGFKENQTEHNHIALTYGDLTGSNPVLTRIHSECLTGDALFSSRCDCGIQLSTALRYITEEGQGILIYHRQEGRNIGLLNKIRAYSLQDHGADTVEANQCLGFNADERDFTVCADILKLLNIQTIRLLTNNPQKIEILNKSHIIVTERVPLIVGRNPKNSKYLDTKALKLGHLFSSYYK

SEQ ID NO: 49342 - DNA, 1734 bp, Prochlorococcus marinus subsp. pastoris str. CCMP1986
  CDS (1)..(1734): transl_table=11
atgaaagaaacaagtcccaaatcaaataatggaacaattgtggataataacgaaaattttaatatagaatttgatcccataagcgatgcattagctgccataagaaatggagaatgcataattgttgttgatgatgagagaagagaaaatgaaggcgatttaatttgtgccgctcagtttgcaactcctcaacaaattaattttatggcaacagagggtagaggtttaatatgtttagcaatgcaaggagagaagttagatgccttagatcttcctttaatggttgataggaatacagatgaaaatcaaactgcatttactatttcaatagatgcaggtcctgagaataatgtaactactggaatatcagcagaggatagagctaaaactatccaagttgcaataaatccttcaactaagccagaagatttaagaagaccaggacatatatttccactaagagcaaaaaaaggaggagtattaaaaagagctggacataccgaagcagctgtagacattgctgctatgtctggtctttatcctgctggtgtgatttgtgaaattcaaaatccagatggttcaatgtcaagacttccacaacttaagcaatatgcaaaagaatggggcatgaagctaatatccattgcagacctaatcagttatagatttcaaaacgaaagatttgtttatagaaaatctgacgcaatcctccctagtattttcggtaattttaaggcatatggatacataaatgaacttgacggttctgaacatattgcactagtaaagcaaaagtcaaataaattgagtgaaccagtattagtaaggatgcattcagaatgtttaaccggtgatgcttttggatcactacgttgtgattgtagaccccagttagaggccgcgttagcaaggattgaaaaagaagaagagggtgtggttgtttatttaagacaagaaggaagaggtattggtttgattaataaattaaaagcatacagtttacaagatggtggtttggatactgtagaagcaaatgaaaaattgggttttcctgcagacctaagaaattatggagttggagcacaaatattaactgaccttgggatcaaaaagttaaaactacttacaaataatcctaggaaaattgctggattaggtggatatggaatagaagttacagagagagtcccattagtgatatgtcctggagagcataattctgaatatctaaatgttaagagacaaaaacttggacatatgttggaagaagaaaaattaaattcaatagatatagatccttatattgctattttcctagatggtgactataaatcaatagatttagttcctatcaaaaataaaataattgaattctgcgaaaaaaataaaataaatattatgttagaaagctctcctagactattagcattttggaatagacctaaattagtatggaaaatattgcatgacaaaaacagagaagatttcactattaacgataatgaaattaataagattgaaatttttattaaatttttatcagaatataataaaagttcaaaagtaggaattatcgtatcaaaaaatattcaacaggctttacatccaaaaaacagtattaaattaaaaaataccaagttttcaataaagaatgaagaattacactcatccactaggaaatttaatctcgataaagaaacgttcagtattatatttgataaaaaattatcttaa
